United States Patent Application Publication US 2007/0214517 A1 - sequence listing, part 80

SEQ ID NO: 103509 - protein, 362 aa, Arabidopsis thaliana
  peptide (1)..(362): Ceres Seq. ID no. 13612902
  misc_feature (211)..(310): Pfam Name: 2OG-Fe(II) oxygenase superfamily Pfam Description: 2OG-Fe(II) oxygenase superfamily
  misc_feature (1)..(362): Homolog of NCBI NO: 15239870 NR Description: 2-oxoglutarate-dependent dioxygenase, putative
  misc_feature (1)..(362): Homolog of NCBI NO: 14596165 NR Description: 1-aminocyclopropane-1-carboxylate oxidase
  misc_feature (1)..(362): Homolog of NCBI NO: 15239868 NR Description: 2-oxoglutarate-dependent dioxygenase, putative
  misc_feature (1)..(362): Homolog of NCBI NO: 15238459 NR Description: oxidoreductase, 2OG-Fe(II) oxygenase family
  misc_feature (1)..(362): Homolog of NCBI NO: 15238458 NR Description: 2-oxoglutarate-dependent dioxygenase, putative
  misc_feature (5)..(362): Homolog of NCBI NO: 15219715 NR Description: 2-oxoglutarate-dependent dioxygenase, putative
  misc_feature (31)..(362): Homolog of NCBI NO: 15219718 NR Description: 2-oxoglutarate-dependent dioxygenase, putative
  misc_feature (8)..(357): Homolog of NCBI NO: 30679748 NR Description: 2-oxoglutarate-dependent dioxygenase, putative thaliana] >gi|30102640|gb|AAP21238.1| At1g06620 [Arabidopsis
  misc_feature (9)..(362): Homolog of NCBI NO: 15221545 NR Description: 2-oxoglutarate-dependent dioxygenase, putative thaliana] >gi|23296334|gb|AAN13044.1| putative oxidoreductase
  misc_feature (2)..(346): Homolog of NCBI NO: 15221544 NR Description: 2-oxoglutarate-dependent dioxygenase, putative thaliana] >gi|13430546|gb|AAK25895.1|AF360185_1 putative [Arabidopsis thaliana] >gi|14532752|gb|AAK64077.1| putative
MTENSEKIDRLNDLTTFISTKTGVKGLVDAEITEVPSMFHVPSSILSNNRPSDISGLNLTVPIIDLGDRNTSSRNVVISKIKDAAENWGFFQVINHDVPLTVLEEIKESVRRFHEQDPVVKNQYLPTDNNKRFVYNNDFDLYHSSPLNWRDSFTCYIAPDPPNPEEIPLACRSAVIEYTKHVMELGAVLFQLLSEALGLDSETLKRIDCLKGLFMLCHYYPPCPQPDLTLGISKHTDNSFLTLLLQDQIGGLQVLHEDYWVDVPPVPGALVVNIGDFMQLITNDKFLSVEHRVRPNKDRPRISVACFFSSSLSPNSTVYGPIKDLLSDENPAKYKDITIPEYTAGFLASIFDEKSYLTNYMI

SEQ ID NO: 103510 - protein, 325 aa, Arabidopsis thaliana
  peptide (1)..(325): Ceres Seq. ID no. 13612903
  misc_feature (174)..(273): Pfam Name: 2OG-Fe(II) oxygenase superfamily Pfam Description: 2OG-Fe(II) oxygenase superfamily
  misc_feature (1)..(325): Homolog of NCBI NO: 15239870 NR Description: 2-oxoglutarate-dependent dioxygenase, putative
  misc_feature (1)..(325): Homolog of NCBI NO: 14596165 NR Description: 1-aminocyclopropane-1-carboxylate oxidase
  misc_feature (1)..(325): Homolog of NCBI NO: 15239868 NR Description: 2-oxoglutarate-dependent dioxygenase, putative
  misc_feature (1)..(325): Homolog of NCBI NO: 15238459 NR Description: oxidoreductase, 2OG-Fe(II) oxygenase family
  misc_feature (1)..(325): Homolog of NCBI NO: 15238458 NR Description: 2-oxoglutarate-dependent dioxygenase, putative
  misc_feature (1)..(325): Homolog of NCBI NO: 15219715 NR Description: 2-oxoglutarate-dependent dioxygenase, putative
  misc_feature (1)..(325): Homolog of NCBI NO: 15219718 NR Description: 2-oxoglutarate-dependent dioxygenase, putative
  misc_feature (1)..(320): Homolog of NCBI NO: 30679748 NR Description: 2-oxoglutarate-dependent dioxygenase, putative thaliana] >gi|30102640|gb|AAP21238.1| At1g06620 [Arabidopsis
  misc_feature (1)..(325): Homolog of NCBI NO: 15221545 NR Description: 2-oxoglutarate-dependent dioxygenase, putative thaliana] >gi|23296334|gb|AAN13044.1| putative oxidoreductase
  misc_feature (1)..(309): Homolog of NCBI NO: 15221544 NR Description: 2-oxoglutarate-dependent dioxygenase, putative thaliana] >gi|13430546|gb|AAK25895.1|AF360185_1 putative [Arabidopsis thaliana] >gi|14532752|gb|AAK64077.1| putative
MFHVPSSILSNNRPSDISGLNLTVPIIDLGDRNTSSRNVVISKIKDAAENWGFFQVINHDVPLTVLEEIKESVRRFHEQDPVVKNQYLPTDNNKRFVYNNDFDLYHSSPLNWRDSFTCYIAPDPPNPEEIPLACRSAVIEYTKHVMELGAVLFQLLSEALGLDSETLKRIDCLKGLFMLCHYYPPCPQPDLTLGISKHTDNSFLTLLLQDQIGGLQVLHEDYWVDVPPVPGALVVNIGDFMQLITNDKFLSVEHRVRPNKDRPRISVACFFSSSLSPNSTVYGPIKDLLSDENPAKYKDITIPEYTAGFLASIFDEKSYLTNYMI

SEQ ID NO: 103511 - DNA, 1480 bp, Arabidopsis thaliana
  misc_feature (1)..(1480): Ceres Seq. ID no. 13612907
  misc_feature: MA Experiment ID: 108488 Result: Down-regulated in Transcription
  misc_feature: MA Experiment ID: 108573 Result: Up-regulated in Transcription
  misc_feature: MA Experiment 108573 PARAMETER Experiment Name: At_Drought_cDNA_P Parameter: Timepoint (hr) Value: 6
  misc_feature: MA Experiment 108573 PARAMETER Experiment Name: At_Drought_cDNA_P Parameter: Tissue Value: Aerial
  misc_feature: MA Experiment 108573 PARAMETER Experiment Name: At_Drought_cDNA_P Parameter: Treatment Value: Drought vs. No Drought
  misc_feature: MA Experiment ID: 108576 Result: Up-regulated in Transcription
  misc_feature: MA Experiment 108576 PARAMETER Experiment Name: At_42deg_Heat_cDNA_P Parameter: Temperature (deg C) Value: 42 vs. 22
  misc_feature: MA Experiment 108576 PARAMETER Experiment Name: At_42deg_Heat_cDNA_P Parameter: Timepoint (hr) Value: 1
  misc_feature: MA Experiment 108576 PARAMETER Experiment Name: At_42deg_Heat_cDNA_P Parameter: Tissue Value: Aerial
  misc_feature: MA Experiment ID: 108577 Result: Up-regulated in Transcription
  misc_feature: MA Experiment 108577 PARAMETER Experiment Name: At_42deg_Heat_cDNA_P Parameter: Temperature (deg C) Value: 42 vs. 22
  misc_feature: MA Experiment 108577 PARAMETER Experiment Name: At_42deg_Heat_cDNA_P Parameter: Timepoint (hr) Value: 6
  misc_feature: MA Experiment 108577 PARAMETER Experiment Name: At_42deg_Heat_cDNA_P Parameter: Tissue Value: Aerial
  misc_feature: MA Experiment ID: 108579 Result: Up-regulated in Transcription
  misc_feature: MA Experiment 108579 PARAMETER Experiment Name: At_4deg_Cold_cDNA_P Parameter: Temperature (deg C) Value: 4 vs. 22
  misc_feature: MA Experiment 108579 PARAMETER Experiment Name: At_4deg_Cold_cDNA_P Parameter: Timepoint (hr) Value: 6
  misc_feature: MA Experiment 108579 PARAMETER Experiment Name: At_4deg_Cold_cDNA_P Parameter: Tissue Value: Aerial
  misc_feature: MA Experiment ID: 108594 Result: Up-regulated in Transcription
  misc_feature: MA Experiment 108594 PARAMETER Experiment Name: At_Ler-rhl_Root_cDNA_P Parameter: Plant Line Value: null
  misc_feature: MA Experiment ID: 108595 Result: Up-regulated in Transcription
  misc_feature: MA Experiment 108595 PARAMETER Experiment Name: At_Ler-pi_Ovule_cDNA_P Parameter: Plant Line Value: null
  misc_feature: MA Experiment ID: 108667 Result: Up-regulated in Transcription
  misc_feature: MA Experiment 108667 PARAMETER Experiment Name: At_2mM_SA_cDNA_P Parameter: Plant Line Value: WS
  misc_feature: MA Experiment 108667 PARAMETER Experiment Name: At_2mM_SA_cDNA_P Parameter: Timepoint (hr) Value: 1
  misc_feature: MA Experiment 108667 PARAMETER Experiment Name: At_2mM_SA_cDNA_P Parameter: Treatment Value: 2mM SA vs. No Treatment
  misc_feature: MA Experiment ID: 108668 Result: Up-regulated in Transcription
  misc_feature: MA Experiment 108668 PARAMETER Experiment Name: At_2mM_SA_cDNA_P Parameter: Plant Line Value: WS
  misc_feature: MA Experiment 108668 PARAMETER Experiment Name: At_2mM_SA_cDNA_P Parameter: Timepoint (hr) Value: 6
  misc_feature: MA Experiment 108668 PARAMETER Experiment Name: At_2mM_SA_cDNA_P Parameter: Treatment Value: 2mM SA vs. No Treatment
  misc_feature: MA Experiment ID: 20000093 Result: Up-regulated in Transcription
  misc_feature: MA Experiment 20000093 PARAMETER Experiment Name: At_42deg_Heat_cDNA_P Parameter: Temperature (deg C) Value: 42 vs. 22
  misc_feature: MA Experiment 20000093 PARAMETER Experiment Name: At_42deg_Heat_cDNA_P Parameter: Timepoint (hr) Value: 0.5
  misc_feature: MA Experiment 20000093 PARAMETER Experiment Name: At_42deg_Heat_cDNA_P Parameter: Tissue Value: Aerial
  misc_feature: MA Experiment ID: 20000111 Result: Up-regulated in Transcription
  misc_feature: MA Experiment 20000111 PARAMETER Experiment Name: At_42deg_Heat_cDNA_P Parameter: Temperature (deg C) Value: 42 vs. 22
  misc_feature: MA Experiment 20000111 PARAMETER Experiment Name: At_42deg_Heat_cDNA_P Parameter: Timepoint (hr) Value: 6
  misc_feature: MA Experiment 20000111 PARAMETER Experiment Name: At_42deg_Heat_cDNA_P Parameter: Tissue Value: Aerial
  misc_feature: MA Experiment ID: 20000112 Result: Up-regulated in Transcription
  misc_feature: MA Experiment 20000112 PARAMETER Experiment Name: At_42deg_Heat_cDNA_P Parameter: Temperature (deg C) Value: 42 vs. 22
  misc_feature: MA Experiment 20000112 PARAMETER Experiment Name: At_42deg_Heat_cDNA_P Parameter: Timepoint (hr) Value: 2
  misc_feature: MA Experiment 20000112 PARAMETER Experiment Name: At_42deg_Heat_cDNA_P Parameter: Tissue Value: Aerial
  misc_feature: MA Experiment ID: 20000113 Result: Up-regulated in Transcription
  misc_feature: MA Experiment 20000113 PARAMETER Experiment Name: At_42deg_Heat_cDNA_P Parameter: Temperature (deg C) Value: 42 vs. 22
  misc_feature: MA Experiment 20000113 PARAMETER Experiment Name: At_42deg_Heat_cDNA_P Parameter: Timepoint (hr) Value: 8
  misc_feature: MA Experiment 20000113 PARAMETER Experiment Name: At_42deg_Heat_cDNA_P Parameter: Tissue Value: Aerial
  misc_feature: MA Experiment ID: 20000144 Result: Up-regulated in Transcription
  misc_feature: MA Experiment 20000144 PARAMETER Experiment Name: At_42deg_Heat_cDNA_P Parameter: Temperature (deg C) Value: 42 vs. 22
  misc_feature: MA Experiment 20000144 PARAMETER Experiment Name: At_42deg_Heat_cDNA_P Parameter: Timepoint (hr) Value: 1
  misc_feature: MA Experiment 20000144 PARAMETER Experiment Name: At_42deg_Heat_cDNA_P Parameter: Tissue Value: Aerial
agattcgttttatttttcaatcgtttcaatttctaaaattctcaacgcgatcaccccaatccaaatttagggtttcttttgtctttctgcgatcgatctctggtaactcataacttgttgttgaatcgcgaagatggcatcaaacggatccttctctgctcagagaaacgcaaacgctggaacaacgatgaagagacgaaacgacaatcgcggttacggtggcggaatcggatgttatcaagaggagaggaaccgttacgcgccgccgcaaaaacgtttcagatcgcaactgcaacagcaattccgatctggtcataatcctctgtatcattatggtagtaatactaataataacgtgtctagggtttcttctcagtcatataacaattacggtgttgatgtgattgcttctaattcaagttttgctttacctaacaatgattctaacaccaacaattatcagaaaccctttgttgtttatggaaaccctaatccccaaattgttcctcttccattaccttatcgtaagcttgatcctttagattcgttgcctcaatgggttccaaattcaactccgaattatcctgttaggtcatcgaattttgtaccaaacacacctgattttacgaatgttcaaaatccgatgaatcattcgaacatggtttcagttgtgtctcaatcgatgcatcaaccaattgttttaagcaaagaattgactgatttgcttagtcttcttaacaatgagaaagagaagaaaacttcagaagcaagtaataatgattcattgcctgttggattaagctttgacaatccatcatcgcttaatgttcgacatgaatctgtgattaagtctctgtattctgatatgccgaggcaatgtacttcgtgtggggtgagattcaaatgtcaagaagagcatagtaaacatatggattggcacgtaaggaagaacaggtcggtgaaaaccactacaagacttggtcagcaaccgaagaaatcgaggggatggttagcgagtgcatctttatggctttgtgcaccaacgggaggagggaccgtagaagtagcatcttttggaggaggagaaatgcagaagaagaatgaaaaggatcaagtacaaaaacaacacatggtgcctgcggatgaagatcagaagaattgcgcgttatgcgtagagccgtttgaagagttctttagccatgaagctgatgactggatgtacaaagatgcagtctacttaaccaagaatggtcgtatagttcatgttaagtgtatgcctgaaccccgacctgctaaggatttgagagagccgtcgagggtaatgtctgttacagttccatcggttgcgaaagctatactctgctgattgagattttttatatctctgttttagtcattcgtttttttaaaagtaaatgtacattacattaatcaagatgtaacacaaatacagttctatcaattgaatctcctattttac

SEQ ID NO: 103512 - protein, 410 aa, Arabidopsis thaliana
  peptide (1)..(410): Ceres Seq. ID no. 13612908
  misc_feature (1)..(410): Homolog of NCBI NO: 15239923 NR Description: S-locus protein 4-related [Arabidopsis thaliana]
  misc_feature (1)..(410): Homolog of NCBI NO: 15219679 NR Description: expressed protein [Arabidopsis thaliana]
  misc_feature (1)..(410): Homolog of NCBI NO: 18086323 NR Description: At1g66500/F28G11_6 [Arabidopsis thaliana]
  misc_feature (2)..(393): Homolog of NCBI NO: 6069478 NR Description: S-locus protein 4 [Brassica rapa]
  misc_feature (144)..(393): Homolog of NCBI NO: 18642418 NR Description: putative PCF11 protein [Brassica napus]
  misc_feature (2)..(149): Homolog of NCBI NO: 18642418 NR Description: putative PCF11 protein [Brassica napus]
  misc_feature (219)..(395): Homolog of NCBI NO: 30679905 NR Description: S-locus protein 4-related [Arabidopsis thaliana]
  misc_feature (219)..(391): Homolog of NCBI NO: 4115937 NR Description: contains similarity to human PCF11p homolog
  misc_feature (143)..(384): Homolog of NCBI NO: 38637067 NR Description: putative S-locus protein 4 [Oryza sativa
  misc_feature (154)..(381): Homolog of NCBI NO: 18404146 NR Description: expressed protein [Arabidopsis thaliana]
MASNGSFSAQRNANAGTTMKRRNDNRGYGGGIGCYQEERNRYAPPQKRFRSQLQQQFRSGHNPLYHYGSNTNNNVSRVSSQSYNNYGVDVIASNSSFALPNNDSNTNNYQKPFVVYGNPNPQIVPLPLPYRKLDPLDSLPQWVPNSTPNYPVRSSNFVPNTPDFTNVQNPMNHSNMVSVVSQSMHQPIVLSKELTDLLSLLNNEKEKKTSEASNNDSLPVGLSFDNPSSLNVRHESVIKSLYSDMPRQCTSCGVRFKCQEEHSKHMDWHVRKNRSVKTTTRLGQQPKKSRGWLASASLWLCAPTGGGTVEVASFGGGEMQKKNEKDQVQKQHMVPADEDQKNCALCVEPFEEFFSHEADDWMYKDAVYLTKNGRIVHVKCMPEPRPAKDLREPSRVMSVTVPSVAKAILC

SEQ ID NO: 103513 - protein, 392 aa, Arabidopsis thaliana
  peptide (1)..(392): Ceres Seq. ID no. 13612909
  misc_feature (1)..(392): Homolog of NCBI NO: 15239923 NR Description: S-locus protein 4-related [Arabidopsis thaliana]
  misc_feature (1)..(392): Homolog of NCBI NO: 15219679 NR Description: expressed protein [Arabidopsis thaliana]
  misc_feature (1)..(392): Homolog of NCBI NO: 18086323 NR Description: At1g66500/F28G11_6 [Arabidopsis thaliana]
  misc_feature (1)..(375): Homolog of NCBI NO: 6069478 NR Description: S-locus protein 4 [Brassica rapa]
  misc_feature (126)..(375): Homolog of NCBI NO: 18642418 NR Description: putative PCF11 protein [Brassica napus]
  misc_feature (1)..(131): Homolog of NCBI NO: 18642418 NR Description: putative PCF11 protein [Brassica napus]
  misc_feature (201)..(377): Homolog of NCBI NO: 30679905 NR Description: S-locus protein 4-related [Arabidopsis thaliana]
  misc_feature (201)..(373): Homolog of NCBI NO: 4115937 NR Description: contains similarity to human PCF11p homolog
  misc_feature (125)..(366): Homolog of NCBI NO: 38637067 NR Description: putative S-locus protein 4 [Oryza sativa
  misc_feature (136)..(363): Homolog of NCBI NO: 18404146 NR Description: expressed protein [Arabidopsis thaliana]
MKRRNDNRGYGGGIGCYQEERNRYAPPQKRFRSQLQQQFRSGHNPLYHYGSNTNNNVSRVSSQSYNNYGVDVIASNSSFALPNNDSNTNNYQKPFVVYGNPNPQIVPLPLPYRKLDPLDSLPQWVPNSTPNYPVRSSNFVPNTPDFTNVQNPMNHSNMVSVVSQSMHQPIVLSKELTDLLSLLNNEKEKKTSEASNNDSLPVGLSFDNPSSLNVRHESVIKSLYSDMPRQCTSCGVRFKCQEEHSKHMDWHVRKNRSVKTTTRLGQQPKKSRGWLASASLWLCAPTGGGTVEVASFGGGEMQKKNEKDQVQKQHMVPADEDQKNCALCVEPFEEFFSHEADDWMYKDAVYLTKNGRIVHVKCMPEPRPAKDLREPSRVMSVTVPSVAKAILC

SEQ ID NO: 103514 - protein, 240 aa, Arabidopsis thaliana
  peptide (1)..(240): Ceres Seq. ID no. 13612910
  misc_feature (1)..(240): Homolog of NCBI NO: 15239923 NR Description: S-locus protein 4-related [Arabidopsis thaliana]
  misc_feature (1)..(240): Homolog of NCBI NO: 15219679 NR Description: expressed protein [Arabidopsis thaliana]
  misc_feature (1)..(240): Homolog of NCBI NO: 18086323 NR Description: At1g66500/F28G11_6 [Arabidopsis thaliana]
  misc_feature (1)..(223): Homolog of NCBI NO: 6069478 NR Description: S-locus protein 4 [Brassica rapa]
  misc_feature (1)..(223): Homolog of NCBI NO: 18642418 NR Description: putative PCF11 protein [Brassica napus]
  misc_feature (49)..(225): Homolog of NCBI NO: 30679905 NR Description: S-locus protein 4-related [Arabidopsis thaliana]
  misc_feature (49)..(221): Homolog of NCBI NO: 4115937 NR Description: contains similarity to human PCF11p homolog
  misc_feature (1)..(214): Homolog of NCBI NO: 38637067 NR Description: putative S-locus protein 4 [Oryza sativa
  misc_feature (1)..(211): Homolog of NCBI NO: 18404146 NR Description: expressed protein [Arabidopsis thaliana]
  misc_feature (1)..(211): Homolog of NCBI NO: 25408479 NR Description: hypothetical protein At2g36480 [imported] -
MNHSNMVSVVSQSMHQPIVLSKELTDLLSLLNNEKEKKTSEASNNDSLPVGLSFDNPSSLNVRHESVIKSLYSDMPRQCTSCGVRFKCQEEHSKHMDWHVRKNRSVKTTTRLGQQPKKSRGWLASASLWLCAPTGGGTVEVASFGGGEMQKKNEKDQVQKQHMVPADEDQKNCALCVEPFEEFFSHEADDWMYKDAVYLTKNGRIVHVKCMPEPRPAKDLREPSRVMSVTVPSVAKAILC

SEQ ID NO: 103515 - DNA, 1213 bp, Arabidopsis thaliana
  misc_feature (1)..(1213): Ceres Seq. ID no. 13612931
  misc_feature: MA Experiment ID: 20000180 Result: Down-regulated in Transcription
  misc_feature: MA Experiment 20000180 PARAMETER Experiment Name: At_Germinating_Seeds_P Parameter: Age (hr) Value: 24 vs. 0
  misc_feature: MA Experiment 20000180 PARAMETER Experiment Name: At_Germinating_Seeds_P Parameter: Tissue Value: Germinating Seeds
  misc_feature: MA Experiment ID: 20000182 Result: Up-regulated in Transcription
  misc_feature: MA Experiment 20000182 PARAMETER Experiment Name: At_2mM_SA_P Parameter: Age (day) Value: 14
  misc_feature: MA Experiment 20000182 PARAMETER Experiment Name: At_2mM_SA_P Parameter: Organism Value: A. thaliana
  misc_feature: MA Experiment 20000182 PARAMETER Experiment Name: At_2mM_SA_P Parameter: Plant Line Value: WS
  misc_feature: MA Experiment 20000182 PARAMETER Experiment Name: At_2mM_SA_P Parameter: Timepoint (hr) Value: 6
  misc_feature: MA Experiment 20000182 PARAMETER Experiment Name: At_2mM_SA_P Parameter: Tissue Value: Aerial
  misc_feature: MA Experiment 20000182 PARAMETER Experiment Name: At_2mM_SA_P Parameter: Treatment Value: 2mM SA vs. No Treatment
  misc_feature: MA Experiment ID: 20000495 Result: Up-regulated in Transcription
  misc_feature: MA Experiment 20000495 PARAMETER Experiment Name: At_Guard_Cells_P Parameter: Harvest Date Value: 8/2/2002
  misc_feature: MA Experiment 20000495 PARAMETER Experiment Name: At_Guard_Cells_P Parameter: Organism Value: A. thaliana
  misc_feature: MA Experiment 20000495 PARAMETER Experiment Name: At_Guard_Cells_P Parameter: Tissue Value: Guard Cells vs. Leaves
acatttttttgtctttaaagctcaaaacaaaagacaaaaaaaaaacggaaaactttcttttttccggacacataaaaacaacacaaactttattagacagaaacaaactagtaaaaagattttgaacatcaagaaacaaaaatctctctctgtctttctcaattatgaaactcacctatcaattcttcatcttctggttctttttaccattctttgcaatctccggtgatgatgattataaaaatctgatctttaaaggttgtgcaaatcagaaatctccagacccaactggtgttttctctcagaatctcaaaaacttattcacttctttagtttctcaatcatcacaaagctctttcgcttccgtaacctccggaactgataacaccaccgccgtgatcggtgtttttcagtgccgtggcgatctccaaaacgctcagtgttacgattgcgtctccaaaatccctaaactcgtttctaaactctgcggtggcggcagagatgacggtaatgtggtggcggctcgtgttcacctcgctggatgttatatccggtatgagagttcaggattccggcaaacttccggtacggagatgttgttccgtgtctgtgggaaaaaagattctaacgatcctgggtttgtcgggaaaagggagacggcgtttggtatggcggagaacggcgtgaaaactggatcatccggtggtggtggtggcggaggaggtttttacgcggggcagtatgagtcggtgtatgtgttgggacagtgtgagggtagtttgggaaattcagattgtggggaatgtgtgaaagatggatttgagaaagcaaagagtgagtgtggagagtcgaactcgggacaagtttaccttcagaagtgcttcgttagctatagttactactctcatggtgttcccaacatagagccattatcaggtggagagaagagacaacacacagaaaggacgatagctttggcggtgggaggagtttttgttttagggtttgtgattgtttgtttgttggttttgaggtctgccatgaagaagaagagtaataaatatgatgcttattgattcttatttttacctaccaattcttattttcccaattaaaaatttaacaaggtatattagaaaaatgattagtatagcatgtccaattgtatattcaattatgatattgatttaaatacaaataaattttgattttt

SEQ ID NO: 103516 - protein, 303 aa, Arabidopsis thaliana
  peptide (1)..(303): Ceres Seq. ID no. 13612932
  misc_feature (78)..(138): Pfam Name: Domain of unknown function DUF26 Pfam Description: Domain of unknown function DUF26
  misc_feature (1)..(303): Homolog of NCBI NO: 30694417 NR Description: expressed protein [Arabidopsis thaliana]
  misc_feature (1)..(288): Homolog of NCBI NO: 26451089 NR Description: unknown protein [Arabidopsis thaliana]
  misc_feature (1)..(258): Homolog of NCBI NO: 9758557 NR Description: gb|AAB80651.1~gene_id:MRH10.9~similar to unknown
  misc_feature (18)..(300): Homolog of NCBI NO: 18403243 NR Description: expressed protein [Arabidopsis thaliana] Unknown protein [Arabidopsis thaliana] unknown protein [Arabidopsis thaliana]
  misc_feature (1)..(300): Homolog of NCBI NO: 38566686 NR Description: At1g04520 [Arabidopsis thaliana]
  misc_feature (1)..(251): Homolog of NCBI NO: 15219740 NR Description: hypothetical protein [Arabidopsis thaliana]
  misc_feature (18)..(251): Homolog of NCBI NO: 25408259 NR Description: hypothetical protein At2g33330 [imported] -
  misc_feature (1)..(299): Homolog of NCBI NO: 15229281 NR Description: hypothetical protein [Arabidopsis thaliana]
  misc_feature (1)..(291): Homolog of NCBI NO: 6721149 NR Description: hypothetical protein, 3' partial [Arabidopsis
  misc_feature (27)..(295): Homolog of NCBI NO: 18409653 NR Description: expressed protein [Arabidopsis thaliana] Unknown protein [Arabidopsis thaliana]
MKLTYQFFIFWFFLPFFAISGDDDYKNLIFKGCANQKSPDPTGVFSQNLKNLFTSLVSQSSQSSFASVTSGTDNTTAVIGVFQCRGDLQNAQCYDCVSKIPKLVSKLCGGGRDDGNVVAARVHLAGCYIRYESSGFRQTSGTEMLFRVCGKKDSNDPGFVGKRETAFGMAENGVKTGSSGGGGGGGGFYAGQYESVYVLGQCEGSLGNSDCGECVKDGFEKAKSECGESNSGQVYLQKCFVSYSYYSHGVPNIEPLSGGEKRQHTERTIALAVGGVFVLGFVIVCLLVLRSAMKKKSNKYDAY

SEQ ID NO: 103517 - protein, 160 aa, Arabidopsis thaliana
  peptide (1)..(160): Ceres Seq. ID no. 13612933
  misc_feature (1)..(160): Homolog of NCBI NO: 30694417 NR Description: expressed protein [Arabidopsis thaliana]
  misc_feature (1)..(145): Homolog of NCBI NO: 26451089 NR Description: unknown protein [Arabidopsis thaliana]
  misc_feature (1)..(115): Homolog of NCBI NO: 9758557 NR Description: gb|AAB80651.1~gene_id:MRH10.9~similar to unknown
  misc_feature (1)..(157): Homolog of NCBI NO: 18403243 NR Description: expressed protein [Arabidopsis thaliana] Unknown protein [Arabidopsis thaliana] unknown protein [Arabidopsis thaliana]
  misc_feature (1)..(157): Homolog of NCBI NO: 38566686 NR Description: At1g04520 [Arabidopsis thaliana]
  misc_feature (1)..(108): Homolog of NCBI NO: 15219740 NR Description: hypothetical protein [Arabidopsis thaliana]
  misc_feature (1)..(108): Homolog of NCBI NO: 25408259 NR Description: hypothetical protein At2g33330 [imported] -
  misc_feature (1)..(156): Homolog of NCBI NO: 15229281 NR Description: hypothetical protein [Arabidopsis thaliana]
  misc_feature (1)..(148): Homolog of NCBI NO: 6721149 NR Description: hypothetical protein, 3' partial [Arabidopsis
  misc_feature (1)..(152): Homolog of NCBI NO: 18409653 NR Description: expressed protein [Arabidopsis thaliana] Unknown protein [Arabidopsis thaliana]
MLFRVCGKKDSNDPGFVGKRETAFGMAENGVKTGSSGGGGGGGGFYAGQYESVYVLGQCEGSLGNSDCGECVKDGFEKAKSECGESNSGQVYLQKCFVSYSYYSHGVPNIEPLSGGEKRQHTERTIALAVGGVFVLGFVIVCLLVLRSAMKKKSNKYDAY

SEQ ID NO: 103518 - DNA, 1072 bp, Arabidopsis thaliana
  misc_feature (1)..(1072): Ceres Seq. ID no. 13612941
  misc_feature: MA Experiment ID: 108435 Result: Down-regulated in Transcription
  misc_feature: MA Experiment 108435 PARAMETER Experiment Name: At_stm_Mutants_cDNA_P Parameter: Plant Line Value: wt Landsburg vs stm
  misc_feature: MA Experiment 108435 PARAMETER Experiment Name: At_stm_Mutants_cDNA_P Parameter: Tissue Value: Shoot Apical Meristem Region
  misc_feature: MA Experiment ID: 108461 Result: Up-regulated in Transcription
  misc_feature: MA Experiment 108461 PARAMETER Experiment Name: At_Germinating_Seeds_cDNA_P Parameter: Age (day) Value: 1 vs. 0
  misc_feature: MA Experiment 108461 PARAMETER Experiment Name: At_Germinating_Seeds_cDNA_P Parameter: Tissue Value: Germinating Seeds
  misc_feature: MA Experiment ID: 108462 Result: Up-regulated in Transcription
  misc_feature: MA Experiment 108462 PARAMETER Experiment Name: At_Germinating_Seeds_cDNA_P Parameter: Age (day) Value: 2 vs. 0
  misc_feature: MA Experiment 108462 PARAMETER Experiment Name: At_Germinating_Seeds_cDNA_P Parameter: Tissue Value: Germinating Seeds
  misc_feature: MA Experiment ID: 108463 Result: Up-regulated in Transcription
  misc_feature: MA Experiment 108463 PARAMETER Experiment Name: At_Germinating_Seeds_cDNA_P Parameter: Age (day) Value: 3 vs. 0
  misc_feature: MA Experiment 108463 PARAMETER Experiment Name: At_Germinating_Seeds_cDNA_P Parameter: Tissue Value: Germinating Seeds
  misc_feature: MA Experiment ID: 108464 Result: Up-regulated in Transcription
  misc_feature: MA Experiment 108464 PARAMETER Experiment Name: At_Germinating_Seeds_cDNA_P Parameter: Age (day) Value: 4 vs. 0
  misc_feature: MA Experiment 108464 PARAMETER Experiment Name: At_Germinating_Seeds_cDNA_P Parameter: Tissue Value: Germinating Seeds
  misc_feature: MA Experiment ID: 108473 Result: Down-regulated in Transcription
  misc_feature: MA Experiment 108473 PARAMETER Experiment Name: At_Drought_Flowers_cDNA_P Parameter: Timepoint (hr) Value: 7 d
  misc_feature: MA Experiment 108473 PARAMETER Experiment Name: At_Drought_Flowers_cDNA_P Parameter: Tissue Value: Flower
  misc_feature: MA Experiment 108473 PARAMETER Experiment Name: At_Drought_Flowers_cDNA_P Parameter: Treatment Value: Drought vs. No Drought
  misc_feature: MA Experiment ID: 108607 Result: Down-regulated in Transcription
  misc_feature: MA Experiment 108607 PARAMETER Experiment Name: At_100uM_ABA_cDNA_P Parameter: Timepoint (hr) Value: 4
  misc_feature: MA Experiment 108607 PARAMETER Experiment Name: At_100uM_ABA_cDNA_P Parameter: Tissue Value: Aerial
  misc_feature: MA Experiment 108607 PARAMETER Experiment Name: At_100uM_ABA_cDNA_P Parameter: Treatment Value: 100uM ABA vs. No Treatment
  misc_feature: MA Experiment ID: 108608 Result: Down-regulated in Transcription
  misc_feature: MA Experiment 108608 PARAMETER Experiment Name: At_100uM_ABA_cDNA_P Parameter: Timepoint (hr) Value: 1
  misc_feature: MA Experiment 108608 PARAMETER Experiment Name: At_100uM_ABA_cDNA_P Parameter: Tissue Value: Aerial
  misc_feature: MA Experiment 108608 PARAMETER Experiment Name: At_100uM_ABA_cDNA_P Parameter: Treatment Value: 100uM ABA vs. No Treatment
  misc_feature: MA Experiment ID: 20000069 Result: Down-regulated in Transcription
  misc_feature: MA Experiment 20000069 PARAMETER Experiment Name: At_100uM_ABA_Mutants_cDNA_P Parameter: Plant Line Value: CS23
  misc_feature: MA Experiment 20000069 PARAMETER Experiment Name: At_100uM_ABA_Mutants_cDNA_P Parameter: Timepoint (hr) Value: 6
  misc_feature: MA Experiment 20000069 PARAMETER Experiment Name: At_100uM_ABA_Mutants_cDNA_P Parameter: Tissue Value: Aerial
  misc_feature: MA Experiment 20000069 PARAMETER Experiment Name: At_100uM_ABA_Mutants_cDNA_P Parameter: Treatment Value: 100uM ABA vs. No Treatment
  misc_feature: MA Experiment ID: 20000070 Result: Down-regulated in Transcription
  misc_feature: MA Experiment 20000070 PARAMETER Experiment Name: At_100uM_ABA_Mutants_cDNA_P Parameter: Plant Line Value: CS24
  misc_feature: MA Experiment 20000070 PARAMETER Experiment Name: At_100uM_ABA_Mutants_cDNA_P Parameter: Timepoint (hr) Value: 6
  misc_feature: MA Experiment 20000070 PARAMETER Experiment Name: At_100uM_ABA_Mutants_cDNA_P Parameter: Tissue Value: Aerial
  misc_feature: MA Experiment 20000070 PARAMETER Experiment Name: At_100uM_ABA_Mutants_cDNA_P Parameter: Treatment Value: 100uM ABA vs. No Treatment
  misc_feature: MA Experiment ID: 20000071 Result: Down-regulated in Transcription
  misc_feature: MA Experiment 20000071 PARAMETER Experiment Name: At_100uM_ABA_Mutants_cDNA_P Parameter: Plant Line Value: CS8104
  misc_feature: MA Experiment 20000071 PARAMETER Experiment Name: At_100uM_ABA_Mutants_cDNA_P Parameter: Timepoint (hr) Value: 6
  misc_feature: MA Experiment 20000071 PARAMETER Experiment Name: At_100uM_ABA_Mutants_cDNA_P Parameter: Tissue Value: Aerial
  misc_feature: MA Experiment 20000071 PARAMETER Experiment Name: At_100uM_ABA_Mutants_cDNA_P Parameter: Treatment Value: 100uM ABA vs. No Treatment
  misc_feature: MA Experiment ID: 20000072 Result: Down-regulated in Transcription
  misc_feature: MA Experiment 20000072 PARAMETER Experiment Name: At_100uM_ABA_Mutants_cDNA_P Parameter: Plant Line Value: CS8105
  misc_feature: MA Experiment 20000072 PARAMETER Experiment Name: At_100uM_ABA_Mutants_cDNA_P Parameter: Timepoint (hr) Value: 6
  misc_feature: MA Experiment 20000072 PARAMETER Experiment Name: At_100uM_ABA_Mutants_cDNA_P Parameter: Tissue Value: Aerial
  misc_feature: MA Experiment 20000072 PARAMETER Experiment Name: At_100uM_ABA_Mutants_cDNA_P Parameter: Treatment Value: 100uM ABA vs. No Treatment
  misc_feature: MA Experiment ID: 20000087 Result: Down-regulated in Transcription
  misc_feature: MA Experiment 20000087 PARAMETER Experiment Name: At_100uM_ABA_Mutants_cDNA_P Parameter: Plant Line Value: WS
  misc_feature: MA Experiment 20000087 PARAMETER Experiment Name: At_100uM_ABA_Mutants_cDNA_P Parameter: Timepoint (hr) Value: 6
  misc_feature: MA Experiment 20000087 PARAMETER Experiment Name: At_100uM_ABA_Mutants_cDNA_P Parameter: Tissue Value: Aerial
  misc_feature: MA Experiment 20000087 PARAMETER Experiment Name: At_100uM_ABA_Mutants_cDNA_P Parameter: Treatment Value: 100uM ABA vs. No Treatment
  misc_feature: MA Experiment ID: 20000088 Result: Down-regulated in Transcription
  misc_feature: MA Experiment 20000088 PARAMETER Experiment Name: At_100uM_ABA_Mutants_cDNA_P Parameter: Plant Line Value: Landsberg
  misc_feature: MA Experiment 20000088 PARAMETER Experiment Name: At_100uM_ABA_Mutants_cDNA_P Parameter: Timepoint (hr) Value: 6
  misc_feature: MA Experiment 20000088 PARAMETER Experiment Name: At_100uM_ABA_Mutants_cDNA_P Parameter: Tissue Value: Aerial
  misc_feature: MA Experiment 20000088 PARAMETER Experiment Name: At_100uM_ABA_Mutants_cDNA_P Parameter: Treatment Value: 100uM ABA vs. No Treatment
  misc_feature: MA Experiment ID: 20000117 Result: Down-regulated in Transcription
  misc_feature: MA Experiment 20000117 PARAMETER Experiment Name: At_100uM_ABA_Mutants_cDNA_P Parameter: Plant Line Value: Columbia
  misc_feature: MA Experiment 20000117 PARAMETER Experiment Name: At_100uM_ABA_Mutants_cDNA_P Parameter: Timepoint (hr) Value: 6
  misc_feature: MA Experiment 20000117 PARAMETER Experiment Name: At_100uM_ABA_Mutants_cDNA_P Parameter: Tissue Value: Aerial
  misc_feature: MA Experiment 20000117 PARAMETER Experiment Name: At_100uM_ABA_Mutants_cDNA_P Parameter: Treatment Value: 100uM ABA vs. No Treatment
  misc_feature: MA Experiment ID: 20000179 Result: Up-regulated in Transcription
  misc_feature: MA Experiment 20000179 PARAMETER Experiment Name: At_Germinating_Seeds_P Parameter: Age (hr) Value: 6 vs. 0
  misc_feature: MA Experiment 20000179 PARAMETER Experiment Name: At_Germinating_Seeds_P Parameter: Tissue Value: Germinating Seeds
  misc_feature: MA Experiment ID: 20000180 Result: Up-regulated in Transcription
  misc_feature: MA Experiment 20000180 PARAMETER Experiment Name: At_Germinating_Seeds_P Parameter: Age (hr) Value: 24 vs. 0
  misc_feature: MA Experiment 20000180 PARAMETER Experiment Name: At_Germinating_Seeds_P Parameter: Tissue Value: Germinating Seeds
  misc_feature: MA Experiment ID: 20000184 Result: Up-regulated in Transcription
  misc_feature: MA Experiment 20000184 PARAMETER Experiment Name: At_Shoots__P Parameter: Age (day) Value: 7
  misc_feature: MA Experiment 20000184 PARAMETER Experiment Name: At_Shoots__P Parameter: Tissue Value: Shoots vs. Whole Plant
  misc_feature: MA Experiment ID: 20000224 Result: Down-regulated in Transcription
  misc_feature: MA Experiment ID: 20000234 Result: Down-regulated in Transcription
  misc_feature: MA Experiment 20000234 PARAMETER Experiment Name: At_Siliques_P Parameter: Age (day) Value: 21
  misc_feature: MA Experiment 20000234 PARAMETER Experiment Name: At_Siliques_P Parameter: Organism Value: A. thaliana
  misc_feature: MA Experiment 20000234 PARAMETER Experiment Name: At_Siliques_P Parameter: Plant Line Value: WS
  misc_feature: MA Experiment 20000234 PARAMETER Experiment Name: At_Siliques_P Parameter: Tissue Value: Less Than 5mm Siliques vs. Whole Plant
  misc_feature: MA Experiment ID: 20000235 Result: Down-regulated in Transcription
  misc_feature: MA Experiment 20000235 PARAMETER Experiment Name: At_Siliques_P Parameter: Age (day) Value: 21
  misc_feature: MA Experiment 20000235 PARAMETER Experiment Name: At_Siliques_P Parameter: Organism Value: A. thaliana
  misc_feature: MA Experiment 20000235 PARAMETER Experiment Name: At_Siliques_P Parameter: Plant Line Value: WS
  misc_feature: MA Experiment 20000235 PARAMETER Experiment Name: At_Siliques_P Parameter: Tissue Value: 5-10mm Siliques vs. Whole Plant
  misc_feature: MA Experiment ID: 20000264 Result: Down-regulated in Transcription
  misc_feature: MA Experiment 20000264 PARAMETER Experiment Name: At_Open_Flower_P Parameter: Age (day) Value: 21
  misc_feature: MA Experiment 20000264 PARAMETER Experiment Name: At_Open_Flower_P Parameter: Plant Line Value: WS
  misc_feature: MA Experiment 20000264 PARAMETER Experiment Name: At_Open_Flower_P Parameter: Tissue Value: Open Flower vs. Whole Plant
  misc_feature: MA Experiment ID: 20000265 Result: Down-regulated in Transcription
  misc_feature: MA Experiment 20000265 PARAMETER Experiment Name: At_Open_Flower_P Parameter: Age (day) Value: 21
  misc_feature: MA Experiment 20000265 PARAMETER Experiment Name: At_Open_Flower_P Parameter: Plant Line Value: WS
  misc_feature: MA Experiment 20000265 PARAMETER Experiment Name: At_Open_Flower_P Parameter: Tissue Value: Closed Flower vs. Whole Plant
  misc_feature: MA Experiment ID: 20000267 Result: Down-regulated in Transcription
  misc_feature: MA Experiment 20000267 PARAMETER Experiment Name: At_Drought_P Parameter: Age (day) Value: 7
  misc_feature: MA Experiment 20000267 PARAMETER Experiment Name: At_Drought_P Parameter: Organism Value: A. thaliana
  misc_feature: MA Experiment 20000267 PARAMETER Experiment Name: At_Drought_P Parameter: Plant Line Value: WS
  misc_feature: MA Experiment 20000267 PARAMETER Experiment Name: At_Drought_P Parameter: Timepoint (hr) Value: 6
  misc_feature: MA Experiment 20000267 PARAMETER Experiment Name: At_Drought_P Parameter: Tissue Value: Whole Plant
  misc_feature: MA Experiment 20000267 PARAMETER Experiment Name: At_Drought_P Parameter: Treatment Value: Drought vs. No Drought
  misc_feature: MA Experiment ID: 20000268 Result: Down-regulated in Transcription
  misc_feature: MA Experiment 20000268 PARAMETER Experiment Name: At_100mM_NaCl__P Parameter: Age (day) Value: 14
  misc_feature: MA Experiment 20000268 PARAMETER Experiment Name: At_100mM_NaCl__P Parameter: Organism Value: A. thaliana
  misc_feature: MA Experiment 20000268 PARAMETER Experiment Name: At_100mM_NaCl__P Parameter: Plant Line Value: WS
  misc_feature: MA Experiment 20000268 PARAMETER Experiment Name: At_100mM_NaCl__P Parameter: Timepoint (hr) Value: 6
  misc_feature: MA Experiment 20000268 PARAMETER Experiment Name: At_100mM_NaCl__P Parameter: Tissue Value: Whole Plant
  misc_feature: MA Experiment 20000268 PARAMETER Experiment Name: At_100mM_NaCl__P Parameter: Treatment Value: 100mM NaCl vs. No Treatment
  misc_feature: MA Experiment ID: 20000286 Result: Down-regulated in Transcription
  misc_feature: MA Experiment 20000286 PARAMETER Experiment Name: At_Open_Flower_P Parameter: Age (day) Value: 21
  misc_feature: MA Experiment 20000286 PARAMETER Experiment Name: At_Open_Flower_P Parameter: Plant Line Value: WS
  misc_feature: MA Experiment 20000286 PARAMETER Experiment Name: At_Open_Flower_P Parameter: Tissue Value: Half Open vs. Whole Plant
  misc_feature: MA Experiment ID: 20000436 Result: Down-regulated in Transcription
  misc_feature: MA Experiment 20000436 PARAMETER Experiment Name: At_Drought_P Parameter: Age (day) Value: 7
  misc_feature: MA Experiment 20000436 PARAMETER Experiment Name: At_Drought_P Parameter: Organism Value: A. thaliana
  misc_feature: MA Experiment 20000436 PARAMETER Experiment Name: At_Drought_P Parameter: Plant Line Value: WS
  misc_feature: MA Experiment 20000436 PARAMETER Experiment Name: At_Drought_P Parameter: Timepoint (hr) Value: 12
  misc_feature: MA Experiment 20000436 PARAMETER Experiment Name: At_Drought_P Parameter: Tissue Value: Whole Plant
  misc_feature: MA Experiment 20000436 PARAMETER Experiment Name: At_Drought_P Parameter: Treatment Value: Drought vs. No Drought
  misc_feature: MA Experiment ID: 20000437 Result: Down-regulated in Transcription
  misc_feature: MA Experiment 20000437 PARAMETER Experiment Name: At_Drought_P Parameter: Age (day) Value: 8
  misc_feature: MA Experiment 20000437 PARAMETER Experiment Name: At_Drought_P Parameter: Organism Value: A. thaliana
  misc_feature: MA Experiment 20000437 PARAMETER Experiment Name: At_Drought_P Parameter: Plant Line Value: WS
  misc_feature: MA Experiment 20000437 PARAMETER Experiment Name: At_Drought_P Parameter: Timepoint (hr) Value: 24
  misc_feature: MA Experiment 20000437 PARAMETER Experiment Name: At_Drought_P Parameter: Tissue Value: Whole Plant
  misc_feature: MA Experiment 20000437 PARAMETER Experiment Name: At_Drought_P Parameter: Treatment Value: Drought vs. No Drought
  misc_feature: MA Experiment ID: 20000441 Result: Up-regulated in Transcription
  misc_feature: MA Experiment 20000441 PARAMETER Experiment Name: At_1uM_BR-BRZ__P Parameter: Tissue Value: Shoot Apices
  misc_feature: MA Experiment 20000441 PARAMETER Experiment Name: At_1uM_BR-BRZ__P Parameter: Treatment Value: 1uM BR vs. No Treatment
  misc_feature: MA Experiment ID: 20000794 Result: Down-regulated in Transcription
  misc_feature: MA Experiment 20000794 PARAMETER Experiment Name: At_Petals_P Parameter: Age (day) Value: 23-25 days
  misc_feature: MA Experiment 20000794 PARAMETER Experiment Name: At_Petals_P Parameter: Plant Line Value: WS
  misc_feature: MA Experiment 20000794 PARAMETER Experiment Name: At_Petals_P Parameter: Tissue Value: Petals vs. Whole plant
  misc_feature: MA Experiment ID: 20001451 Result: Up-regulated in Transcription
  misc_feature: MA Experiment 20001451 PARAMETER Experiment Name: At_Far-red-induction_P Parameter: Age (day) Value: 7
  misc_feature: MA Experiment 20001451 PARAMETER Experiment Name: At_Far-red-induction_P Parameter: Light Value: Far-red vs. White
  misc_feature: MA Experiment 20001451 PARAMETER Experiment Name: At_Far-red-induction_P Parameter: Organism Value: A. thaliana
  misc_feature: MA Experiment 20001451 PARAMETER Experiment Name: At_Far-red-induction_P Parameter: Plant Line Value: Columbia
  misc_feature: MA Experiment 20001451 PARAMETER Experiment Name: At_Far-red-induction_P Parameter: Timepoint (hr) Value: 24
  misc_feature: MA Experiment 20001451 PARAMETER Experiment Name: At_Far-red-induction_P Parameter: Tissue Value: Whole Plant
  misc_feature: MA Experiment ID: 20001554 Result: Down-regulated in Transcription
  misc_feature: MA Experiment 20001554 PARAMETER Experiment Name: At_Drought_Soil_Dry_P Parameter: Age (day) Value: 21
  misc_feature: MA Experiment 20001554 PARAMETER Experiment Name: At_Drought_Soil_Dry_P Parameter: Organism Value: A. thaliana
  misc_feature: MA Experiment 20001554 PARAMETER Experiment Name: At_Drought_Soil_Dry_P Parameter: Plant Line Value: WS
  misc_feature: MA Experiment 20001554 PARAMETER Experiment Name: At_Drought_Soil_Dry_P Parameter: Post Timepoint (hr) Value: None
  misc_feature: MA Experiment 20001554 PARAMETER Experiment Name: At_Drought_Soil_Dry_P Parameter: Post-Treatment Value: None
  misc_feature: MA Experiment 20001554 PARAMETER Experiment Name: At_Drought_Soil_Dry_P Parameter: Timepoint (day) Value: 7
  misc_feature: MA Experiment 20001554 PARAMETER Experiment Name: At_Drought_Soil_Dry_P Parameter: Treatment Value: Drought vs. No Drought
  misc_feature: MA Experiment ID: 20001555 Result: Down-regulated in Transcription
  misc_feature: MA Experiment 20001555 PARAMETER Experiment Name: At_Drought_Soil_Dry_P Parameter: Age (day) Value: 24
  misc_feature: MA Experiment 20001555 PARAMETER Experiment Name: At_Drought_Soil_Dry_P Parameter: Organism Value: A. thaliana
  misc_feature: MA Experiment 20001555 PARAMETER Experiment Name: At_Drought_Soil_Dry_P Parameter: Plant Line Value: WS
  misc_feature: MA Experiment 20001555 PARAMETER Experiment Name: At_Drought_Soil_Dry_P Parameter: Post Timepoint (hr) Value: None
  misc_feature: MA Experiment 20001555 PARAMETER Experiment Name: At_Drought_Soil_Dry_P Parameter: Post-Treatment Value: None
  misc_feature: MA Experiment 20001555 PARAMETER Experiment Name: At_Drought_Soil_Dry_P Parameter: Timepoint (day) Value: 10
  misc_feature: MA Experiment 20001555 PARAMETER Experiment Name: At_Drought_Soil_Dry_P Parameter: Treatment Value: Drought vs. No Drought
  misc_feature: MA Experiment ID: 20001556 Result: Down-regulated in Transcription
  misc_feature: MA Experiment 20001556 PARAMETER Experiment Name: At_Drought_Soil_Dry_P Parameter: Age (day) Value: 26
  misc_feature: MA Experiment 20001556 PARAMETER Experiment Name: At_Drought_Soil_Dry_P Parameter: Organism Value: A. thaliana
  misc_feature: MA Experiment 20001556 PARAMETER Experiment Name: At_Drought_Soil_Dry_P Parameter: Plant Line Value: WS
  misc_feature: MA Experiment 20001556 PARAMETER Experiment Name: At_Drought_Soil_Dry_P Parameter: Post Timepoint (hr) Value: None
  misc_feature: MA Experiment 20001556 PARAMETER Experiment Name: At_Drought_Soil_Dry_P Parameter: Post-Treatment Value: None
  misc_feature: MA Experiment 20001556 PARAMETER Experiment Name: At_Drought_Soil_Dry_P Parameter: Timepoint (day) Value: 12
  misc_feature: MA Experiment 20001556 PARAMETER Experiment Name: At_Drought_Soil_Dry_P Parameter: Treatment Value: Drought vs. No Drought
  misc_feature: MA Experiment ID: 20001559 Result: Down-regulated in Transcription
  misc_feature: MA Experiment 20001559 PARAMETER Experiment Name: At_Drought_Soil_Dry_P Parameter: Age (day) Value: 28
  misc_feature: MA Experiment 20001559 PARAMETER Experiment Name: At_Drought_Soil_Dry_P Parameter: Organism Value: A. thaliana
  misc_feature: MA Experiment 20001559 PARAMETER Experiment Name: At_Drought_Soil_Dry_P Parameter: Plant Line Value: WS
  misc_feature: MA Experiment 20001559 PARAMETER Experiment Name: At_Drought_Soil_Dry_P Parameter: Post Timepoint (hr) Value: 29
  misc_feature: MA Experiment 20001559 PARAMETER Experiment Name: At_Drought_Soil_Dry_P Parameter: Post-Treatment Value: Re-Water vs. No Drought
  misc_feature: MA Experiment 20001559 PARAMETER Experiment Name: At_Drought_Soil_Dry_P Parameter: Timepoint (day) Value: 14
  misc_feature: MA Experiment 20001559 PARAMETER Experiment Name: At_Drought_Soil_Dry_P Parameter: Treatment Value: Drought vs. No Drought
  misc_feature: MA Experiment ID: 20001755 Result: Down-regulated in Transcription
  misc_feature: MA Experiment 20001755 PARAMETER Experiment Name: At_50mM_NH4NO3_L-to-H_P Parameter: Timepoint (hr) Value: 2
  misc_feature: MA Experiment 20001755 PARAMETER Experiment Name: At_50mM_NH4NO3_L-to-H_P Parameter: Tissue Value: Leaf
  misc_feature: MA Experiment 20001755 PARAMETER Experiment Name: At_50mM_NH4NO3_L-to-H_P Parameter: Treatment Value: 50mM NH4NO3 vs 100mM Mannitol
  misc_feature: MA Experiment ID: 20001757 Result: Up-regulated in Transcription
  misc_feature: MA Experiment 20001757 PARAMETER Experiment Name: At_50mM_NH4NO3_L-to-H_P Parameter: Timepoint (hr) Value: 6
  misc_feature: MA Experiment 20001757 PARAMETER Experiment Name: At_50mM_NH4NO3_L-to-H_P Parameter: Tissue Value: Leaf
  misc_feature: MA Experiment 20001757 PARAMETER Experiment Name: At_50mM_NH4NO3_L-to-H_P Parameter: Treatment Value: 50mM NH4NO3 vs 100mM Mannitol
  misc_feature: MA Experiment ID: 20001761 Result: Up-regulated in Transcription
  misc_feature: MA Experiment 20001761 PARAMETER Experiment Name: At_50mM_NH4NO3_L-to-H_P Parameter: Timepoint (hr) Value: 4
  misc_feature: MA Experiment 20001761 PARAMETER Experiment Name: At_50mM_NH4NO3_L-to-H_P Parameter: Tissue Value: Siliques
  misc_feature: MA Experiment 20001761 PARAMETER Experiment Name: At_50mM_NH4NO3_L-to-H_P Parameter: Treatment Value: 50mM NH4NO3 vs 100mM Mannitol
  misc_feature: MA Experiment ID: 20001904 Result: Down-regulated in Transcription
  misc_feature: MA Experiment 20001904 PARAMETER Experiment Name: At_Drought_Reproduction_P Parameter: Age (day) Value: 37
  misc_feature: MA Experiment 20001904 PARAMETER Experiment Name: At_Drought_Reproduction_P Parameter: Organism Value: A. thaliana
  misc_feature: MA Experiment 20001904 PARAMETER Experiment Name: At_Drought_Reproduction_P Parameter: Plant Line Value: WS
  misc_feature: MA Experiment 20001904 PARAMETER Experiment Name: At_Drought_Reproduction_P Parameter: Timepoint (day) Value: 7
  misc_feature: MA Experiment 20001904 PARAMETER Experiment Name: At_Drought_Reproduction_P Parameter: Tissue Value: Rosettes
  misc_feature: MA Experiment 20001904 PARAMETER Experiment Name: At_Drought_Reproduction_P Parameter: Treatment Value: Drought vs. No Drought
  misc_feature: MA Experiment ID: 20001906 Result: Down-regulated in Transcription
  misc_feature: MA Experiment 20001906 PARAMETER Experiment Name: At_Drought_Reproduction_P Parameter: Age (day) Value: 35
  misc_feature: MA Experiment 20001906 PARAMETER Experiment Name: At_Drought_Reproduction_P Parameter: Organism Value: A. thaliana
  misc_feature: MA Experiment 20001906 PARAMETER Experiment Name: At_Drought_Reproduction_P Parameter: Plant Line Value: WS
  misc_feature: MA Experiment 20001906 PARAMETER Experiment Name: At_Drought_Reproduction_P Parameter: Timepoint (day) Value: 5
  misc_feature: MA Experiment 20001906 PARAMETER Experiment Name: At_Drought_Reproduction_P Parameter: Tissue Value: Siliques
  misc_feature: MA Experiment 20001906 PARAMETER Experiment Name: At_Drought_Reproduction_P Parameter: Treatment Value: Drought vs. No Drought
  misc_feature: MA Experiment ID: 20001910 Result: Down-regulated in Transcription
  misc_feature: MA Experiment 20001910 PARAMETER Experiment Name: At_Drought_Reproduction_P Parameter: Age (day) Value: 37
  misc_feature: MA Experiment 20001910 PARAMETER Experiment Name: At_Drought_Reproduction_P Parameter: Organism Value: A. thaliana
  misc_feature: MA Experiment 20001910 PARAMETER Experiment Name: At_Drought_Reproduction_P Parameter: Plant Line Value: WS
  misc_feature: MA Experiment 20001910 PARAMETER Experiment Name: At_Drought_Reproduction_P Parameter: Timepoint (day) Value: 7
  misc_feature: MA Experiment 20001910 PARAMETER Experiment Name: At_Drought_Reproduction_P Parameter: Tissue Value: Flowers
  misc_feature: MA Experiment 20001910 PARAMETER Experiment Name: At_Drought_Reproduction_P Parameter: Treatment Value: Drought vs. No Drought
caacaccactaataaactcaacatggctagatccttgttgctctcgctaaccctcacattcctcttcgccggaattgtctcagctcgtgactggaacatcctgagccagctcaaaggaaccacaaccaccacgaagactagccaaaccggcgtcacatctttgaaagctcccaacctaaacggatactgtgagagctggagagtcaacgtggagcttaacaacataagggactttaaggtggttccacaggaatgtgtatggttcgtccaaaagtacatgacctcatctcaatacgaagatgacgtggagagagccgtcgatgaagccatcctctacctcggaaaaacttgttgcgagaagaagacatgcgatggcatggatgcttggatctttgacattgatgacactcttctctcaaccattccttaccacaagagcaacggttgtttcggtggtgagcaactgaacacgaccaagttcgaggaatggcaaaattcgggcaaggcaccagcggttccacacatggtgaagttgtaccatgagatcagagagagaggtttcaagatctttttgatctcttctcgtaaagagtatctcagatctgccaccgtcgaaaatcttattgaagccggttaccacagctggtctaacctccttctgaggggagaagatgatgaaaagaagagtgtgagccaatacaaagcagatttgaggacatggcttacaagtcttgggtacagagtttggggagtgatgggtgcacaatggaacagcttctctggttgtccagttcccaagagaaccttcaagctccctaactccatctactatgtcgcctgattaaatcttatttactaacaaaacaataagatcagagtttcattctgattcttgagtcttttttttctctctccctcttttcatttctggtttatataaccaattcaaatgcttatgatccatgcatgaaccatgatcatctttgtgtttttttttccttctgtattaccattttgggcctttgtgaaattgattttgggcttttgttatataatctcctctttctctttc

SEQ ID NO: 103519 - protein, 279 aa, Arabidopsis thaliana; identical to SEQ ID NO: 36338
  peptide (1)..(279): Ceres Seq. ID no. 13612942
  misc_feature (47)..(279): Pfam Name: HAD superfamily, subfamily IIIB (Acid phosphatase) Pfam Description: HAD superfamily, subfamily IIIB (Acid
  misc_feature (8)..(279): Homolog of NCBI NO: 15240067 NR Description: vegetative storage protein-related [Arabidopsis
  misc_feature (8)..(279): Homolog of NCBI NO: 21555213 NR Description: vegetative storage protein-like [Arabidopsis
  misc_feature (8)..(279): Homolog of NCBI NO: 18379219 NR Description: acid phosphatase -related [Arabidopsis thaliana]
  misc_feature (58)..(278): Homolog of NCBI NO: 15234949 NR Description: acid phosphatase - like protein [Arabidopsis
  misc_feature (63)..(278): Homolog of NCBI NO: 130718 NR Description: Acid phosphatase precursor 1
  misc_feature (63)..(278): Homolog of NCBI NO: 445113 NR Description: acid phosphatase 1
  misc_feature (47)..(279): Homolog of NCBI NO: 15233526 NR Description: acid phosphatase-related protein [Arabidopsis
  misc_feature (58)..(278): Homolog of NCBI NO: 15241412 NR Description: acid phosphatase [Arabidopsis thaliana]
  misc_feature (54)..(278): Homolog of NCBI NO: 15233504 NR Description: acid phosphatase-related protein [Arabidopsis
  misc_feature (62)..(278): Homolog of NCBI NO: 15224907 NR Description: acid phosphatase -related [Arabidopsis thaliana]

SEQ ID NO: 103520 - protein, 272 aa, Arabidopsis thaliana; identical to SEQ ID NO: 36339
  peptide (1)..(272): Ceres Seq. ID no. 13612943
  misc_feature (40)..(272): Pfam Name: HAD superfamily, subfamily IIIB (Acid phosphatase) Pfam Description: HAD superfamily, subfamily IIIB (Acid
  misc_feature (1)..(272): Homolog of NCBI NO: 15240067 NR Description: vegetative storage protein-related [Arabidopsis
  misc_feature (1)..(272): Homolog of NCBI NO: 21555213 NR Description: vegetative storage protein-like [Arabidopsis
  misc_feature (1)..(272): Homolog of NCBI NO: 18379219 NR Description: acid phosphatase -related [Arabidopsis thaliana]
  misc_feature (51)..(271): Homolog of NCBI NO: 15234949 NR Description: acid phosphatase - like protein [Arabidopsis
  misc_feature (56)..(271): Homolog of NCBI NO: 130718 NR Description: Acid phosphatase precursor 1
  misc_feature (56)..(271): Homolog of NCBI NO: 445113 NR Description: acid phosphatase 1
  misc_feature (40)..(272): Homolog of NCBI NO: 15233526 NR Description: acid phosphatase-related protein [Arabidopsis
  misc_feature (51)..(271): Homolog of NCBI NO: 15241412 NR Description: acid phosphatase [Arabidopsis thaliana]
  misc_feature (47)..(271): Homolog of NCBI NO: 15233504 NR Description: acid phosphatase-related protein [Arabidopsis
  misc_feature (55)..(271): Homolog of NCBI NO: 15224907 NR Description: acid phosphatase -related [Arabidopsis thaliana]

SEQ ID NO: 103521 - protein, 187 aa, Arabidopsis thaliana; identical to SEQ ID NO: 36340
  peptide (1)..(187): Ceres Seq. ID no. 13612944
  misc_feature (1)..(187): Pfam Name: HAD superfamily, subfamily IIIB (Acid phosphatase) Pfam Description: HAD superfamily, subfamily IIIB (Acid
  misc_feature (1)..(187): Homolog of NCBI NO: 15240067 NR Description: vegetative storage protein-related [Arabidopsis
  misc_feature (1)..(187): Homolog of NCBI NO: 21555213 NR Description: vegetative storage protein-like [Arabidopsis
  misc_feature (1)..(187): Homolog of NCBI NO: 18379219 NR Description: acid phosphatase -related [Arabidopsis thaliana]
  misc_feature (1)..(186): Homolog of NCBI NO: 15234949 NR Description: acid phosphatase - like protein [Arabidopsis
  misc_feature (1)..(186): Homolog of NCBI NO: 130718 NR Description: Acid phosphatase precursor 1
  misc_feature (1)..(186): Homolog of NCBI NO: 445113 NR Description: acid phosphatase 1
  misc_feature (1)..(187): Homolog of NCBI NO: 15233526 NR Description: acid phosphatase-related protein [Arabidopsis
  misc_feature (1)..(186): Homolog of NCBI NO: 15241412 NR Description: acid phosphatase [Arabidopsis thaliana]
  misc_feature (1)..(186): Homolog of NCBI NO: 15233504 NR Description: acid phosphatase-related protein [Arabidopsis
  misc_feature (1)..(186): Homolog of NCBI NO: 15224907 NR Description: acid phosphatase -related [Arabidopsis thaliana]

SEQ ID NO: 103522 - DNA, 3358 bp, Arabidopsis thaliana
  misc_feature (1)..(3358): Ceres Seq. ID no. 13612945
  misc_feature: MA Experiment ID: 20000314 Result: Down-regulated in Transcription
  misc_feature: MA Experiment 20000314 PARAMETER Experiment Name: At_14day_Shoots-Roots_Sub_P Parameter: Age (day) Value: 14
  misc_feature: MA Experiment 20000314 PARAMETER Experiment Name: At_14day_Shoots-Roots_Sub_P Parameter: Organism Value: A. thaliana
  misc_feature: MA Experiment 20000314 PARAMETER Experiment Name: At_14day_Shoots-Roots_Sub_P Parameter: Plant Line Value: WS
  misc_feature: MA Experiment 20000314 PARAMETER Experiment Name: At_14day_Shoots-Roots_Sub_P Parameter: Tissue Value: Roots vs. Whole Plant
  misc_feature: MA Experiment ID: 20000315 Result: Down-regulated in Transcription
  misc_feature: MA Experiment 20000315 PARAMETER Experiment Name: At_14day_Shoots-Roots_Sub_P Parameter: Age (day) Value: 14
  misc_feature: MA Experiment 20000315 PARAMETER Experiment Name: At_14day_Shoots-Roots_Sub_P Parameter: Organism Value: A. thaliana
  misc_feature: MA Experiment 20000315 PARAMETER Experiment Name: At_14day_Shoots-Roots_Sub_P Parameter: Plant Line Value: WS
  misc_feature: MA Experiment 20000315 PARAMETER Experiment Name: At_14day_Shoots-Roots_Sub_P Parameter: Tissue Value: Shoots vs. Whole Plant
  misc_feature: MA Experiment ID: 20000355 Result: Down-regulated in Transcription
  misc_feature: MA Experiment 20000355 PARAMETER Experiment Name: At_Siliques_Sub_P Parameter: Age (day) Value: 21
  misc_feature: MA Experiment 20000355 PARAMETER Experiment Name: At_Siliques_Sub_P Parameter: Organism Value: A. thaliana
  misc_feature: MA Experiment 20000355 PARAMETER Experiment Name: At_Siliques_Sub_P Parameter: Plant Line Value: WS
  misc_feature: MA Experiment 20000355 PARAMETER Experiment Name: At_Siliques_Sub_P Parameter: Tissue Value: Less Than 5mm Siliques vs. Whole Plant
  misc_feature: MA Experiment ID: 20000440 Result: Down-regulated in Transcription
  misc_feature: MA Experiment 20000440 PARAMETER Experiment Name: At_Closed-Flower__Sub_P Parameter: Tissue Value: Closed Flower vs. Whole Plant
ctcacacatagtcacatacatttctctaccccaccttctgctctgcttccgagagctcagtgtacctcgccatggaaccaaacaccatggccagcttcgacgatgagcatcgtcattcctcattctcggctaagatttgcaaagtctgtggcgatgaggtcaaagacgatgacaatggtcagacttttgtggcgtgtcacgtgtgcgtttacccggtttgcaaaccttgctatgaatatgagcgtagcaacggtaacaaatgttgccctcaatgcaacactctttacaaacgccacaaaggctctccaaaaatcgccggagatgaagaaaacaatggtcctgatgattcagatgatgagttgaatatcaaatatcgccaggatggttcctccattcaccagaattttgcctatggatcggaaaatggagactacaacagtaagcagcaatggcgtccaaatggtcgagccttttcttccaccggaagtgtgttggggaaagactttgaagctgagagagatggctacacagatgcggagtggaaagaacgtgtagataaatggaaagcgaggcaagagaagagaggtttagtgactaaaggagaacaaacaaacgaagacaaagaagatgatgaagaagaatacctagatgctgaagcaagacaacctctctggagaaaagtcccaatctcttcgagcaaaatcagtccttaccgcatcgtgatcgttcttcgccttgtgatcttagttttcttcttccgtttccgtatcttgacaccagccaaagacgcataccctctctggcttatctcagtcatctgcgagatctggttcgctctctcttggatccttgatcagttcccgaaatggtttccgattaaccgagaaacctaccttgaccgtctctctatgagatttgaacgggatggggaaaagaacaagcttgcaccggttgatgtgtttgtcagtacagtggatccgctcaaggaacctcccataatcacagccaacacaattctttcgatcttagccgttgattacccagtgaataaggtgagctgctatgtgtctgatgacggtgcatcaatgctcctgttcgatacattgtccgaaacttccgagtttgcaaggagatgggttccgttttgcaagaagtacaatgttgagccaagagctccagagttttacttctcagagaagattgattacctaaaggataaagtccaaactacattcgtcaaagatcgcagagcaatgaagagagaatatgaagaattcaaagtgaggatcaatgctttagtagctaaagctcaaaagaagcctgaagaaggttgggttatgcaagatggtacaccatggcctgggaataacactcgtgatcatcccgggatgattcaggtgtatctcggcaaagaaggagcattcgacattgatggtaacgaattgccacgtctcgtgtatgtatcaagagagaagcgtcctggttacgcacaccacaagaaagctggagccatgaatgcaatggttcgagtctctgcagtactcactaatgctccattcatgcttaatctcgactgtgaccattacatcaacaacagtaaagccataagagaatcaatgtgctttctaatggatccacagcttggtaaaaagctctgttatgtccaattcccacaaagattcgacggaatcgatcttaacgatcgatacgccaacagaaacatcgtcttcttcgatataaacatgagaggcttagatggaatccaaggaccagtctatgtaggaacaggatgtgtattcaatagaccagcattatacggatacgaacctccggtatcggaaaaacgaaagaaaatgacatgtgattgttggccgtcgtggatctgctgttgttgcggcggaggtaaccgtaatcacaaatcagattcgtcaaagaagaaatcaggaatcaagagcttgttctcgaaactaaagaagaagactaagaagaagagtgatgataaaacgatgagcagctatagtagaaaacgatcatcgacggaggcgatttttgatttggaagatattgaggaagggcttgaaggatatgatgagcttgagaaatcttcgttaatgtcgcagaagaattttgagaagagatttggaatgtctcctgtgtttattgcgtcgacgttgatggagaacggaggattgccggaggcgacgaacacgagctcgttgatcaaagaagctattcatgttattagctgtggttatgaagagaagactgaatggggcaaagagattggatggatttatggatcagtaacagaagatatcctcactggatttagaatgcattgtagaggttggaaatcagtttactgtatgcctaaaagaccagctttcaaaggatcagctccgatcaatttatctgatcggttgcaccaagttcttagatgggctcttggttccgtcgaaatcttctttagtcgtcattgtcctttgtggtatgcttggggaggcaagcttaagattctagaacgtcttgcttacatcaacacaattgtttatcctttcacttctattcctctacttgcctattgtactattccggccgtttgtcttctcaccggcaagttcatcattcctacgatcaacaatttcgcaagcatatggttcttagctctgttcctatcaatcattgcaacggctatcttagaactccggtggagtggtgtaagcatcaatgacctctggcgtaacgagcaattctgggtgattggcggtgtctcagctcatctcttcgctgtctttcaaggtcttcttaaagttctctttggtgttgacactaacttcaccgtcacgtcaaaaggagccagtgacgaagccgatgagtttggagatctttacctctttaaatggacaacccttctcatccctccgacaactctcattattctcaacatggtcggtgttgttgccggagtttctgacgctattaacaatggatatggttcttggggaccgctttttgggaaactgtttttcgcgttttgggtcattgttcatctttatcctttcctcaaaggtttgatgggtagacaaaaccgaacaccgacgattgttgttctttggtctatccttctcgcttcgatcttctctttggtttgggttcggattgatccgttcttgccgaaacagactggtccgttactgaagcaatgtggcgtcgactgttaaatgaggaaccgcattttcgttttggaccgctattttgagccattttgcttggcctatttttccgatttgggtgttctttgttggattatatggatttgtaaggaggaaaaaaaatacaaaactttgattcacttgtg

SEQ ID NO: 103523 - protein, 1049 aa, Arabidopsis thaliana
  peptide (1)..(1049): Ceres Seq. ID no. 13612946
  misc_feature (444)..(1029): Homolog of NCBI NO: 33413770 NR Description: cellulose synthase 2 [Gossypioides kirkii]
  misc_feature (444)..(1029): Homolog of NCBI NO: 33413766 NR Description: cellulose synthase 2 [Gossypium barbadense]
  misc_feature (444)..(1029): Homolog of NCBI NO: 33413768 NR Description: cellulose synthase 2 [Gossypium barbadense]
  misc_feature (444)..(1029): Homolog of NCBI NO: 33413762 NR Description: cellulose synthase 2 [Gossypium herbaceum]
  misc_feature (444)..(1029): Homolog of NCBI NO: 33413764 NR Description: cellulose synthase 2 [Gossypium raimondii]
  misc_feature (707)..(1032): Homolog of NCBI NO: 15228448 NR Description: cellulose synthase family [Arabidopsis thaliana] putative cellulose synthase catalytic subunit [Arabidopsis
  misc_feature (198)..(418): Homolog of NCBI NO: 15228448 NR Description: cellulose synthase family [Arabidopsis thaliana] putative cellulose synthase catalytic subunit [Arabidopsis
  misc_feature (430)..(599): Homolog of NCBI NO: 15228448 NR Description: cellulose synthase family [Arabidopsis thaliana] putative cellulose synthase catalytic subunit [Arabidopsis
  misc_feature (707)..(1032): Homolog of NCBI NO: 27372782 NR Description: cellulose synthase-like protein D4 [Populus
  misc_feature (181)..(418): Homolog of NCBI NO: 27372782 NR Description: cellulose synthase-like protein D4 [Populus
MEPNTMASFDDEHRHSSFSAKICKVCGDEVKDDDNGQTFVACHVCVYPVCKPCYEYERSNGNKCCPQCNTLYKRHKGSPKIAGDEENNGPDDSDDELNIKYRQDGSSIHQNFAYGSENGDYNSKQQWRPNGRAFSSTGSVLGKDFEAERDGYTDAEWKERVDKWKARQEKRGLVTKGEQTNEDKEDDEEEYLDAEARQPLWRKVPISSSKISPYRIVIVLRLVILVFFFRFRILTPAKDAYPLWLISVICEIWFALSWILDQFPKWFPINRETYLDRLSMRFERDGEKNKLAPVDVFVSTVDPLKEPPIITANTILSILAVDYPVNKVSCYVSDDGASMLLFDTLSETSEFARRWVPFCKKYNVEPRAPEFYFSEKIDYLKDKVQTTFVKDRRAMKREYEEFKVRINALVAKAQKKPEEGWVMQDGTPWPGNNTRDHPGMIQVYLGKEGAFDIDGNELPRLVYVSREKRPGYAHHKKAGAMNAMVRVSAVLTNAPFMLNLDCDHYINNSKAIRESMCFLMDPQLGKKLCYVQFPQRFDGIDLNDRYANRNIVFFDINMRGLDGIQGPVYVGTGCVFNRPALYGYEPPVSEKRKKMTCDCWPSWICCCCGGGNRNHKSDSSKKKSGIKSLFSKLKKKTKKKSDDKTMSSYSRKRSSTEAIFDLEDIEEGLEGYDELEKSSLMSQKNFEKRFGMSPVFIASTLMENGGLPEATNTSSLIKEAIHVISCGYEEKTEWGKEIGWIYGSVTEDILTGFRMHCRGWKSVYCMPKRPAFKGSAPINLSDRLHQVLRWALGSVEIFFSRHCPLWYAWGGKLKILERLAYINTIVYPFTSIPLLAYCTIPAVCLLTGKFIIPTINNFASIWFLALFLSIIATAILELRWSGVSINDLWRNEQFWVIGGVSAHLFAVFQGLLKVLFGVDTNFTVTSKGASDEADEFGDLYLFKWTTLLIPPTTLIILNMVGVVAGVSDAINNGYGSWGPLFGKLFFAFWVIVHLYPFLKGLMGRQNRTPTIVVLWSILLASIFSLVWVRIDPFLPKQTGPLLKQCGVDC

SEQ ID NO: 103524 - protein, 1044 aa, Arabidopsis thaliana
  peptide (1)..(1044): Ceres Seq. ID no. 13612947
  misc_feature (439)..(1024): Homolog of NCBI NO: 33413770 NR Description: cellulose synthase 2 [Gossypioides kirkii]
  misc_feature (439)..(1024): Homolog of NCBI NO: 33413766 NR Description: cellulose synthase 2 [Gossypium barbadense]
  misc_feature (439)..(1024): Homolog of NCBI NO: 33413768 NR Description: cellulose synthase 2 [Gossypium barbadense]
  misc_feature (439)..(1024): Homolog of NCBI NO: 33413762 NR Description: cellulose synthase 2 [Gossypium herbaceum]
  misc_feature (439)..(1024): Homolog of NCBI NO: 33413764 NR Description: cellulose synthase 2 [Gossypium raimondii]
  misc_feature (702)..(1027): Homolog of NCBI NO: 15228448 NR Description: cellulose synthase family [Arabidopsis thaliana] putative cellulose synthase catalytic subunit [Arabidopsis
  misc_feature (193)..(413): Homolog of NCBI NO: 15228448 NR Description: cellulose synthase family [Arabidopsis thaliana] putative cellulose synthase catalytic subunit [Arabidopsis
  misc_feature (425)..(594): Homolog of NCBI NO: 15228448 NR Description: cellulose synthase family [Arabidopsis thaliana] putative cellulose synthase catalytic subunit [Arabidopsis
  misc_feature (702)..(1027): Homolog of NCBI NO: 27372782 NR Description: cellulose synthase-like protein D4 [Populus
  misc_feature (176)..(413): Homolog of NCBI NO: 27372782 NR Description: cellulose synthase-like protein D4 [Populus
MASFDDEHRHSSFSAKICKVCGDEVKDDDNGQTFVACHVCVYPVCKPCYEYERSNGNKCCPQCNTLYKRHKGSPKIAGDEENNGPDDSDDELNIKYRQDGSSIHQNFAYGSENGDYNSKQQWRPNGRAFSSTGSVLGKDFEAERDGYTDAEWKERVDKWKARQEKRGLVTKGEQTNEDKEDDEEEYLDAEARQPLWRKVPISSSKISPYRIVIVLRLVILVFFFRFRILTPAKDAYPLWLISVICEIWFALSWILDQFPKWFPINRETYLDRLSMRFERDGEKNKLAPVDVFVSTVDPLKEPPIITANTILSILAVDYPVNKVSCYVSDDGASMLLFDTLSETSEFARRWVPFCKKYNVEPRAPEFYFSEKIDYLKDKVQTTFVKDRRAMKREYEEFKVRINALVAKAQKKPEEGWVMQDGTPWPGNNTRDHPGMIQVYLGKEGAFDIDGNELPRLVYVSREKRPGYAHHKKAGAMNAMVRVSAVLTNAPFMLNLDCDHYINNSKAIRESMCFLMDPQLGKKLCYVQFPQRFDGIDLNDRYANRNIVFFDINMRGLDGIQGPVYVGTGCVFNRPALYGYEPPVSEKRKKMTCDCWPSWICCCCGGGNRNHKSDSSKKKSGIKSLFSKLKKKTKKKSDDKTMSSYSRKRSSTEAIFDLEDIEEGLEGYDELEKSSLMSQKNFEKRFGMSPVFIASTLMENGGLPEATNTSSLIKEAIHVISCGYEEKTEWGKEIGWIYGSVTEDILTGFRMHCRGWKSVYCMPKRPAFKGSAPINLSDRLHQVLRWALGSVEIFFSRHCPLWYAWGGKLKILERLAYINTIVYPFTSIPLLAYCTIPAVCLLTGKFIIPTINNFASIWFLALFLSIIATAILELRWSGVSINDLWRNEQFWVIGGVSAHLFAVFQGLLKVLFGVDTNFTVTSKGASDEADEFGDLYLFKWTTLLIPPTTLIILNMVGVVAGVSDAINNGYGSWGPLFGKLFFAFWVIVHLYPFLKGLMGRQNRTPTIVVLWSILLASIFSLVWVRIDPFLPKQTGPLLKQCGVDC

SEQ ID NO: 103525 - protein, 770 aa, Arabidopsis thaliana; identical to SEQ ID NO: 75253
  peptide (1)..(770): Ceres Seq. ID no. 13612948
  misc_feature (165)..(750): Homolog of NCBI NO: 33413770 NR Description: cellulose synthase 2 [Gossypioides kirkii]
  misc_feature (165)..(750): Homolog of NCBI NO: 33413766 NR Description: cellulose synthase 2 [Gossypium barbadense]
  misc_feature (165)..(750): Homolog of NCBI NO: 33413768 NR Description: cellulose synthase 2 [Gossypium barbadense]
  misc_feature (165)..(750): Homolog of NCBI NO: 33413762 NR Description: cellulose synthase 2 [Gossypium herbaceum]
  misc_feature (165)..(750): Homolog of NCBI NO: 33413764 NR Description: cellulose synthase 2 [Gossypium raimondii]
  misc_feature (428)..(753): Homolog of NCBI NO: 15228448 NR Description: cellulose synthase family [Arabidopsis thaliana] putative cellulose synthase catalytic subunit [Arabidopsis
  misc_feature (1)..(139): Homolog of NCBI NO: 15228448 NR Description: cellulose synthase family [Arabidopsis thaliana] putative cellulose synthase catalytic subunit [Arabidopsis
  misc_feature (151)..(320): Homolog of NCBI NO: 15228448 NR Description: cellulose synthase family [Arabidopsis thaliana] putative cellulose synthase catalytic subunit [Arabidopsis
  misc_feature (428)..(753): Homolog of NCBI NO: 27372782 NR Description: cellulose synthase-like protein D4 [Populus
  misc_feature (1)..(139): Homolog of NCBI NO: 27372782 NR Description: cellulose synthase-like protein D4 [Populus

SEQ ID NO: 103526 - DNA, 1220 bp, Arabidopsis thaliana
  misc_feature (1)..(1220): Ceres Seq. ID no. 13612953
  misc_feature: MA Experiment ID: 108576 Result: Up-regulated in Transcription
  misc_feature: MA Experiment 108576 PARAMETER Experiment Name: At_42deg_Heat_cDNA_P Parameter: Temperature (deg C) Value: 42 vs. 22
  misc_feature: MA Experiment 108576 PARAMETER Experiment Name: At_42deg_Heat_cDNA_P Parameter: Timepoint (hr) Value: 1
  misc_feature: MA Experiment 108576 PARAMETER Experiment Name: At_42deg_Heat_cDNA_P Parameter: Tissue Value: Aerial
  misc_feature: MA Experiment ID: 20000144 Result: Up-regulated in Transcription
  misc_feature: MA Experiment 20000144 PARAMETER Experiment Name: At_42deg_Heat_cDNA_P Parameter: Temperature (deg C) Value: 42 vs. 22
  misc_feature: MA Experiment 20000144 PARAMETER Experiment Name: At_42deg_Heat_cDNA_P Parameter: Timepoint (hr) Value: 1
  misc_feature: MA Experiment 20000144 PARAMETER Experiment Name: At_42deg_Heat_cDNA_P Parameter: Tissue Value: Aerial
  misc_feature: MA Experiment ID: 20000496 Result: Up-regulated in Transcription
  misc_feature: MA Experiment 20000496 PARAMETER Experiment Name: At_Guard_Cells_P Parameter: Harvest Date Value: 7/19/2002
  misc_feature: MA Experiment 20000496 PARAMETER Experiment Name: At_Guard_Cells_P Parameter: Organism Value: Canola
  misc_feature: MA Experiment 20000496 PARAMETER Experiment Name: At_Guard_Cells_P Parameter: Tissue Value: Guard Cells vs. Leaves
ttcgacacaaaaagccctaatctctgcttctgtaaagttcaacatttggcggagtcaaagaaacagagtgattctctgatccgattccggcgaaagaggacgaaacaaacggaacttgttcatcatcttctccagaaatgacgtcgtttcaggtgatgcgttcttcaaattcgagaaactcggatctatctcgtcgcatctcttctgcttctacttcttcttcgtctataagacctcaacaacagttccggcgagatctaacaagtgtcggttacggcggaagaaacgacggattatacagttcaaattcgatgacggtcgaagggattttacacgatactttcgcatcagatccaccagcaccaacggaatcttcactcttagatgcgtcgataaatctgatggatgcttctccagcaccaatggagataacaacaacgacggcttctgatgttgtggatcacggcggaggaacggagacgacgcgtggtgggaagagtgttgatgagatttggagagagatggtatcaggagaaggtaaagggatgaaggaagagacgtcggaagagataatgacgttagaggattttctagcgaaagctgcggtggaagacgaaacagcggtgacggcgtcggcggaggatttggatgtgaagattccggtgacgaattacggattcgatcattctgcaccgccgcataatccgtttcagatgattgataaagtagaaggatcaatagttgcgtttgggaatggtttagatgtttacggaggaggagctagagggaagagagcgagagtgatggttgagccattggataaagcagctgcacagagacagagaaggatgattaagaatcgtgaatctgcagctaggtctagagagaggaaacaagcttatcaagttgagttagaagctttggctgcgaagcttgaggaagagaatgagttgctttctaaggagattgaagataagaggaaagagagataccagaagttgatggagtttgtgattcctgttgttgagaaaccgaagcagcagccaccacggtttttacgcaggattcggtctttggaatggtgataagaggtatagacttttgaggattttagggtcttaatgttacttactttgtgtatgtgtgtgtgagagttgattcataatctgcagtagagtgtaatgattatggttaataacttatatattatattagattgc

SEQ ID NO: 103527 - protein, 315 aa, Arabidopsis thaliana; identical to SEQ ID NO: 35809
  peptide (1)..(315): Ceres Seq. ID no. 13612954
  misc_feature (229)..(293): Pfam Name: bZIP transcription factor Pfam Description: bZIP transcription factor
  misc_feature (1)..(315): Homolog of NCBI NO: 15240086 NR Description: bZIP transcription factor, G-box binding factor
  misc_feature (1)..(315): Homolog of NCBI NO: 21554353 NR Description: unknown [Arabidopsis thaliana]
  misc_feature (103)..(315): Homolog of NCBI NO: 15219608 NR Description: G-box binding factor 4, GBF4 [Arabidopsis
  misc_feature (120)..(315): Homolog of NCBI NO: 7489466 NR Description: DNA binding protein - rice
  misc_feature (120)..(315): Homolog of NCBI NO: 7638404 NR Description: OSE2 [Oryza sativa]
  misc_feature (212)..(315): Homolog of NCBI NO: 29367541 NR Description: OSE2-like protein [Oryza sativa (japonica
  misc_feature (120)..(315): Homolog of NCBI NO: 34908608 NR Description: putative DNA binding protein [Oryza sativa
  misc_feature (116)..(312): Homolog of NCBI NO: 33146493 NR Description: putative bZIP protein DPBF3 [Oryza sativa
  misc_feature (120)..(278): Homolog of NCBI NO: 26451276 NR Description: putative bZIP transcription factor AtbZIP12 /
  misc_feature (120)..(278): Homolog of NCBI NO: 7487620 NR Description: probable bZIP transcription factor [imported] -

SEQ ID NO: 103528 - protein, 309 aa, Arabidopsis thaliana; identical to SEQ ID NO: 35810
  peptide (1)..(309): Ceres Seq. ID no. 13612955
  misc_feature (223)..(287): Pfam Name: bZIP transcription factor Pfam Description: bZIP transcription factor
  misc_feature (1)..(309): Homolog of NCBI NO: 15240086 NR Description: bZIP transcription factor, G-box binding factor
  misc_feature (1)..(309): Homolog of NCBI NO: 21554353 NR Description: unknown [Arabidopsis thaliana]
  misc_feature (97)..(309): Homolog of NCBI NO: 15219608 NR Description: G-box binding factor 4, GBF4 [Arabidopsis
  misc_feature (114)..(309): Homolog of NCBI NO: 7489466 NR Description: DNA binding protein - rice
  misc_feature (114)..(309): Homolog of NCBI NO: 7638404 NR Description: OSE2 [Oryza sativa]
  misc_feature (206)..(309): Homolog of NCBI NO: 29367541 NR Description: OSE2-like protein [Oryza sativa (japonica
  misc_feature (114)..(309): Homolog of NCBI NO: 34908608 NR Description: putative DNA binding protein [Oryza sativa
  misc_feature (110)..(306): Homolog of NCBI NO: 33146493 NR Description: putative bZIP protein DPBF3 [Oryza sativa
  misc_feature (114)..(272): Homolog of NCBI NO: 26451276 NR Description: putative bZIP transcription factor AtbZIP12 /
  misc_feature (114)..(272): Homolog of NCBI NO: 7487620 NR Description: probable bZIP transcription factor [imported] -

SEQ ID NO: 103529 - protein, 257 aa, Arabidopsis thaliana; identical to SEQ ID NO: 35811
  peptide (1)..(257): Ceres Seq. ID no. 13612956
  misc_feature (171)..(235): Pfam Name: bZIP transcription factor Pfam Description: bZIP transcription factor
  misc_feature (1)..(257): Homolog of NCBI NO: 15240086 NR Description: bZIP transcription factor, G-box binding factor
  misc_feature (1)..(257): Homolog of NCBI NO: 21554353 NR Description: unknown [Arabidopsis thaliana]
  misc_feature (45)..(257): Homolog of NCBI NO: 15219608 NR Description: G-box binding factor 4, GBF4 [Arabidopsis
  misc_feature (62)..(257): Homolog of NCBI NO: 7489466 NR Description: DNA binding protein - rice
  misc_feature (62)..(257): Homolog of NCBI NO: 7638404 NR Description: OSE2 [Oryza sativa]
  misc_feature (154)..(257): Homolog of NCBI NO: 29367541 NR Description: OSE2-like protein [Oryza sativa (japonica
  misc_feature (62)..(257): Homolog of NCBI NO: 34908608 NR Description: putative DNA binding protein [Oryza sativa
  misc_feature (58)..(254): Homolog of NCBI NO: 33146493 NR Description: putative bZIP protein DPBF3 [Oryza sativa
  misc_feature (62)..(220): Homolog of NCBI NO: 26451276 NR Description: putative bZIP transcription factor AtbZIP12 /
  misc_feature (62)..(220): Homolog of NCBI NO: 7487620 NR Description: probable bZIP transcription factor [imported] -

SEQ ID NO: 103530 - DNA, 1434 bp, Arabidopsis thaliana
  misc_feature (1)..(1434): Ceres Seq. ID no. 13612957
  misc_feature: MA Experiment ID: 108462 Result: Down-regulated in Transcription
  misc_feature: MA Experiment 108462 PARAMETER Experiment Name: At_Germinating_Seeds_cDNA_P Parameter: Age (day) Value: 2 vs. 0
  misc_feature: MA Experiment 108462 PARAMETER Experiment Name: At_Germinating_Seeds_cDNA_P Parameter: Tissue Value: Germinating Seeds
  misc_feature: MA Experiment ID: 108464 Result: Down-regulated in Transcription
  misc_feature: MA Experiment 108464 PARAMETER Experiment Name: At_Germinating_Seeds_cDNA_P Parameter: Age (day) Value: 4 vs. 0
  misc_feature: MA Experiment 108464 PARAMETER Experiment Name: At_Germinating_Seeds_cDNA_P Parameter: Tissue Value: Germinating Seeds
  misc_feature: MA Experiment ID: 108573 Result: Up-regulated in Transcription
  misc_feature: MA Experiment 108573 PARAMETER Experiment Name: At_Drought_cDNA_P Parameter: Timepoint (hr) Value: 6
  misc_feature: MA Experiment 108573 PARAMETER Experiment Name: At_Drought_cDNA_P Parameter: Tissue Value: Aerial
  misc_feature: MA Experiment 108573 PARAMETER Experiment Name: At_Drought_cDNA_P Parameter: Treatment Value: Drought vs. No Drought
  misc_feature: MA Experiment ID: 20000111 Result: Down-regulated in Transcription
  misc_feature: MA Experiment 20000111 PARAMETER Experiment Name: At_42deg_Heat_cDNA_P Parameter: Temperature (deg C) Value: 42 vs. 22
  misc_feature: MA Experiment 20000111 PARAMETER Experiment Name: At_42deg_Heat_cDNA_P Parameter: Timepoint (hr) Value: 6
  misc_feature: MA Experiment 20000111 PARAMETER Experiment Name: At_42deg_Heat_cDNA_P Parameter: Tissue Value: Aerial
  misc_feature: MA Experiment ID: 20000224 Result: Down-regulated in Transcription
  misc_feature: MA Experiment ID: 20000794 Result: Up-regulated in Transcription
  misc_feature: MA Experiment 20000794 PARAMETER Experiment Name: At_Petals_P Parameter: Age (day) Value: 23-25 days
  misc_feature: MA Experiment 20000794 PARAMETER Experiment Name: At_Petals_P Parameter: Plant Line Value: WS
  misc_feature: MA Experiment 20000794 PARAMETER Experiment Name: At_Petals_P Parameter: Tissue Value: Petals vs. Whole plant
  misc_feature: MA Experiment ID: 20001247 Result: Up-regulated in Transcription
  misc_feature: MA Experiment 20001247 PARAMETER Experiment Name: At_Far-red-induction_P Parameter: Age (day) Value: 7
  misc_feature: MA Experiment 20001247 PARAMETER Experiment Name: At_Far-red-induction_P Parameter: Light Value: Far-red vs. White
  misc_feature: MA Experiment 20001247 PARAMETER Experiment Name: At_Far-red-induction_P Parameter: Organism Value: A. thaliana
  misc_feature: MA Experiment 20001247 PARAMETER Experiment Name: At_Far-red-induction_P Parameter: Plant Line Value: Columbia
  misc_feature: MA Experiment 20001247 PARAMETER Experiment Name: At_Far-red-induction_P Parameter: Timepoint (hr) Value: 1
  misc_feature: MA Experiment 20001247 PARAMETER Experiment Name: At_Far-red-induction_P Parameter: Tissue Value: Whole Plant
  misc_feature: MA Experiment ID: 20001248 Result: Up-regulated in Transcription
  misc_feature: MA Experiment 20001248 PARAMETER Experiment Name: At_Far-red-induction_P Parameter: Age (day) Value: 7
  misc_feature: MA Experiment 20001248 PARAMETER Experiment Name: At_Far-red-induction_P Parameter: Light Value: Far-red vs. White
  misc_feature: MA Experiment 20001248 PARAMETER Experiment Name: At_Far-red-induction_P Parameter: Organism Value: A. thaliana
  misc_feature: MA Experiment 20001248 PARAMETER Experiment Name: At_Far-red-induction_P Parameter: Plant Line Value: Columbia
  misc_feature: MA Experiment 20001248 PARAMETER Experiment Name: At_Far-red-induction_P Parameter: Timepoint (hr) Value: 4
  misc_feature: MA Experiment 20001248 PARAMETER Experiment Name: At_Far-red-induction_P Parameter: Tissue Value: Whole Plant
  misc_feature: MA Experiment ID: 20001450 Result: Up-regulated in Transcription
  misc_feature: MA Experiment 20001450 PARAMETER Experiment Name: At_Far-red-induction_P Parameter: Age (day) Value: 7
  misc_feature: MA Experiment 20001450 PARAMETER Experiment Name: At_Far-red-induction_P Parameter: Light Value: Far-red vs. White
  misc_feature: MA Experiment 20001450 PARAMETER Experiment Name: At_Far-red-induction_P Parameter: Organism Value: A. thaliana
  misc_feature: MA Experiment 20001450 PARAMETER Experiment Name: At_Far-red-induction_P Parameter: Plant Line Value: Columbia
  misc_feature: MA Experiment 20001450 PARAMETER Experiment Name: At_Far-red-induction_P Parameter: Timepoint (hr) Value: 8
  misc_feature: MA Experiment 20001450 PARAMETER Experiment Name: At_Far-red-induction_P Parameter: Tissue Value: Whole Plant
gccctttcattattatgtcaacaaccctcctctattgaagatttcttcaatcatcttctccacaacaaaaaaataaccctaatttacacagaaaatatgtggggaattggaggaaattactactggcgaaagaaaaacaacaacggaggagaaagcgaagcgatcgttgtggtattcgcttggatgtctagcgaagaacgcaatctaaagaaccatgtcgatctctattcttctcttctttgggattctctcgtttgccattctcaatttctcaacatgtttcttccagataaagctgcagatttagcttctaatgttgtttctgaacttgtcaaggagctcaaagcaaagccagttcctttagtgtttgcttctttctctggtggtcctaatgcttgtatgtataaagttcttcaaatacttgaaggaacatgcgaaacgggactaaatccggatgattgtagattggttagaaactgcatctcagggtttatttatgactcatgtcctgtggatttcactagcgacttgggagctcgattagcggttcatccaactacgcttaaaatgtctagtccacctaaaccgtttgtatgggcagcgaatggtattgcttcgagtctcgattatgtttttctcaacaggtttgaatcacagcgagccgagtactggcagactctttactctactataatcatgagagtaccttatctcattctatgctctgaaaacgatgaccttgctccttatcaaactatacacaatttcgctacacgtctccaagaactaggaggaaatgtaaaacttgtaaaatggaatgattcccctcattgtggtcattatcgttataaccaggtcgactataaagctgctgtatctgagttcttgtcaaaagcagcgtcggtttattcgcagaagacgagaagtcttgacagagaagctatgaaaggaacatgtcatgatgagataacagagccaattcagagcttggggcaatcaacctctggtcttaaccgaagcttcaacggaactccacttgtcacaaccgatcatttcttcgtacctagcaccgtaggttactacgtgggcagagacggcggatatgtgcaagatgaacacaaacaagatttgatttgtttgtccaatactcaaaccaatgaatcggttaagcccaatggagttctaggccaaatcttatttgatgtttatattccgaagaatgttgaggattgggatataaagctatcagaaaccgggcggtctaggcggagaccggggaagagatttatacgtagatcgagattgtaacatctgagttatatattatatataccatgagtacccatttgttttcttcagatactgttgcagaggtattccatttggttttccctcgcaaagattaataaattaataaaataagatcttttttgc

SEQ ID NO: 103531 - protein, 435 aa, Arabidopsis thaliana; identical to SEQ ID NO: 36305
  peptide (1)..(435): Ceres Seq. ID no. 13612958
  misc_feature (128)..(411): Pfam Name: Eukaryotic protein of unknown function (DUF829) Pfam Description: Eukaryotic protein of unknown function (DUF829)
  misc_feature (33)..(435): Homolog of NCBI NO: 15241450 NR Description: expressed protein [Arabidopsis thaliana] contains similarity to unknown [Arabidopsis thaliana] >gi|15450862|gb|AAK96702.1| Unknown
  misc_feature (37)..(416): Homolog of NCBI NO: 18397898 NR Description: expressed protein [Arabidopsis thaliana]
  misc_feature (37)..(416): Homolog of NCBI NO: 25411656 NR Description: hypothetical protein At2g15690 [imported] -

SEQ ID NO: 103532 - protein, 403 aa, Arabidopsis thaliana; identical to SEQ ID NO: 36306
  peptide (1)..(403): Ceres Seq. ID no. 13612959
  misc_feature (96)..(379): Pfam Name: Eukaryotic protein of unknown function (DUF829) Pfam Description: Eukaryotic protein of unknown function (DUF829)
  misc_feature (1)..(403): Homolog of NCBI NO: 15241450 NR Description: expressed protein [Arabidopsis thaliana] contains similarity to unknown [Arabidopsis thaliana] >gi|15450862|gb|AAK96702.1| Unknown
  misc_feature (5)..(384): Homolog of NCBI NO: 18397898 NR Description: expressed protein [Arabidopsis thaliana]
  misc_feature (5)..(384): Homolog of NCBI NO: 25411656 NR Description: hypothetical protein At2g15690 [imported] -

SEQ ID NO: 103533 - protein, 374 aa, Arabidopsis thaliana; identical to SEQ ID NO: 36307
  peptide (1)..(374): Ceres Seq. ID no. 13612960
  misc_feature (67)..(350): Pfam Name: Eukaryotic protein of unknown function (DUF829) Pfam Description: Eukaryotic protein of unknown function (DUF829)
  misc_feature (1)..(374): Homolog of NCBI NO: 15241450 NR Description: expressed protein [Arabidopsis thaliana] contains similarity to unknown [Arabidopsis thaliana] >gi|15450862|gb|AAK96702.1| Unknown
  misc_feature (1)..(355): Homolog of NCBI NO: 18397898 NR Description: expressed protein [Arabidopsis thaliana]
  misc_feature (1)..(355): Homolog of NCBI NO: 25411656 NR Description: hypothetical protein At2g15690 [imported] -

SEQ ID NO: 103534 - DNA, 1789 bp, Arabidopsis thaliana
  misc_feature (1)..(1789): Ceres Seq. ID no. 13612965
  misc_feature: MA Experiment ID: 108434 Result: Up-regulated in Transcription
  misc_feature: MA Experiment 108434 PARAMETER Experiment Name: At_Root_Tips_cDNA_P Parameter: Tissue Value: Root Tips
  misc_feature: MA Experiment ID: 108462 Result: Down-regulated in Transcription
  misc_feature: MA Experiment 108462 PARAMETER Experiment Name: At_Germinating_Seeds_cDNA_P Parameter: Age (day) Value: 2 vs. 0
  misc_feature: MA Experiment 108462 PARAMETER Experiment Name: At_Germinating_Seeds_cDNA_P Parameter: Tissue Value: Germinating Seeds
  misc_feature: MA Experiment ID: 108463 Result: Down-regulated in Transcription
  misc_feature: MA Experiment 108463 PARAMETER Experiment Name: At_Germinating_Seeds_cDNA_P Parameter: Age (day) Value: 3 vs. 0
  misc_feature: MA Experiment 108463 PARAMETER Experiment Name: At_Germinating_Seeds_cDNA_P Parameter: Tissue Value: Germinating Seeds
  misc_feature: MA Experiment ID: 108464 Result: Down-regulated in Transcription
  misc_feature: MA Experiment 108464 PARAMETER Experiment Name: At_Germinating_Seeds_cDNA_P Parameter: Age (day) Value: 4 vs. 0
  misc_feature: MA Experiment 108464 PARAMETER Experiment Name: At_Germinating_Seeds_cDNA_P Parameter: Tissue Value: Germinating Seeds
  misc_feature: MA Experiment ID: 108569 Result: Up-regulated in Transcription
  misc_feature: MA Experiment 108569 PARAMETER Experiment Name: At_0.001%_MeJA__cDNA_P Parameter: Timepoint (hr) Value: 6
  misc_feature: MA Experiment 108569 PARAMETER Experiment Name: At_0.001%_MeJA__cDNA_P Parameter: Tissue Value: Aerial
  misc_feature: MA Experiment 108569 PARAMETER Experiment Name: At_0.001%_MeJA__cDNA_P Parameter: Treatment Value: 0.001% MeJA vs. No Treatment
  misc_feature: MA Experiment ID: 108573 Result: Up-regulated in Transcription
  misc_feature: MA Experiment 108573 PARAMETER Experiment Name: At_Drought_cDNA_P Parameter: Timepoint (hr) Value: 6
  misc_feature: MA Experiment 108573 PARAMETER Experiment Name: At_Drought_cDNA_P Parameter: Tissue Value: Aerial
  misc_feature: MA Experiment 108573 PARAMETER Experiment Name: At_Drought_cDNA_P Parameter: Treatment Value: Drought vs. No Drought
  misc_feature: MA Experiment ID: 108576 Result: Down-regulated in Transcription
  misc_feature: MA Experiment 108576 PARAMETER Experiment Name: At_42deg_Heat_cDNA_P Parameter: Temperature (deg C) Value: 42 vs. 22
  misc_feature: MA Experiment 108576 PARAMETER Experiment Name: At_42deg_Heat_cDNA_P Parameter: Timepoint (hr) Value: 1
  misc_feature: MA Experiment 108576 PARAMETER Experiment Name: At_42deg_Heat_cDNA_P Parameter: Tissue Value: Aerial
  misc_feature: MA Experiment ID: 108595 Result: Down-regulated in Transcription
  misc_feature: MA Experiment 108595 PARAMETER Experiment Name: At_Ler-pi_Ovule_cDNA_P Parameter: Plant Line Value: null
  misc_feature: MA Experiment ID: 20000087 Result: Down-regulated in Transcription
  misc_feature: MA Experiment 20000087 PARAMETER Experiment Name: At_100uM_ABA_Mutants_cDNA_P Parameter: Plant Line Value: WS
  misc_feature: MA Experiment 20000087 PARAMETER Experiment Name: At_100uM_ABA_Mutants_cDNA_P Parameter: Timepoint (hr) Value: 6
  misc_feature: MA Experiment 20000087 PARAMETER Experiment Name: At_100uM_ABA_Mutants_cDNA_P Parameter: Tissue Value: Aerial
  misc_feature: MA Experiment 20000087 PARAMETER Experiment Name: At_100uM_ABA_Mutants_cDNA_P Parameter: Treatment Value: 100uM ABA vs. No Treatment
  misc_feature: MA Experiment ID: 20000327 Result: Down-regulated in Transcription
  misc_feature: MA Experiment 20000327 PARAMETER Experiment Name: At_42deg_Heat_Sub_P Parameter: Age (day) Value: 14
  misc_feature: MA Experiment 20000327 PARAMETER Experiment Name: At_42deg_Heat_Sub_P Parameter: Organism Value: A. thaliana
  misc_feature: MA Experiment 20000327 PARAMETER Experiment Name: At_42deg_Heat_Sub_P Parameter: Plant Line Value: WS
  misc_feature: MA Experiment 20000327 PARAMETER Experiment Name: At_42deg_Heat_Sub_P Parameter: Temperature (deg C) Value: 42 vs. 22
  misc_feature: MA Experiment 20000327 PARAMETER Experiment Name: At_42deg_Heat_Sub_P Parameter: Timepoint (hr) Value: 1
  misc_feature: MA Experiment 20000327 PARAMETER Experiment Name: At_42deg_Heat_Sub_P Parameter: Tissue Value: Aerial
  misc_feature: MA Experiment ID: 20000355 Result: Down-regulated in Transcription
  misc_feature: MA Experiment 20000355 PARAMETER Experiment Name: At_Siliques_Sub_P Parameter: Age (day) Value: 21
  misc_feature: MA Experiment 20000355 PARAMETER Experiment Name: At_Siliques_Sub_P Parameter: Organism Value: A. thaliana
  misc_feature: MA Experiment 20000355 PARAMETER Experiment Name: At_Siliques_Sub_P Parameter: Plant Line Value: WS
  misc_feature: MA Experiment 20000355 PARAMETER Experiment Name: At_Siliques_Sub_P Parameter: Tissue Value: Less Than 5mm Siliques vs. Whole Plant
atcttcttcgcaaatctcaacaatggtgtttgaagcattcgaagtcggcacagtcccattcaattccgatggttggggaccaccagatgcttccgacacttcctccaccagcgtcgcggcggcgaatctcctcccaaacgtccccttcgcttccttctcacgatccgaaaaactcggacgcgttgctgattggactcgagctctctcaaatccatcagctcgtcctcacaccggatccaaatcagatccatcagcgatcttcgatttctcagcttttgcagtagatgaaggatttggtctaacaaactcaggtggaaacgccgacgaagacgccgctttccgattagtcgacggaaaaccaccgccgcgtcctaaattcggacctaaatggagattcaatcaataccataaccgaaatcagcttcctcaacgtcgtgatgaagaagttgaagctaagaaacgtgaagctgagaaagatcgagctcgtcgtgatcgtctctacaataacaatcgtaacaatattcatcagcaacgccgtgaagccgccgcgtttaaatcatcagttgatattcaaccggaatggaatatgcttgagcagattccgttttcgactttctctaagctttcgtttacagtttctgaacctgaagatcttcttctttgtggtggacttgagtcttatgatcggagttttgatcgtattactcctaaagctgatcgtagacttgagcgtttcaagaacagaagctttaaggttactacaagtgatgatcttgtgatcagacgtcttgctaaagaagataaagctactgtttttgctactgatgctattctagctgctcttatgtgtgctcctagatcggtttattcatgggatcttgtgattcaacgtgttgggaataagcttttctttgataagagagatgggtcaccgcttgatttgttatctgttcatgagacttctcaagagcctttgcctgagggtaaagatgatattaactctgctcattctctaggtctggaggctgcttatattaatcagaattttgctcagcaggttttggttaagaatgggaaaagggaaacttttgatgagccaattcctaatgttaatgaaggtgaagagaatgcttctattgcttataggtataggagatggaagcttgatgatagtatgtatctagttgctaggtgtgagttacagagcactgttgatttgaataaccagagatcgtttttaactttgaatgctcttaacgagtttgatcctaagtactctggtgttgattggagacagaagcttgagactcagagaggtgcggttttagctaatgagttgaagaacaatggtaataagttagctaaatggactgcgcaggctctcttggctaatgcggatatgatgaagattgggtttgtttcgagggttcatcctcgtgatcattttaaccatgttatattatcggttttggggtataagccgaaagatttcgctgggcagatcaatctgaacactaacaatatgtggggaattgtgaagtcgattgttgatctgtgtatgaagttaagtgaaggaaagtatgttctagtgaaggatccatcgaagcctcaagttaggatttacgaagttccggctgatgcatttgacaatgattatgtggaggagccactccctgaagatgaacaggttcagccacctgaggagaacactgatgcaggagcagagactaatggggtttcctctactaatgtagctgtagaggataagaaatccgaagttgaagcctga

SEQ ID NO: 103535 - protein, 595 aa, Arabidopsis thaliana; identical to SEQ ID NO: 39389
  peptide (1)..(595): Ceres Seq. ID no. 13612966
  misc_feature (10)..(561): Pfam Name: Eukaryotic translation initiation factor 3 Pfam Description: Eukaryotic translation initiation factor 3
  misc_feature (8)..(595): Homolog of NCBI NO: 15233469 NR Description: translation initiation factor eIF3 - like protein
  misc_feature (8)..(595): Homolog of NCBI NO: 17528988 NR Description: putative translation initiation factor eIF3
  misc_feature (177)..(595): Homolog of NCBI NO: 12407755 NR Description: initiation factor 3d [Arabidopsis thaliana]
  misc_feature (13)..(595): Homolog of NCBI NO: 31207329 NR Description: ENSANGP00000015368 [Anopheles gambiae]
  misc_feature (13)..(569): Homolog of NCBI NO: 31418925 NR Description: Unknown (protein for MGC:64097) [Danio rerio]
  misc_feature (13)..(567): Homolog of NCBI NO: 27882463 NR Description: Similar to eukaryotic translation initiation
  misc_feature (13)..(568): Homolog of NCBI NO: 4503523 NR Description: eukaryotic translation initiation factor 3 translation initiation factor eIF3 p66 subunit [Homo sapiens]
  misc_feature (13)..(570): Homolog of NCBI NO: 38174024 NR Description: Unknown (protein for MGC:75703) [Silurana
  misc_feature (13)..(568): Homolog of NCBI NO: 34866902 NR Description: similar to eukaryotic translation initiation (zeta, 66/67kD); translation initiation factor eIF3 p66 subunit
  misc_feature (2)..(564): Homolog of NCBI NO: 24649360 NR Description: Eukaryotic initiation factor 3 p66 subunit

SEQ ID NO: 103536 - protein, 588 aa, Arabidopsis thaliana; identical to SEQ ID NO: 39390
  peptide (1)..(588): Ceres Seq. ID no. 13612967
  misc_feature (3)..(554): Pfam Name: Eukaryotic translation initiation factor 3 Pfam Description: Eukaryotic translation initiation factor 3
  misc_feature (1)..(588): Homolog of NCBI NO: 15233469 NR Description: translation initiation factor eIF3 - like protein
  misc_feature (1)..(588): Homolog of NCBI NO: 17528988 NR Description: putative translation initiation factor eIF3
  misc_feature (170)..(588): Homolog of NCBI NO: 12407755 NR Description: initiation factor 3d [Arabidopsis thaliana]
  misc_feature (6)..(588): Homolog of NCBI NO: 31207329 NR Description: ENSANGP00000015368 [Anopheles gambiae]
  misc_feature (6)..(562): Homolog of NCBI NO: 31418925 NR Description: Unknown (protein for MGC:64097) [Danio rerio]
  misc_feature (6)..(560): Homolog of NCBI NO: 27882463 NR Description: Similar to eukaryotic translation initiation
  misc_feature (6)..(561): Homolog of NCBI NO: 4503523 NR Description: eukaryotic translation initiation factor 3 translation initiation factor eIF3 p66 subunit [Homo sapiens]
  misc_feature (6)..(563): Homolog of NCBI NO: 38174024 NR Description: Unknown (protein for MGC:75703) [Silurana
  misc_feature (6)..(561): Homolog of NCBI NO: 34866902 NR Description: similar to eukaryotic translation initiation (zeta, 66/67kD); translation initiation factor eIF3 p66 subunit
  misc_feature (1)..(557): Homolog of NCBI NO: 24649360 NR Description: Eukaryotic initiation factor 3 p66 subunit

SEQ ID NO: 103537 - protein, 400 aa, Arabidopsis thaliana; identical to SEQ ID NO: 39391
  peptide (1)..(400): Ceres Seq. ID no. 13612968
  misc_feature (1)..(366): Pfam Name: Eukaryotic translation initiation factor 3 Pfam Description: Eukaryotic translation initiation factor 3
  misc_feature (1)..(400): Homolog of NCBI NO: 15233469 NR Description: translation initiation factor eIF3 - like protein
  misc_feature (1)..(400): Homolog of NCBI NO: 17528988 NR Description: putative translation initiation factor eIF3
  misc_feature (1)..(400): Homolog of NCBI NO: 12407755 NR Description: initiation factor 3d [Arabidopsis thaliana]
  misc_feature (1)..(400): Homolog of NCBI NO: 31207329 NR Description: ENSANGP00000015368 [Anopheles gambiae]
  misc_feature (1)..(374): Homolog of NCBI NO: 31418925 NR Description: Unknown (protein for MGC:64097) [Danio rerio]
  misc_feature (1)..(372): Homolog of NCBI NO: 27882463 NR Description: Similar to eukaryotic translation initiation
  misc_feature (1)..(373): Homolog of NCBI NO: 4503523 NR Description: eukaryotic translation initiation factor 3 translation initiation factor eIF3 p66 subunit [Homo sapiens]
  misc_feature (1)..(375): Homolog of NCBI NO: 38174024 NR Description: Unknown (protein for MGC:75703) [Silurana
  misc_feature (1)..(373): Homolog of NCBI NO: 34866902 NR Description: similar to eukaryotic translation initiation (zeta, 66/67kD); translation initiation factor eIF3 p66 subunit
  misc_feature (1)..(369): Homolog of NCBI NO: 24649360 NR Description: Eukaryotic initiation factor 3 p66 subunit

SEQ ID NO: 103538 - DNA, 1272 bp, Arabidopsis thaliana
  misc_feature (1)..(1272): Ceres Seq. ID no. 13612973
  misc_feature: MA Experiment ID: 108434 Result: Up-regulated in Transcription
  misc_feature: MA Experiment 108434 PARAMETER Experiment Name: At_Root_Tips_cDNA_P Parameter: Tissue Value: Root Tips
  misc_feature: MA Experiment ID: 20000224 Result: Down-regulated in Transcription
atatctcgccgccgccgtcgacgacgacgacacttgcttcaccaccgtatcgctatcaacagaggaaagagataagaagcgtgttaactctttcttctaattccatggatatttgtggcgttgattccgaagggaaagagtttaatagcgtacaagagatgtggagagaagaaattggagaaggagacgaaactaaaaaaacccaatggtatagagatggtgtttcttattgggaaggtgttgaagcttctgttgatggagtattaggaggatatgggcatgtgaatgatgctgatattataggaagtgaggtttttcttaagactcttttgcaagaaagattagttaacaatgttggagctaatcagcatttagtagctcttgattgtggatctggtattggaagaatcactaaaaatcttctgattcgatactttaacgaggttgatcttcttgagcctgtagcacaatttttggatgcagctcgtgaaaatttggcatctgcaggctctgaaacgcacaaagctactaactttttctgtgtacctcttcaggagtttactccagctgctgggaggtatgatgtaatatgggttcaatggtgcattgggcatctcacggacaatgactttgtttctttctttaaccgcgcaaagggataccttaaacctggtgggtttttcgtcgtgaaagagaatctcgctaaaaatggatttgttttggataaagaggatcatagcatcaccagatcggatccatacttcaaacagctctttcgccaatgtgggttacatctctatagaacaaaggatcagaaaggtcttccacaagagttatttgctgtaaaaatgtatgcgttaacggttgacacaccacccaaaatccaccgaaccaggtcaaaaactcgaagcaacagaccgcagattatcaaatgacaaagcttccgattggtttactacggagtcttaatcgtttggtgtaaagagagaagctaccaaaggtgttgtaagatctggatcaaggcttggctgcttcattgtcacatggtttggttttgtgcatgctcgattctcctctcctccatcaccttaccaagtcataaactctcgtgtactcatgactaaacctgtttctgctccattctgttttttatctgataatttgtccggacttgaagaaattagaattgtgatccttttactgtagccacatattcctataccatttttgtttaaaatatttaattgtactatatttcgatgttctacaagt

SEQ ID NO: 103539 - protein, 310 aa, Arabidopsis thaliana
  peptide (1)..(310): Ceres Seq. ID no. 13612974
  misc_feature (65)..(287): Pfam Name: Eukaryotic protein of unknown function (DUF858) Pfam Description: Eukaryotic protein of unknown function (DUF858)
  misc_feature (53)..(310): Homolog of NCBI NO: 15241499 NR Description: expressed protein [Arabidopsis thaliana]
  misc_feature (56)..(310): Homolog of NCBI NO: 34897080 NR Description: unknown protein [Oryza sativa (japonica
  misc_feature (35)..(59): Homolog of NCBI NO: 34897080 NR Description: unknown protein [Oryza sativa (japonica
  misc_feature (63)..(286): Homolog of NCBI NO: 12655091 NR Description: AD-003 protein [Homo sapiens]
  misc_feature (63)..(286): Homolog of NCBI NO: 24528555 NR Description: RIKEN cDNA 2610205E22 [Mus musculus]
  misc_feature (63)..(286): Homolog of NCBI NO: 7661528 NR Description: AD-003 protein [Homo sapiens]
  misc_feature (70)..(286): Homolog of NCBI NO: 6523567 NR Description: hypothetical protein [Zygosaccharomyces rouxii]
  misc_feature (68)..(286): Homolog of NCBI NO: 19115139 NR Description: Putative S-adenosylmethionine-dependent [Schizosaccharomyces pombe] >gi|3183316|sp|O13748|YDRE_SCHPO protein C16E8.14c in chromosome I >gi|7490834|pir||T37794
  misc_feature (70)..(286): Homolog of NCBI NO: 6319738 NR Description: Hypothetical ORF; Ybr261cp [Saccharomyces
  misc_feature (66)..(285): Homolog of NCBI NO: 24652235 NR Description: CG1675-PA [Drosophila melanogaster]
ISPPPSTTTTLASPPYRYQQRKEIRSVLTLSSNSMDICGVDSEGKEFNSVQEMWREEIGEGDETKKTQWYRDGVSYWEGVEASVDGVLGGYGHVNDADIIGSEVFLKTLLQERLVNNVGANQHLVALDCGSGIGRITKNLLIRYFNEVDLLEPVAQFLDAARENLASAGSETHKATNFFCVPLQEFTPAAGRYDVIWVQWCIGHLTDNDFVSFFNRAKGYLKPGGFFVVKENLAKNGFVLDKEDHSITRSDPYFKQLFRQCGLHLYRTKDQKGLPQELFAVKMYALTVDTPPKIHRTRSKTRSNRPQIIK

SEQ ID NO: 103540 - protein, 276 aa, Arabidopsis thaliana
  peptide (1)..(276): Ceres Seq. ID no. 13612975
  misc_feature (31)..(253): Pfam Name: Eukaryotic protein of unknown function (DUF858) Pfam Description: Eukaryotic protein of unknown function (DUF858)
  misc_feature (19)..(276): Homolog of NCBI NO: 15241499 NR Description: expressed protein [Arabidopsis thaliana]
  misc_feature (22)..(276): Homolog of NCBI NO: 34897080 NR Description: unknown protein [Oryza sativa (japonica
  misc_feature (1)..(25): Homolog of NCBI NO: 34897080 NR Description: unknown protein [Oryza sativa (japonica
  misc_feature (29)..(252): Homolog of NCBI NO: 12655091 NR Description: AD-003 protein [Homo sapiens]
  misc_feature (29)..(252): Homolog of NCBI NO: 24528555 NR Description: RIKEN cDNA 2610205E22 [Mus musculus]
  misc_feature (29)..(252): Homolog of NCBI NO: 7661528 NR Description: AD-003 protein [Homo sapiens]
  misc_feature (36)..(252): Homolog of NCBI NO: 6523567 NR Description: hypothetical protein [Zygosaccharomyces rouxii]
  misc_feature (34)..(252): Homolog of NCBI NO: 19115139 NR Description: Putative S-adenosylmethionine-dependent [Schizosaccharomyces pombe] >gi|3183316|sp|O13748|YDRE_SCHPO protein C16E8.14c in chromosome I >gi|7490834|pir||T37794
  misc_feature (36)..(252): Homolog of NCBI NO: 6319738 NR Description: Hypothetical ORF; Ybr261cp [Saccharomyces
  misc_feature (32)..(251): Homolog of NCBI NO: 24652235 NR Description: CG1675-PA [Drosophila melanogaster]
MDICGVDSEGKEFNSVQEMWREEIGEGDETKKTQWYRDGVSYWEGVEASVDGVLGGYGHVNDADIIGSEVFLKTLLQERLVNNVGANQHLVALDCGSGIGRITKNLLIRYFNEVDLLEPVAQFLDAARENLASAGSETHKATNFFCVPLQEFTPAAGRYDVIWVQWCIGHLTDNDFVSFFNRAKGYLKPGGFFVVKENLAKNGFVLDKEDHSITRSDPYFKQLFRQCGLHLYRTKDQKGLPQELFAVKMYALTVDTPPKIHRTRSKTRSNRPQIIK

SEQ ID NO: 103541 - protein, 258 aa, Arabidopsis thaliana
  peptide (1)..(258): Ceres Seq. ID no. 13612976
  misc_feature (13)..(235): Pfam Name: Eukaryotic protein of unknown function (DUF858) Pfam Description: Eukaryotic protein of unknown function (DUF858)
  misc_feature (1)..(258): Homolog of NCBI NO: 15241499 NR Description: expressed protein [Arabidopsis thaliana]
  misc_feature (4)..(258): Homolog of NCBI NO: 34897080 NR Description: unknown protein [Oryza sativa (japonica
  misc_feature (11)..(234): Homolog of NCBI NO: 12655091 NR Description: AD-003 protein [Homo sapiens]
  misc_feature (11)..(234): Homolog of NCBI NO: 24528555 NR Description: RIKEN cDNA 2610205E22 [Mus musculus]
  misc_feature (11)..(234): Homolog of NCBI NO: 7661528 NR Description: AD-003 protein [Homo sapiens]
  misc_feature (18)..(234): Homolog of NCBI NO: 6523567 NR Description: hypothetical protein [Zygosaccharomyces rouxii]
  misc_feature (16)..(234): Homolog of NCBI NO: 19115139 NR Description: Putative S-adenosylmethionine-dependent [Schizosaccharomyces pombe] >gi|3183316|sp|O13748|YDRE_SCHPO protein C16E8.14c in chromosome I >gi|7490834|pir||T37794
  misc_feature (18)..(234): Homolog of NCBI NO: 6319738 NR Description: Hypothetical ORF; Ybr261cp [Saccharomyces
  misc_feature (14)..(233): Homolog of NCBI NO: 24652235 NR Description: CG1675-PA [Drosophila melanogaster]
  misc_feature (21)..(234): Homolog of NCBI NO: 32412254 NR Description: hypothetical protein ( hypothetical protein
MWREEIGEGDETKKTQWYRDGVSYWEGVEASVDGVLGGYGHVNDADIIGSEVFLKTLLQERLVNNVGANQHLVALDCGSGIGRITKNLLIRYFNEVDLLEPVAQFLDAARENLASAGSETHKATNFFCVPLQEFTPAAGRYDVIWVQWCIGHLTDNDFVSFFNRAKGYLKPGGFFVVKENLAKNGFVLDKEDHSITRSDPYFKQLFRQCGLHLYRTKDQKGLPQELFAVKMYALTVDTPPKIHRTRSKTRSNRPQIIK

SEQ ID NO: 103542 - DNA, 1093 bp, Arabidopsis thaliana
  misc_feature (1)..(1093): Ceres Seq. ID no. 13612977
  misc_feature: MA Experiment ID: 108433 Result: Down-regulated in Transcription
  misc_feature: MA Experiment 108433 PARAMETER Experiment Name: At_rhl_Mutant2_cDNA_P Parameter: Age (day) Value: 7
  misc_feature: MA Experiment 108433 PARAMETER Experiment Name: At_rhl_Mutant2_cDNA_P Parameter: Organism Value: A. thaliana
  misc_feature: MA Experiment 108433 PARAMETER Experiment Name: At_rhl_Mutant2_cDNA_P Parameter: Plant Line Value: rhl Mutant vs. wt landsburg
  misc_feature: MA Experiment 108433 PARAMETER Experiment Name: At_rhl_Mutant2_cDNA_P Parameter: Tissue Value: Roots
  misc_feature: MA Experiment ID: 108434 Result: Up-regulated in Transcription
  misc_feature: MA Experiment 108434 PARAMETER Experiment Name: At_Root_Tips_cDNA_P Parameter: Tissue Value: Root Tips
  misc_feature: MA Experiment ID: 108435 Result: Up-regulated in Transcription
  misc_feature: MA Experiment 108435 PARAMETER Experiment Name: At_stm_Mutants_cDNA_P Parameter: Plant Line Value: wt Landsburg vs stm
  misc_feature: MA Experiment 108435 PARAMETER Experiment Name: At_stm_Mutants_cDNA_P Parameter: Tissue Value: Shoot Apical Meristem Region
  misc_feature: MA Experiment ID: 108462 Result: Down-regulated in Transcription
  misc_feature: MA Experiment 108462 PARAMETER Experiment Name: At_Germinating_Seeds_cDNA_P Parameter: Age (day) Value: 2 vs. 0
  misc_feature: MA Experiment 108462 PARAMETER Experiment Name: At_Germinating_Seeds_cDNA_P Parameter: Tissue Value: Germinating Seeds
  misc_feature: MA Experiment ID: 108463 Result: Down-regulated in Transcription
  misc_feature: MA Experiment 108463 PARAMETER Experiment Name: At_Germinating_Seeds_cDNA_P Parameter: Age (day) Value: 3 vs. 0
  misc_feature: MA Experiment 108463 PARAMETER Experiment Name: At_Germinating_Seeds_cDNA_P Parameter: Tissue Value: Germinating Seeds
  misc_feature: MA Experiment ID: 108464 Result: Down-regulated in Transcription
  misc_feature: MA Experiment 108464 PARAMETER Experiment Name: At_Germinating_Seeds_cDNA_P Parameter: Age (day) Value: 4 vs. 0
  misc_feature: MA Experiment 108464 PARAMETER Experiment Name: At_Germinating_Seeds_cDNA_P Parameter: Tissue Value: Germinating Seeds
  misc_feature: MA Experiment ID: 20000184 Result: Up-regulated in Transcription
  misc_feature: MA Experiment 20000184 PARAMETER Experiment Name: At_Shoots__P Parameter: Age (day) Value: 7
  misc_feature: MA Experiment 20000184 PARAMETER Experiment Name: At_Shoots__P Parameter: Tissue Value: Shoots vs. Whole Plant
  misc_feature: MA Experiment ID: 20000227 Result: Up-regulated in Transcription
  misc_feature: MA Experiment 20000227 PARAMETER Experiment Name: At_Root-Tips-vs-Tops_P Parameter: Tissue Value: Root Tips vs. Root Tops
  misc_feature: MA Experiment ID: 20000451 Result: Up-regulated in Transcription
  misc_feature: MA Experiment 20000451 PARAMETER Experiment Name: At_CS6879_Shoots-Roots_P Parameter: Age (day) Value: 14
  misc_feature: MA Experiment 20000451 PARAMETER Experiment Name: At_CS6879_Shoots-Roots_P Parameter: Organism Value: A. thaliana
  misc_feature: MA Experiment 20000451 PARAMETER Experiment Name: At_CS6879_Shoots-Roots_P Parameter: Plant Line Value: CS6879 vs. WS
  misc_feature: MA Experiment 20000451 PARAMETER Experiment Name: At_CS6879_Shoots-Roots_P Parameter: Tissue Value: Roots
  misc_feature: MA Experiment ID: 20000794 Result: Down-regulated in Transcription
  misc_feature: MA Experiment 20000794 PARAMETER Experiment Name: At_Petals_P Parameter: Age (day) Value: 23-25 days
  misc_feature: MA Experiment 20000794 PARAMETER Experiment Name: At_Petals_P Parameter: Plant Line Value: WS
  misc_feature: MA Experiment 20000794 PARAMETER Experiment Name: At_Petals_P Parameter: Tissue Value: Petals vs. Whole plant
  misc_feature: MA Experiment ID: 20001557 Result: Up-regulated in Transcription
  misc_feature: MA Experiment 20001557 PARAMETER Experiment Name: At_Drought_Soil_Dry_P Parameter: Age (day) Value: 27
  misc_feature: MA Experiment 20001557 PARAMETER Experiment Name: At_Drought_Soil_Dry_P Parameter: Organism Value: A. thaliana
  misc_feature: MA Experiment 20001557 PARAMETER Experiment Name: At_Drought_Soil_Dry_P Parameter: Plant Line Value: WS
  misc_feature: MA Experiment 20001557 PARAMETER Experiment Name: At_Drought_Soil_Dry_P Parameter: Post Timepoint (hr) Value: 3
  misc_feature: MA Experiment 20001557 PARAMETER Experiment Name: At_Drought_Soil_Dry_P Parameter: Post-Treatment Value: Re-Water vs. No Drought
  misc_feature: MA Experiment 20001557 PARAMETER Experiment Name: At_Drought_Soil_Dry_P Parameter: Timepoint (day) Value: 13
  misc_feature: MA Experiment 20001557 PARAMETER Experiment Name: At_Drought_Soil_Dry_P Parameter: Treatment Value: Drought vs. No Drought
actgccaaaactcttcgcttaattctccggcgtatacaagtcgccggcaaaaatgtcgatgtcgaagagctccaagatgcttcagttcataaactacaggatgcgagtaacaatccaagacggaagacagctaatcggaaaattcatggcgttcgatcgccacatgaatcttgttcttggcgactgcgaagagtttcgaaaacttcctccggcgaaaggtaataagaagacgaacgaagaaagagaagagcgtcgtacgcttggtttggttttacttagaggagaagaagtgatttcgatgactgtcgaaggtccaccgccacctgaagaatctcgcgccaaatctggatctgtaaccgctgtggctggtcccggaatcggtcgtgctgctggacgtggagtacctactggtccattggttcaagctcagcctggtttatctggtcctgttcgtggaattggtggacctgctcctggaatgatgcagcctcagatctctagaccaccacagattattcgtcctccgggacaaatgccaccacagcctccttttgctggtcaaggaggtcctcctccaccttatggtatgagaccaccgtatcctggtccaccaccgcctcagtatggtggacagcaaaggccaatgatgattcctccacctggtggtatgatgagaggacctcctccacctcatggtatgcaaggaccgcctccttctcgccctggaatgcctccccccggtggtgctccgatgtttgctccgcctcatcctggcatgccacctgctccgccaaatcaccataatcagcaacattgattaggagtcacttcatctacaacgaaagcaacatccacatgattgagttacccctcggctagtcgtagcgtttttctccgtgaagctcagagaattgatgagttcatattggtgatttctcgtggaaaaagcaactgattttagaaatagtgaacttgtaggagttacaaccttgctccatgaacttgaatgtattacttgtaaaagaggctctcaatggttttgactggcaattcggttctcaacatatattaggctatgttgctggttatgtac

SEQ ID NO: 103543 - protein, 254 aa, Arabidopsis thaliana; identical to SEQ ID NO: 28547
  peptide (1)..(254): Ceres Seq. ID no. 13612978
  misc_feature (7)..(85): Pfam Name: LSM domain Pfam Description: LSM domain
  misc_feature (1)..(254): Homolog of NCBI NO: 15241519 NR Description: small nuclear ribonucleoprotein, putative (snRNP) thaliana] >gi|9758703|dbj|BAB09157.1| contains similarity to
  misc_feature (1)..(254): Homolog of NCBI NO: 21536707 NR Description: putative snRNP protein [Arabidopsis thaliana]
  misc_feature (1)..(253): Homolog of NCBI NO: 15237095 NR Description: small nuclear ribonucleoprotein, putative (snRNP) thaliana] >gi|30685110|ref|NP_849414.1| small nuclear
  misc_feature (1)..(247): Homolog of NCBI NO: 34900024 NR Description: putative snRNP protein [Oryza sativa (japonica
  misc_feature (1)..(247): Homolog of NCBI NO: 33146808 NR Description: putative snRNP(small nuclear ribonucleoprotein
  misc_feature (1)..(229): Homolog of NCBI NO: 7208221 NR Description: small nuclear ribonucleoprotein B' [Macropus
  misc_feature (1)..(240): Homolog of NCBI NO: 8099650 NR Description: snRNP-associated protein; SmB [Danio rerio]
  misc_feature (1)..(229): Homolog of NCBI NO: 38150007 NR Description: small nuclear ribonucleoprotein polypeptide B/B' B'; Sm protein B/B'; small nuclear ribonucleoprotein polypeptides and B' [Homo sapiens] >gi|134037|sp|P14678|RSMB_HUMAN Small
  misc_feature (1)..(240): Homolog of NCBI NO: 12643865 NR Description: Small nuclear ribonucleoprotein associated
  misc_feature (1)..(229): Homolog of NCBI NO: 10720263 NR Description: Small nuclear ribonucleoprotein associated

SEQ ID NO: 103544 - protein, 252 aa, Arabidopsis thaliana; identical to SEQ ID NO: 28548
  peptide (1)..(252): Ceres Seq. ID no. 13612979
  misc_feature (5)..(83): Pfam Name: LSM domain Pfam Description: LSM domain
  misc_feature (1)..(252): Homolog of NCBI NO: 15241519 NR Description: small nuclear ribonucleoprotein, putative (snRNP) thaliana] >gi|9758703|dbj|BAB09157.1| contains similarity to
  misc_feature (1)..(252): Homolog of NCBI NO: 21536707 NR Description: putative snRNP protein [Arabidopsis thaliana]
  misc_feature (1)..(251): Homolog of NCBI NO: 15237095 NR Description: small nuclear ribonucleoprotein, putative (snRNP) thaliana] >gi|30685110|ref|NP_849414.1| small nuclear
  misc_feature (1)..(245): Homolog of NCBI NO: 34900024 NR Description: putative snRNP protein [Oryza sativa (japonica
  misc_feature (1)..(245): Homolog of NCBI NO: 33146808 NR Description: putative snRNP(small nuclear ribonucleoprotein
  misc_feature (1)..(227): Homolog of NCBI NO: 7208221 NR Description: small nuclear ribonucleoprotein B' [Macropus
  misc_feature (1)..(238): Homolog of NCBI NO: 8099650 NR Description: snRNP-associated protein; SmB [Danio rerio]
  misc_feature (1)..(227): Homolog of NCBI NO: 38150007 NR Description: small nuclear ribonucleoprotein polypeptide B/B' B'; Sm protein B/B'; small nuclear ribonucleoprotein polypeptides and B' [Homo sapiens] >gi|134037|sp|P14678|RSMB_HUMAN Small
  misc_feature (1)..(238): Homolog of NCBI NO: 12643865 NR Description: Small nuclear ribonucleoprotein associated
  misc_feature (1)..(227): Homolog of NCBI NO: 10720263 NR Description: Small nuclear ribonucleoprotein associated

SEQ ID NO: 103545 - protein, 246 aa, Arabidopsis thaliana; identical to SEQ ID NO: 28549
  peptide (1)..(246): Ceres Seq. ID no. 13612980
  misc_feature (1)..(77): Pfam Name: LSM domain Pfam Description: LSM domain
  misc_feature (1)..(246): Homolog of NCBI NO: 15241519 NR Description: small nuclear ribonucleoprotein, putative (snRNP) thaliana] >gi|9758703|dbj|BAB09157.1| contains similarity to
  misc_feature (1)..(246): Homolog of NCBI NO: 21536707 NR Description: putative snRNP protein [Arabidopsis thaliana]
  misc_feature (1)..(245): Homolog of NCBI NO: 15237095 NR Description: small nuclear ribonucleoprotein, putative (snRNP) thaliana] >gi|30685110|ref|NP_849414.1| small nuclear
  misc_feature (1)..(239): Homolog of NCBI NO: 34900024 NR Description: putative snRNP protein [Oryza sativa (japonica
  misc_feature (1)..(239): Homolog of NCBI NO: 33146808 NR Description: putative snRNP(small nuclear ribonucleoprotein
  misc_feature (1)..(221): Homolog of NCBI NO: 7208221 NR Description: small nuclear ribonucleoprotein B' [Macropus
  misc_feature (1)..(232): Homolog of NCBI NO: 8099650 NR Description: snRNP-associated protein; SmB [Danio rerio]
  misc_feature (1)..(221): Homolog of NCBI NO: 38150007 NR Description: small nuclear ribonucleoprotein polypeptide B/B' B'; Sm protein B/B'; small nuclear ribonucleoprotein polypeptides and B' [Homo sapiens] >gi|134037|sp|P14678|RSMB_HUMAN Small
  misc_feature (1)..(232): Homolog of NCBI NO: 12643865 NR Description: Small nuclear ribonucleoprotein associated
  misc_feature (1)..(221): Homolog of NCBI NO: 10720263 NR Description: Small nuclear ribonucleoprotein associated

SEQ ID NO: 103546 - DNA, 1189 bp, Arabidopsis thaliana
  misc_feature (1)..(1189): Ceres Seq. ID no. 13612993
  misc_feature: MA Experiment ID: 108434 Result: Up-regulated in Transcription
  misc_feature: MA Experiment 108434 PARAMETER Experiment Name: At_Root_Tips_cDNA_P Parameter: Tissue Value: Root Tips
  misc_feature: MA Experiment ID: 108435 Result: Down-regulated in Transcription
  misc_feature: MA Experiment 108435 PARAMETER Experiment Name: At_stm_Mutants_cDNA_P Parameter: Plant Line Value: wt Landsburg vs stm
  misc_feature: MA Experiment 108435 PARAMETER Experiment Name: At_stm_Mutants_cDNA_P Parameter: Tissue Value: Shoot Apical Meristem Region
  misc_feature: MA Experiment ID: 108462 Result: Up-regulated in Transcription
  misc_feature: MA Experiment 108462 PARAMETER Experiment Name: At_Germinating_Seeds_cDNA_P Parameter: Age (day) Value: 2 vs. 0
  misc_feature: MA Experiment 108462 PARAMETER Experiment Name: At_Germinating_Seeds_cDNA_P Parameter: Tissue Value: Germinating Seeds
  misc_feature: MA Experiment ID: 108463 Result: Up-regulated in Transcription
  misc_feature: MA Experiment 108463 PARAMETER Experiment Name: At_Germinating_Seeds_cDNA_P Parameter: Age (day) Value: 3 vs. 0
  misc_feature: MA Experiment 108463 PARAMETER Experiment Name: At_Germinating_Seeds_cDNA_P Parameter: Tissue Value: Germinating Seeds
  misc_feature: MA Experiment ID: 108464 Result: Up-regulated in Transcription
  misc_feature: MA Experiment 108464 PARAMETER Experiment Name: At_Germinating_Seeds_cDNA_P Parameter: Age (day) Value: 4 vs. 0
  misc_feature: MA Experiment 108464 PARAMETER Experiment Name: At_Germinating_Seeds_cDNA_P Parameter: Tissue Value: Germinating Seeds
  misc_feature: MA Experiment ID: 108561 Result: Down-regulated in Transcription
  misc_feature: MA Experiment 108561 PARAMETER Experiment Name: At_100uM_ABA_cDNA_P Parameter: Timepoint (hr) Value: 6
  misc_feature: MA Experiment 108561 PARAMETER Experiment Name: At_100uM_ABA_cDNA_P Parameter: Tissue Value: Aerial
  misc_feature: MA Experiment 108561 PARAMETER Experiment Name: At_100uM_ABA_cDNA_P Parameter: Treatment Value: 100uM ABA vs. No Treatment
  misc_feature: MA Experiment ID: 108572 Result: Down-regulated in Transcription
  misc_feature: MA Experiment 108572 PARAMETER Experiment Name: At_Drought_cDNA_P Parameter: Timepoint (hr) Value: 1
  misc_feature: MA Experiment 108572 PARAMETER Experiment Name: At_Drought_cDNA_P Parameter: Tissue Value: Aerial
  misc_feature: MA Experiment 108572 PARAMETER Experiment Name: At_Drought_cDNA_P Parameter: Treatment Value: Drought vs. No Drought
  misc_feature: MA Experiment ID: 108573 Result: Down-regulated in Transcription
  misc_feature: MA Experiment 108573 PARAMETER Experiment Name: At_Drought_cDNA_P Parameter: Timepoint (hr) Value: 6
  misc_feature: MA Experiment 108573 PARAMETER Experiment Name: At_Drought_cDNA_P Parameter: Tissue Value: Aerial
  misc_feature: MA Experiment 108573 PARAMETER Experiment Name: At_Drought_cDNA_P Parameter: Treatment Value: Drought vs. No Drought
  misc_feature: MA Experiment ID: 108577 Result: Down-regulated in Transcription
  misc_feature: MA Experiment 108577 PARAMETER Experiment Name: At_42deg_Heat_cDNA_P Parameter: Temperature (deg C) Value: 42 vs. 22
  misc_feature: MA Experiment 108577 PARAMETER Experiment Name: At_42deg_Heat_cDNA_P Parameter: Timepoint (hr) Value: 6
  misc_feature: MA Experiment 108577 PARAMETER Experiment Name: At_42deg_Heat_cDNA_P Parameter: Tissue Value: Aerial
  misc_feature: MA Experiment ID: 108579 Result: Down-regulated in Transcription
  misc_feature: MA Experiment 108579 PARAMETER Experiment Name: At_4deg_Cold_cDNA_P Parameter: Temperature (deg C) Value: 4 vs. 22
  misc_feature: MA Experiment 108579 PARAMETER Experiment Name: At_4deg_Cold_cDNA_P Parameter: Timepoint (hr) Value: 6
  misc_feature: MA Experiment 108579 PARAMETER Experiment Name: At_4deg_Cold_cDNA_P Parameter: Tissue Value: Aerial
  misc_feature: MA Experiment ID: 108585 Result: Down-regulated in Transcription
  misc_feature: MA Experiment 108585 PARAMETER Experiment Name: At_5mM_NaNP_cDNA_P Parameter: Timepoint (hr) Value: 6
  misc_feature: MA Experiment 108585 PARAMETER Experiment Name: At_5mM_NaNP_cDNA_P Parameter: Tissue Value: Aerial
  misc_feature: MA Experiment 108585 PARAMETER Experiment Name: At_5mM_NaNP_cDNA_P Parameter: Treatment Value: null
  misc_feature: MA Experiment ID: 108595 Result: Down-regulated in Transcription
  misc_feature: MA Experiment 108595 PARAMETER Experiment Name: At_Ler-pi_Ovule_cDNA_P Parameter: Plant Line Value: null
  misc_feature: MA Experiment ID: 108605 Result: Down-regulated in Transcription
  misc_feature: MA Experiment 108605 PARAMETER Experiment Name: At_100uM_ABA_cDNA_P Parameter: Timepoint (hr) Value: 6
  misc_feature: MA Experiment 108605 PARAMETER Experiment Name: At_100uM_ABA_cDNA_P Parameter: Tissue Value: Aerial
  misc_feature: MA Experiment 108605 PARAMETER Experiment Name: At_100uM_ABA_cDNA_P Parameter: Treatment Value: 100uM ABA vs. No Treatment
  misc_feature: MA Experiment ID: 108607 Result: Down-regulated in Transcription
  misc_feature: MA Experiment 108607 PARAMETER Experiment Name: At_100uM_ABA_cDNA_P Parameter: Timepoint (hr) Value: 4
  misc_feature: MA Experiment 108607 PARAMETER Experiment Name: At_100uM_ABA_cDNA_P Parameter: Tissue Value: Aerial
  misc_feature: MA Experiment 108607 PARAMETER Experiment Name: At_100uM_ABA_cDNA_P Parameter: Treatment Value: 100uM ABA vs. No Treatment
  misc_feature: MA Experiment ID: 108608 Result: Down-regulated in Transcription
  misc_feature: MA Experiment 108608 PARAMETER Experiment Name: At_100uM_ABA_cDNA_P Parameter: Timepoint (hr) Value: 1
  misc_feature: MA Experiment 108608 PARAMETER Experiment Name: At_100uM_ABA_cDNA_P Parameter: Tissue Value: Aerial
  misc_feature: MA Experiment 108608 PARAMETER Experiment Name: At_100uM_ABA_cDNA_P Parameter: Treatment Value: 100uM ABA vs. No Treatment
  misc_feature: MA Experiment ID: 108609 Result: Down-regulated in Transcription
  misc_feature: MA Experiment 108609 PARAMETER Experiment Name: At_100uM_ABA_cDNA_P Parameter: Timepoint (hr) Value: 24
  misc_feature: MA Experiment 108609 PARAMETER Experiment Name: At_100uM_ABA_cDNA_P Parameter: Tissue Value: Aerial
  misc_feature: MA Experiment 108609 PARAMETER Experiment Name: At_100uM_ABA_cDNA_P Parameter: Treatment Value: 100uM ABA vs. No Treatment
  misc_feature: MA Experiment ID: 108668 Result: Down-regulated in Transcription
  misc_feature: MA Experiment 108668 PARAMETER Experiment Name: At_2mM_SA_cDNA_P Parameter: Plant Line Value: WS
  misc_feature: MA Experiment 108668 PARAMETER Experiment Name: At_2mM_SA_cDNA_P Parameter: Timepoint (hr) Value: 6
  misc_feature: MA Experiment 108668 PARAMETER Experiment Name: At_2mM_SA_cDNA_P Parameter: Treatment Value: 2mM SA vs. No Treatment
  misc_feature: MA Experiment ID: 20000070 Result: Down-regulated in Transcription
  misc_feature: MA Experiment 20000070 PARAMETER Experiment Name: At_100uM_ABA_Mutants_cDNA_P Parameter: Plant Line Value: CS24
  misc_feature: MA Experiment 20000070 PARAMETER Experiment Name: At_100uM_ABA_Mutants_cDNA_P Parameter: Timepoint (hr) Value: 6
  misc_feature: MA Experiment 20000070 PARAMETER Experiment Name: At_100uM_ABA_Mutants_cDNA_P Parameter: Tissue Value: Aerial
  misc_feature: MA Experiment 20000070 PARAMETER Experiment Name: At_100uM_ABA_Mutants_cDNA_P Parameter: Treatment Value: 100uM ABA vs. No Treatment
  misc_feature: MA Experiment ID: 20000086 Result: Down-regulated in Transcription
  misc_feature: MA Experiment 20000086 PARAMETER Experiment Name: At_100uM_ABA_Mutants_cDNA_P Parameter: Plant Line Value: CS22
  misc_feature: MA Experiment 20000086 PARAMETER Experiment Name: At_100uM_ABA_Mutants_cDNA_P Parameter: Timepoint (hr) Value: 6
  misc_feature: MA Experiment 20000086 PARAMETER Experiment Name: At_100uM_ABA_Mutants_cDNA_P Parameter: Tissue Value: Aerial
  misc_feature: MA Experiment 20000086 PARAMETER Experiment Name: At_100uM_ABA_Mutants_cDNA_P Parameter: Treatment Value: 100uM ABA vs. No Treatment
  misc_feature: MA Experiment ID: 20000087 Result: Down-regulated in Transcription
  misc_feature: MA Experiment 20000087 PARAMETER Experiment Name: At_100uM_ABA_Mutants_cDNA_P Parameter: Plant Line Value: WS
  misc_feature: MA Experiment 20000087 PARAMETER Experiment Name: At_100uM_ABA_Mutants_cDNA_P Parameter: Timepoint (hr) Value: 6
  misc_feature: MA Experiment 20000087 PARAMETER Experiment Name: At_100uM_ABA_Mutants_cDNA_P Parameter: Tissue Value: Aerial
  misc_feature: MA Experiment 20000087 PARAMETER Experiment Name: At_100uM_ABA_Mutants_cDNA_P Parameter: Treatment Value: 100uM ABA vs. No Treatment
  misc_feature: MA Experiment ID: 20000088 Result: Down-regulated in Transcription
  misc_feature: MA Experiment 20000088 PARAMETER Experiment Name: At_100uM_ABA_Mutants_cDNA_P Parameter: Plant Line Value: Landsberg
  misc_feature: MA Experiment 20000088 PARAMETER Experiment Name: At_100uM_ABA_Mutants_cDNA_P Parameter: Timepoint (hr) Value: 6
  misc_feature: MA Experiment 20000088 PARAMETER Experiment Name: At_100uM_ABA_Mutants_cDNA_P Parameter: Tissue Value: Aerial
  misc_feature: MA Experiment 20000088 PARAMETER Experiment Name: At_100uM_ABA_Mutants_cDNA_P Parameter: Treatment Value: 100uM ABA vs. No Treatment
  misc_feature: MA Experiment ID: 20000144 Result: Down-regulated in Transcription
  misc_feature: MA Experiment 20000144 PARAMETER Experiment Name: At_42deg_Heat_cDNA_P Parameter: Temperature (deg C) Value: 42 vs. 22
  misc_feature: MA Experiment 20000144 PARAMETER Experiment Name: At_42deg_Heat_cDNA_P Parameter: Timepoint (hr) Value: 1
  misc_feature: MA Experiment 20000144 PARAMETER Experiment Name: At_42deg_Heat_cDNA_P Parameter: Tissue Value: Aerial
  misc_feature: MA Experiment ID: 20000166 Result: Down-regulated in Transcription
  misc_feature: MA Experiment 20000166 PARAMETER Experiment Name: At_100uM_ABA_P Parameter: Age (day) Value: 14
  misc_feature: MA Experiment 20000166 PARAMETER Experiment Name: At_100uM_ABA_P Parameter: Organism Value: A. thaliana
  misc_feature: MA Experiment 20000166 PARAMETER Experiment Name: At_100uM_ABA_P Parameter: Plant Line Value: WS
  misc_feature: MA Experiment 20000166 PARAMETER Experiment Name: At_100uM_ABA_P Parameter: Timepoint (hr) Value: 1
  misc_feature: MA Experiment 20000166 PARAMETER Experiment Name: At_100uM_ABA_P Parameter: Tissue Value: Aerial
  misc_feature: MA Experiment 20000166 PARAMETER Experiment Name: At_100uM_ABA_P Parameter: Treatment Value: 100uM ABA vs. No Treatment
  misc_feature: MA Experiment ID: 20000169 Result: Down-regulated in Transcription
  misc_feature: MA Experiment 20000169 PARAMETER Experiment Name: At_100uM_ABA_P Parameter: Age (day) Value: 14
  misc_feature: MA Experiment 20000169 PARAMETER Experiment Name: At_100uM_ABA_P Parameter: Organism Value: A. thaliana
  misc_feature: MA Experiment 20000169 PARAMETER Experiment Name: At_100uM_ABA_P Parameter: Plant Line Value: WS
  misc_feature: MA Experiment 20000169 PARAMETER Experiment Name: At_100uM_ABA_P Parameter: Timepoint (hr) Value: 6
  misc_feature: MA Experiment 20000169 PARAMETER Experiment Name: At_100uM_ABA_P Parameter: Tissue Value: Aerial
  misc_feature: MA Experiment 20000169 PARAMETER Experiment Name: At_100uM_ABA_P Parameter: Treatment Value: 100uM ABA vs. No Treatment
  misc_feature: MA Experiment ID: 20000171 Result: Down-regulated in Transcription
  misc_feature: MA Experiment 20000171 PARAMETER Experiment Name: At_42deg_Heat_P Parameter: Age (day) Value: 14
  misc_feature: MA Experiment 20000171 PARAMETER Experiment Name: At_42deg_Heat_P Parameter: Organism Value: A. thaliana
  misc_feature: MA Experiment 20000171 PARAMETER Experiment Name: At_42deg_Heat_P Parameter: Plant Line Value: WS
  misc_feature: MA Experiment 20000171 PARAMETER Experiment Name: At_42deg_Heat_P Parameter: Temperature (deg C) Value: 42 vs. 22
  misc_feature: MA Experiment 20000171 PARAMETER Experiment Name: At_42deg_Heat_P Parameter: Timepoint (hr) Value: 1
  misc_feature: MA Experiment 20000171 PARAMETER Experiment Name: At_42deg_Heat_P Parameter: Tissue Value: Aerial
  misc_feature: MA Experiment ID: 20000173 Result: Down-regulated in Transcription
  misc_feature: MA Experiment 20000173 PARAMETER Experiment Name: At_42deg_Heat_P Parameter: Age (day) Value: 14
  misc_feature: MA Experiment 20000173 PARAMETER Experiment Name: At_42deg_Heat_P Parameter: Organism Value: A. thaliana
  misc_feature: MA Experiment 20000173 PARAMETER Experiment Name: At_42deg_Heat_P Parameter: Plant Line Value: WS
  misc_feature: MA Experiment 20000173 PARAMETER Experiment Name: At_42deg_Heat_P Parameter: Temperature (deg C) Value: 42 vs. 22
  misc_feature: MA Experiment 20000173 PARAMETER Experiment Name: At_42deg_Heat_P Parameter: Timepoint (hr) Value: 6
  misc_feature: MA Experiment 20000173 PARAMETER Experiment Name: At_42deg_Heat_P Parameter: Tissue Value: Aerial
  misc_feature: MA Experiment ID: 20000180 Result: Up-regulated in Transcription
  misc_feature: MA Experiment 20000180 PARAMETER Experiment Name: At_Germinating_Seeds_P Parameter: Age (hr) Value: 24 vs. 0
  misc_feature: MA Experiment 20000180 PARAMETER Experiment Name: At_Germinating_Seeds_P Parameter: Tissue Value: Germinating Seeds
  misc_feature: MA Experiment ID: 20000182 Result: Down-regulated in Transcription
  misc_feature: MA Experiment 20000182 PARAMETER Experiment Name: At_2mM_SA_P Parameter: Age (day) Value: 14
  misc_feature: MA Experiment 20000182 PARAMETER Experiment Name: At_2mM_SA_P Parameter: Organism Value: A. thaliana
  misc_feature: MA Experiment 20000182 PARAMETER Experiment Name: At_2mM_SA_P Parameter: Plant Line Value: WS
  misc_feature: MA Experiment 20000182 PARAMETER Experiment Name: At_2mM_SA_P Parameter: Timepoint (hr) Value: 6
  misc_feature: MA Experiment 20000182 PARAMETER Experiment Name: At_2mM_SA_P Parameter: Tissue Value: Aerial
  misc_feature: MA Experiment 20000182 PARAMETER Experiment Name: At_2mM_SA_P Parameter: Treatment Value: 2mM SA vs. No Treatment
  misc_feature: MA Experiment ID: 20000185 Result: Down-regulated in Transcription
  misc_feature: MA Experiment 20000185 PARAMETER Experiment Name: At_Roots__P Parameter: Age (day) Value: 7 vs. 21
  misc_feature: MA Experiment 20000185 PARAMETER Experiment Name: At_Roots__P Parameter: Organism Value: A. thaliana
  misc_feature: MA Experiment 20000185 PARAMETER Experiment Name: At_Roots__P Parameter: Tissue Value: Roots vs. Whole Plant
  misc_feature: MA Experiment ID: 20000224 Result: Up-regulated in Transcription
  misc_feature: MA Experiment ID: 20000265 Result: Up-regulated in Transcription
  misc_feature: MA Experiment 20000265 PARAMETER Experiment Name: At_Open_Flower_P Parameter: Age (day) Value: 21
  misc_feature: MA Experiment 20000265 PARAMETER Experiment Name: At_Open_Flower_P Parameter: Plant Line Value: WS
  misc_feature: MA Experiment 20000265 PARAMETER Experiment Name: At_Open_Flower_P Parameter: Tissue Value: Closed Flower vs. Whole Plant
  misc_feature: MA Experiment ID: 20000268 Result: Down-regulated in Transcription
  misc_feature: MA Experiment 20000268 PARAMETER Experiment Name: At_100mM_NaCl__P Parameter: Age (day) Value: 14
  misc_feature: MA Experiment 20000268 PARAMETER Experiment Name: At_100mM_NaCl__P Parameter: Organism Value: A. thaliana
  misc_feature: MA Experiment 20000268 PARAMETER Experiment Name: At_100mM_NaCl__P Parameter: Plant Line Value: WS
  misc_feature: MA Experiment 20000268 PARAMETER Experiment Name: At_100mM_NaCl__P Parameter: Timepoint (hr) Value: 6
  misc_feature: MA Experiment 20000268 PARAMETER Experiment Name: At_100mM_NaCl__P Parameter: Tissue Value: Whole Plant
  misc_feature: MA Experiment 20000268 PARAMETER Experiment Name: At_100mM_NaCl__P Parameter: Treatment Value: 100mM NaCl vs. No Treatment
  misc_feature: MA Experiment ID: 20000286 Result: Up-regulated in Transcription
  misc_feature: MA Experiment 20000286 PARAMETER Experiment Name: At_Open_Flower_P Parameter: Age (day) Value: 21
  misc_feature: MA Experiment 20000286 PARAMETER Experiment Name: At_Open_Flower_P Parameter: Plant Line Value: WS
  misc_feature: MA Experiment 20000286 PARAMETER Experiment Name: At_Open_Flower_P Parameter: Tissue Value: Half Open vs. Whole Plant
  misc_feature: MA Experiment ID: 20000436 Result: Down-regulated in Transcription
  misc_feature: MA Experiment 20000436 PARAMETER Experiment Name: At_Drought_P Parameter: Age (day) Value: 7
  misc_feature: MA Experiment 20000436 PARAMETER Experiment Name: At_Drought_P Parameter: Organism Value: A. thaliana
  misc_feature: MA Experiment 20000436 PARAMETER Experiment Name: At_Drought_P Parameter: Plant Line Value: WS
  misc_feature: MA Experiment 20000436 PARAMETER Experiment Name: At_Drought_P Parameter: Timepoint (hr) Value: 12
  misc_feature: MA Experiment 20000436 PARAMETER Experiment Name: At_Drought_P Parameter: Tissue Value: Whole Plant
  misc_feature: MA Experiment 20000436 PARAMETER Experiment Name: At_Drought_P Parameter: Treatment Value: Drought vs. No Drought
  misc_feature: MA Experiment ID: 20000437 Result: Down-regulated in Transcription
  misc_feature: MA Experiment 20000437 PARAMETER Experiment Name: At_Drought_P Parameter: Age (day) Value: 8
  misc_feature: MA Experiment 20000437 PARAMETER Experiment Name: At_Drought_P Parameter: Organism Value: A. thaliana
  misc_feature: MA Experiment 20000437 PARAMETER Experiment Name: At_Drought_P Parameter: Plant Line Value: WS
  misc_feature: MA Experiment 20000437 PARAMETER Experiment Name: At_Drought_P Parameter: Timepoint (hr) Value: 24
  misc_feature: MA Experiment 20000437 PARAMETER Experiment Name: At_Drought_P Parameter: Tissue Value: Whole Plant
  misc_feature: MA Experiment 20000437 PARAMETER Experiment Name: At_Drought_P Parameter: Treatment Value: Drought vs. No Drought
  misc_feature: MA Experiment ID: 20000439 Result: Down-regulated in Transcription
  misc_feature: MA Experiment 20000439 PARAMETER Experiment Name: At_Roots__P Parameter: Age (day) Value: 14 vs. 21
  misc_feature: MA Experiment 20000439 PARAMETER Experiment Name: At_Roots__P Parameter: Organism Value: A. thaliana
  misc_feature: MA Experiment 20000439 PARAMETER Experiment Name: At_Roots__P Parameter: Tissue Value: Roots vs. Whole Plant
  misc_feature: MA Experiment ID: 20000453 Result: Down-regulated in Transcription
  misc_feature: MA Experiment 20000453 PARAMETER Experiment Name: At_100uM_ABA_P Parameter: Age (day) Value: 15
  misc_feature: MA Experiment 20000453 PARAMETER Experiment Name: At_100uM_ABA_P Parameter: Organism Value: A. thaliana
  misc_feature: MA Experiment 20000453 PARAMETER Experiment Name: At_100uM_ABA_P Parameter: Plant Line Value: WS
  misc_feature: MA Experiment 20000453 PARAMETER Experiment Name: At_100uM_ABA_P Parameter: Timepoint (hr) Value: 24
  misc_feature: MA Experiment 20000453 PARAMETER Experiment Name: At_100uM_ABA_P Parameter: Tissue Value: Aerial
  misc_feature: MA Experiment 20000453 PARAMETER Experiment Name: At_100uM_ABA_P Parameter: Treatment Value: 100uM ABA vs. No Treatment
  misc_feature: MA Experiment ID: 20001247 Result: Up-regulated in Transcription
  misc_feature: MA Experiment 20001247 PARAMETER Experiment Name: At_Far-red-induction_P Parameter: Age (day) Value: 7
  misc_feature: MA Experiment 20001247 PARAMETER Experiment Name: At_Far-red-induction_P Parameter: Light Value: Far-red vs. White
  misc_feature: MA Experiment 20001247 PARAMETER Experiment Name: At_Far-red-induction_P Parameter: Organism Value: A. thaliana
  misc_feature: MA Experiment 20001247 PARAMETER Experiment Name: At_Far-red-induction_P Parameter: Plant Line Value: Columbia
  misc_feature: MA Experiment 20001247 PARAMETER Experiment Name: At_Far-red-induction_P Parameter: Timepoint (hr) Value: 1
  misc_feature: MA Experiment 20001247 PARAMETER Experiment Name: At_Far-red-induction_P Parameter: Tissue Value: Whole Plant
  misc_feature: MA Experiment ID: 20001248 Result: Down-regulated in Transcription
  misc_feature: MA Experiment 20001248 PARAMETER Experiment Name: At_Far-red-induction_P Parameter: Age (day) Value: 7
  misc_feature: MA Experiment 20001248 PARAMETER Experiment Name: At_Far-red-induction_P Parameter: Light Value: Far-red vs. White
  misc_feature: MA Experiment 20001248 PARAMETER Experiment Name: At_Far-red-induction_P Parameter: Organism Value: A. thaliana
  misc_feature: MA Experiment 20001248 PARAMETER Experiment Name: At_Far-red-induction_P Parameter: Plant Line Value: Columbia
  misc_feature: MA Experiment 20001248 PARAMETER Experiment Name: At_Far-red-induction_P Parameter: Timepoint (hr) Value: 4
  misc_feature: MA Experiment 20001248 PARAMETER Experiment Name: At_Far-red-induction_P Parameter: Tissue Value: Whole Plant
  misc_feature: MA Experiment ID: 20001554 Result: Down-regulated in Transcription
  misc_feature: MA Experiment 20001554 PARAMETER Experiment Name: At_Drought_Soil_Dry_P Parameter: Age (day) Value: 21
  misc_feature: MA Experiment 20001554 PARAMETER Experiment Name: At_Drought_Soil_Dry_P Parameter: Organism Value: A. thaliana
  misc_feature: MA Experiment 20001554 PARAMETER Experiment Name: At_Drought_Soil_Dry_P Parameter: Plant Line Value: WS
  misc_feature: MA Experiment 20001554 PARAMETER Experiment Name: At_Drought_Soil_Dry_P Parameter: Post Timepoint (hr) Value: None
  misc_feature: MA Experiment 20001554 PARAMETER Experiment Name: At_Drought_Soil_Dry_P Parameter: Post-Treatment Value: None
  misc_feature: MA Experiment 20001554 PARAMETER Experiment Name: At_Drought_Soil_Dry_P Parameter: Timepoint (day) Value: 7
  misc_feature: MA Experiment 20001554 PARAMETER Experiment Name: At_Drought_Soil_Dry_P Parameter: Treatment Value: Drought vs. No Drought
  misc_feature: MA Experiment ID: 20001555 Result: Down-regulated in Transcription
  misc_feature: MA Experiment 20001555 PARAMETER Experiment Name: At_Drought_Soil_Dry_P Parameter: Age (day) Value: 24
  misc_feature: MA Experiment 20001555 PARAMETER Experiment Name: At_Drought_Soil_Dry_P Parameter: Organism Value: A. thaliana
  misc_feature: MA Experiment 20001555 PARAMETER Experiment Name: At_Drought_Soil_Dry_P Parameter: Plant Line Value: WS
  misc_feature: MA Experiment 20001555 PARAMETER Experiment Name: At_Drought_Soil_Dry_P Parameter: Post Timepoint (hr) Value: None
  misc_feature: MA Experiment 20001555 PARAMETER Experiment Name: At_Drought_Soil_Dry_P Parameter: Post-Treatment Value: None
  misc_feature: MA Experiment 20001555 PARAMETER Experiment Name: At_Drought_Soil_Dry_P Parameter: Timepoint (day) Value: 10
  misc_feature: MA Experiment 20001555 PARAMETER Experiment Name: At_Drought_Soil_Dry_P Parameter: Treatment Value: Drought vs. No Drought
  misc_feature: MA Experiment ID: 20001556 Result: Down-regulated in Transcription
  misc_feature: MA Experiment 20001556 PARAMETER Experiment Name: At_Drought_Soil_Dry_P Parameter: Age (day) Value: 26
  misc_feature: MA Experiment 20001556 PARAMETER Experiment Name: At_Drought_Soil_Dry_P Parameter: Organism Value: A. thaliana
  misc_feature: MA Experiment 20001556 PARAMETER Experiment Name: At_Drought_Soil_Dry_P Parameter: Plant Line Value: WS
  misc_feature: MA Experiment 20001556 PARAMETER Experiment Name: At_Drought_Soil_Dry_P Parameter: Post Timepoint (hr) Value: None
  misc_feature: MA Experiment 20001556 PARAMETER Experiment Name: At_Drought_Soil_Dry_P Parameter: Post-Treatment Value: None
  misc_feature: MA Experiment 20001556 PARAMETER Experiment Name: At_Drought_Soil_Dry_P Parameter: Timepoint (day) Value: 12
  misc_feature: MA Experiment 20001556 PARAMETER Experiment Name: At_Drought_Soil_Dry_P Parameter: Treatment Value: Drought vs. No Drought
  misc_feature: MA Experiment ID: 20001559 Result: Down-regulated in Transcription
  misc_feature: MA Experiment 20001559 PARAMETER Experiment Name: At_Drought_Soil_Dry_P Parameter: Age (day) Value: 28
  misc_feature: MA Experiment 20001559 PARAMETER Experiment Name: At_Drought_Soil_Dry_P Parameter: Organism Value: A. thaliana
  misc_feature: MA Experiment 20001559 PARAMETER Experiment Name: At_Drought_Soil_Dry_P Parameter: Plant Line Value: WS
  misc_feature: MA Experiment 20001559 PARAMETER Experiment Name: At_Drought_Soil_Dry_P Parameter: Post Timepoint (hr) Value: 29
  misc_feature: MA Experiment 20001559 PARAMETER Experiment Name: At_Drought_Soil_Dry_P Parameter: Post-Treatment Value: Re-Water vs. No Drought
  misc_feature: MA Experiment 20001559 PARAMETER Experiment Name: At_Drought_Soil_Dry_P Parameter: Timepoint (day) Value: 14
  misc_feature: MA Experiment 20001559 PARAMETER Experiment Name: At_Drought_Soil_Dry_P Parameter: Treatment Value: Drought vs. No Drought
  misc_feature: MA Experiment ID: 20001560 Result: Down-regulated in Transcription
  misc_feature: MA Experiment 20001560 PARAMETER Experiment Name: At_Drought_Soil_Dry_P Parameter: Age (day) Value: 28
  misc_feature: MA Experiment 20001560 PARAMETER Experiment Name: At_Drought_Soil_Dry_P Parameter: Organism Value: A. thaliana
  misc_feature: MA Experiment 20001560 PARAMETER Experiment Name: At_Drought_Soil_Dry_P Parameter: Plant Line Value: WS
  misc_feature: MA Experiment 20001560 PARAMETER Experiment Name: At_Drought_Soil_Dry_P Parameter: Post Timepoint (hr) Value: None
  misc_feature: MA Experiment 20001560 PARAMETER Experiment Name: At_Drought_Soil_Dry_P Parameter: Post-Treatment Value: None
  misc_feature: MA Experiment 20001560 PARAMETER Experiment Name: At_Drought_Soil_Dry_P Parameter: Timepoint (day) Value: 14
  misc_feature: MA Experiment 20001560 PARAMETER Experiment Name: At_Drought_Soil_Dry_P Parameter: Treatment Value: Drought vs. No Drought
  misc_feature: MA Experiment ID: 20001757 Result: Up-regulated in Transcription
  misc_feature: MA Experiment 20001757 PARAMETER Experiment Name: At_50mM_NH4NO3_L-to-H_P Parameter: Timepoint (hr) Value: 6
  misc_feature: MA Experiment 20001757 PARAMETER Experiment Name: At_50mM_NH4NO3_L-to-H_P Parameter: Tissue Value: Leaf
  misc_feature: MA Experiment 20001757 PARAMETER Experiment Name: At_50mM_NH4NO3_L-to-H_P Parameter: Treatment Value: 50mM NH4NO3 vs 100mM Mannitol
  misc_feature: MA Experiment ID: 20001904 Result: Down-regulated in Transcription
  misc_feature: MA Experiment 20001904 PARAMETER Experiment Name: At_Drought_Reproduction_P Parameter: Age (day) Value: 37
  misc_feature: MA Experiment 20001904 PARAMETER Experiment Name: At_Drought_Reproduction_P Parameter: Organism Value: A. thaliana
  misc_feature: MA Experiment 20001904 PARAMETER Experiment Name: At_Drought_Reproduction_P Parameter: Plant Line Value: WS
  misc_feature: MA Experiment 20001904 PARAMETER Experiment Name: At_Drought_Reproduction_P Parameter: Timepoint (day) Value: 7
  misc_feature: MA Experiment 20001904 PARAMETER Experiment Name: At_Drought_Reproduction_P Parameter: Tissue Value: Rosettes
  misc_feature: MA Experiment 20001904 PARAMETER Experiment Name: At_Drought_Reproduction_P Parameter: Treatment Value: Drought vs. No Drought
  misc_feature: MA Experiment ID: 20001906 Result: Down-regulated in Transcription
  misc_feature: MA Experiment 20001906 PARAMETER Experiment Name: At_Drought_Reproduction_P Parameter: Age (day) Value: 35
  misc_feature: MA Experiment 20001906 PARAMETER Experiment Name: At_Drought_Reproduction_P Parameter: Organism Value: A. thaliana
  misc_feature: MA Experiment 20001906 PARAMETER Experiment Name: At_Drought_Reproduction_P Parameter: Plant Line Value: WS
  misc_feature: MA Experiment 20001906 PARAMETER Experiment Name: At_Drought_Reproduction_P Parameter: Timepoint (day) Value: 5
  misc_feature: MA Experiment 20001906 PARAMETER Experiment Name: At_Drought_Reproduction_P Parameter: Tissue Value: Siliques
  misc_feature: MA Experiment 20001906 PARAMETER Experiment Name: At_Drought_Reproduction_P Parameter: Treatment Value: Drought vs. No Drought
  misc_feature: MA Experiment ID: 20001908 Result: Down-regulated in Transcription
  misc_feature: MA Experiment 20001908 PARAMETER Experiment Name: At_Drought_Reproduction_P Parameter: Age (day) Value: 40
  misc_feature: MA Experiment 20001908 PARAMETER Experiment Name: At_Drought_Reproduction_P Parameter: Organism Value: A. thaliana
  misc_feature: MA Experiment 20001908 PARAMETER Experiment Name: At_Drought_Reproduction_P Parameter: Plant Line Value: WS
  misc_feature: MA Experiment 20001908 PARAMETER Experiment Name: At_Drought_Reproduction_P Parameter: Timepoint (day) Value: 10
  misc_feature: MA Experiment 20001908 PARAMETER Experiment Name: At_Drought_Reproduction_P Parameter: Tissue Value: Siliques
  misc_feature: MA Experiment 20001908 PARAMETER Experiment Name: At_Drought_Reproduction_P Parameter: Treatment Value: Drought vs. No Drought
  misc_feature: MA Experiment ID: 20001911 Result: Down-regulated in Transcription
  misc_feature: MA Experiment 20001911 PARAMETER Experiment Name: At_Drought_Reproduction_P Parameter: Age (day) Value: 40
  misc_feature: MA Experiment 20001911 PARAMETER Experiment Name: At_Drought_Reproduction_P Parameter: Organism Value: A. thaliana
  misc_feature: MA Experiment 20001911 PARAMETER Experiment Name: At_Drought_Reproduction_P Parameter: Plant Line Value: WS
  misc_feature: MA Experiment 20001911 PARAMETER Experiment Name: At_Drought_Reproduction_P Parameter: Timepoint (day) Value: 10
  misc_feature: MA Experiment 20001911 PARAMETER Experiment Name: At_Drought_Reproduction_P Parameter: Tissue Value: Flowers
  misc_feature: MA Experiment 20001911 PARAMETER Experiment Name: At_Drought_Reproduction_P Parameter: Treatment Value: Drought vs. No Drought
atctcatttatcatcatccttcaagaacacaaagctagacagaaaaaaaaaaatgtgttcctcaaaattaaaaaatctgacccaagaaaacatttctcagatcaacggccgtccggttcttcaaccgaagtcgaaccaagttccgacattagaccgacgtaactcactaaaaaaatcgcctcctaagcctttgaatccaattgcatcaaagataccctcaccaagaccaatttctctaatctctcctcctttgtctcccaacacaaaatccttaagaaaaccggccggttcttgcaaggaacttcttaggtctagctctacaaaatcgaaaccagtgatatcaccagagaacagtgatggtggctacaaagaggttatgcctatggtgattgttcaaaagcagcctggaagtatagcagctgccagaagagaagaggttgcaatgaaacaagaagagagaaagaagaaaatttctcattacggtagaatcaaatccgtaaaatcgaatgaaaagaacttaaatgttgagcatgagaagaagaagagatgcagtttcatcactacaagttcagatccaatatatgtcgcttaccatgacaaagaatggggagttccagttcatgatgacaatctactatttgagcttctggtgttaaccggagctcaggtcggatcagattggacttcggttttaaagagaagaaacacttttagagaggctttctctggtttcgaagcagagttggtcgcagacttcaacgagaagaagatacaatcaatagtcaacgactatggcattaaccttagccaagtccttgcagttgttgacaacgctaaacaaattctcaaggtgaaaagagatttggggtcattcaacaaatacatttgggggtttatgaaacacaaaccggtcaccacaaaatacacatcatgccaaaagataccggttaagacatcgaaatcggagactataagcaaagacatggttcgtcgtgggtttagattcgttggtccgacggttatacattcgttaatgcaagccgccggtttaaccaacgaccacttgatcacatgtccgaggcatctcgagtgtacggccatggcggctttataggcaaaaggatcatgttgtaattgttgttgtagtcacattggctttaatttatatgtaaataaataatattttgtg

SEQ ID NO: 103547 - protein, 370 aa, Arabidopsis thaliana; identical to SEQ ID NO: 21278
  peptide (1)..(370): Ceres Seq. ID no. 13612994
  misc_feature (185)..(363): Pfam Name: Methyladenine glycosylase Pfam Description: Methyladenine glycosylase
  misc_feature (18)..(370): Homolog of NCBI NO: 15241554 NR Description: expressed protein [Arabidopsis thaliana]
  misc_feature (18)..(370): Homolog of NCBI NO: 21592537 NR Description: unknown [Arabidopsis thaliana]
  misc_feature (82)..(368): Homolog of NCBI NO: 18399721 NR Description: expressed protein [Arabidopsis thaliana]
  misc_feature (82)..(368): Homolog of NCBI NO: 21536975 NR Description: unknown [Arabidopsis thaliana]
  misc_feature (43)..(207): Homolog of NCBI NO: 34908920 NR Description: P0691E06.10 [Oryza sativa (japonica
  misc_feature (190)..(369): Homolog of NCBI NO: 34908920 NR Description: P0691E06.10 [Oryza sativa (japonica
  misc_feature (18)..(69): Homolog of NCBI NO: 34908920 NR Description: P0691E06.10 [Oryza sativa (japonica
  misc_feature (178)..(364): Homolog of NCBI NO: 15242914 NR Description: expressed protein [Arabidopsis thaliana]
  misc_feature (54)..(364): Homolog of NCBI NO: 15218379 NR Description: expressed protein [Arabidopsis thaliana]
  misc_feature (57)..(368): Homolog of NCBI NO: 38345034 NR Description: OSJNBa0029H02.18 [Oryza sativa (japonica

SEQ ID NO: 103548 - protein, 353 aa, Arabidopsis thaliana; identical to SEQ ID NO: 21279
  peptide (1)..(353): Ceres Seq. ID no. 13612995
  misc_feature (168)..(346): Pfam Name: Methyladenine glycosylase Pfam Description: Methyladenine glycosylase
  misc_feature (1)..(353): Homolog of NCBI NO: 15241554 NR Description: expressed protein [Arabidopsis thaliana]
  misc_feature (1)..(353): Homolog of NCBI NO: 21592537 NR Description: unknown [Arabidopsis thaliana]
  misc_feature (65)..(351): Homolog of NCBI NO: 18399721 NR Description: expressed protein [Arabidopsis thaliana]
  misc_feature (65)..(351): Homolog of NCBI NO: 21536975 NR Description: unknown [Arabidopsis thaliana]
  misc_feature (26)..(190): Homolog of NCBI NO: 34908920 NR Description: P0691E06.10 [Oryza sativa (japonica
  misc_feature (173)..(352): Homolog of NCBI NO: 34908920 NR Description: P0691E06.10 [Oryza sativa (japonica
  misc_feature (1)..(52): Homolog of NCBI NO: 34908920 NR Description: P0691E06.10 [Oryza sativa (japonica
  misc_feature (161)..(347): Homolog of NCBI NO: 15242914 NR Description: expressed protein [Arabidopsis thaliana]
  misc_feature (37)..(347): Homolog of NCBI NO: 15218379 NR Description: expressed protein [Arabidopsis thaliana]
  misc_feature (40)..(351): Homolog of NCBI NO: 38345034 NR Description: OSJNBa0029H02.18 [Oryza sativa (japonica

SEQ ID NO: 103549 - protein, 245 aa, Arabidopsis thaliana; identical to SEQ ID NO: 21280
  peptide (1)..(245): Ceres Seq. ID no. 13612996
  misc_feature (60)..(238): Pfam Name: Methyladenine glycosylase Pfam Description: Methyladenine glycosylase
  misc_feature (1)..(245): Homolog of NCBI NO: 15241554 NR Description: expressed protein [Arabidopsis thaliana]
  misc_feature (1)..(245): Homolog of NCBI NO: 21592537 NR Description: unknown [Arabidopsis thaliana]
  misc_feature (1)..(243): Homolog of NCBI NO: 18399721 NR Description: expressed protein [Arabidopsis thaliana]
  misc_feature (1)..(243): Homolog of NCBI NO: 21536975 NR Description: unknown [Arabidopsis thaliana]
  misc_feature (1)..(82): Homolog of NCBI NO: 34908920 NR Description: P0691E06.10 [Oryza sativa (japonica
  misc_feature (65)..(244): Homolog of NCBI NO: 34908920 NR Description: P0691E06.10 [Oryza sativa (japonica
  misc_feature (53)..(239): Homolog of NCBI NO: 15242914 NR Description: expressed protein [Arabidopsis thaliana]
  misc_feature (1)..(239): Homolog of NCBI NO: 15218379 NR Description: expressed protein [Arabidopsis thaliana]
  misc_feature (1)..(243): Homolog of NCBI NO: 38345034 NR Description: OSJNBa0029H02.18 [Oryza sativa (japonica
  misc_feature (56)..(239): Homolog of NCBI NO: 18410766 NR Description: DNA-3-methyladenine glycosylase I -related

SEQ ID NO: 103550 - DNA, 746 bp, Arabidopsis thaliana
  misc_feature (1)..(746): Ceres Seq. ID no. 13613001
  misc_feature: MA Experiment ID: 108434 Result: Down-regulated in Transcription
  misc_feature: MA Experiment 108434 PARAMETER Experiment Name: At_Root_Tips_cDNA_P Parameter: Tissue Value: Root Tips
  misc_feature: MA Experiment ID: 108463 Result: Up-regulated in Transcription
  misc_feature: MA Experiment 108463 PARAMETER Experiment Name: At_Germinating_Seeds_cDNA_P Parameter: Age (day) Value: 3 vs. 0
  misc_feature: MA Experiment 108463 PARAMETER Experiment Name: At_Germinating_Seeds_cDNA_P Parameter: Tissue Value: Germinating Seeds
  misc_feature: MA Experiment ID: 108464 Result: Up-regulated in Transcription
  misc_feature: MA Experiment 108464 PARAMETER Experiment Name: At_Germinating_Seeds_cDNA_P Parameter: Age (day) Value: 4 vs. 0
  misc_feature: MA Experiment 108464 PARAMETER Experiment Name: At_Germinating_Seeds_cDNA_P Parameter: Tissue Value: Germinating Seeds
  misc_feature: MA Experiment ID: 108585 Result: Up-regulated in Transcription
  misc_feature: MA Experiment 108585 PARAMETER Experiment Name: At_5mM_NaNP_cDNA_P Parameter: Timepoint (hr) Value: 6
  misc_feature: MA Experiment 108585 PARAMETER Experiment Name: At_5mM_NaNP_cDNA_P Parameter: Tissue Value: Aerial
  misc_feature: MA Experiment 108585 PARAMETER Experiment Name: At_5mM_NaNP_cDNA_P Parameter: Treatment Value: null
  misc_feature: MA Experiment ID: 20000071 Result: Down-regulated in Transcription
  misc_feature: MA Experiment 20000071 PARAMETER Experiment Name: At_100uM_ABA_Mutants_cDNA_P Parameter: Plant Line Value: CS8104
  misc_feature: MA Experiment 20000071 PARAMETER Experiment Name: At_100uM_ABA_Mutants_cDNA_P Parameter: Timepoint (hr) Value: 6
  misc_feature: MA Experiment 20000071 PARAMETER Experiment Name: At_100uM_ABA_Mutants_cDNA_P Parameter: Tissue Value: Aerial
  misc_feature: MA Experiment 20000071 PARAMETER Experiment Name: At_100uM_ABA_Mutants_cDNA_P Parameter: Treatment Value: 100uM ABA vs. No Treatment
  misc_feature: MA Experiment ID: 20000113 Result: Up-regulated in Transcription
  misc_feature: MA Experiment 20000113 PARAMETER Experiment Name: At_42deg_Heat_cDNA_P Parameter: Temperature (deg C) Value: 42 vs. 22
  misc_feature: MA Experiment 20000113 PARAMETER Experiment Name: At_42deg_Heat_cDNA_P Parameter: Timepoint (hr) Value: 8
  misc_feature: MA Experiment 20000113 PARAMETER Experiment Name: At_42deg_Heat_cDNA_P Parameter: Tissue Value: Aerial
  misc_feature: MA Experiment ID: 20000180 Result: Up-regulated in Transcription
  misc_feature: MA Experiment 20000180 PARAMETER Experiment Name: At_Germinating_Seeds_P Parameter: Age (hr) Value: 24 vs. 0
  misc_feature: MA Experiment 20000180 PARAMETER Experiment Name: At_Germinating_Seeds_P Parameter: Tissue Value: Germinating Seeds
  misc_feature: MA Experiment ID: 20000185 Result: Up-regulated in Transcription
  misc_feature: MA Experiment 20000185 PARAMETER Experiment Name: At_Roots__P Parameter: Age (day) Value: 7 vs. 21
  misc_feature: MA Experiment 20000185 PARAMETER Experiment Name: At_Roots__P Parameter: Organism Value: A. thaliana
  misc_feature: MA Experiment 20000185 PARAMETER Experiment Name: At_Roots__P Parameter: Tissue Value: Roots vs. Whole Plant
  misc_feature: MA Experiment ID: 20000227 Result: Down-regulated in Transcription
  misc_feature: MA Experiment 20000227 PARAMETER Experiment Name: At_Root-Tips-vs-Tops_P Parameter: Tissue Value: Root Tips vs. Root Tops
  misc_feature: MA Experiment ID: 20000234 Result: Down-regulated in Transcription
  misc_feature: MA Experiment 20000234 PARAMETER Experiment Name: At_Siliques_P Parameter: Age (day) Value: 21
  misc_feature: MA Experiment 20000234 PARAMETER Experiment Name: At_Siliques_P Parameter: Organism Value: A. thaliana
  misc_feature: MA Experiment 20000234 PARAMETER Experiment Name: At_Siliques_P Parameter: Plant Line Value: WS
  misc_feature: MA Experiment 20000234 PARAMETER Experiment Name: At_Siliques_P Parameter: Tissue Value: Less Than 5mm Siliques vs. Whole Plant
  misc_feature: MA Experiment ID: 20000439 Result: Up-regulated in Transcription
  misc_feature: MA Experiment 20000439 PARAMETER Experiment Name: At_Roots__P Parameter: Age (day) Value: 14 vs. 21
  misc_feature: MA Experiment 20000439 PARAMETER Experiment Name: At_Roots__P Parameter: Organism Value: A. thaliana
  misc_feature: MA Experiment 20000439 PARAMETER Experiment Name: At_Roots__P Parameter: Tissue Value: Roots vs. Whole Plant
  misc_feature: MA Experiment ID: 20001248 Result: Up-regulated in Transcription
  misc_feature: MA Experiment 20001248 PARAMETER Experiment Name: At_Far-red-induction_P Parameter: Age (day) Value: 7
  misc_feature: MA Experiment 20001248 PARAMETER Experiment Name: At_Far-red-induction_P Parameter: Light Value: Far-red vs. White
  misc_feature: MA Experiment 20001248 PARAMETER Experiment Name: At_Far-red-induction_P Parameter: Organism Value: A. thaliana
  misc_feature: MA Experiment 20001248 PARAMETER Experiment Name: At_Far-red-induction_P Parameter: Plant Line Value: Columbia
  misc_feature: MA Experiment 20001248 PARAMETER Experiment Name: At_Far-red-induction_P Parameter: Timepoint (hr) Value: 4
  misc_feature: MA Experiment 20001248 PARAMETER Experiment Name: At_Far-red-induction_P Parameter: Tissue Value: Whole Plant
  misc_feature: MA Experiment ID: 20001556 Result: Down-regulated in Transcription
  misc_feature: MA Experiment 20001556 PARAMETER Experiment Name: At_Drought_Soil_Dry_P Parameter: Age (day) Value: 26
  misc_feature: MA Experiment 20001556 PARAMETER Experiment Name: At_Drought_Soil_Dry_P Parameter: Organism Value: A. thaliana
  misc_feature: MA Experiment 20001556 PARAMETER Experiment Name: At_Drought_Soil_Dry_P Parameter: Plant Line Value: WS
  misc_feature: MA Experiment 20001556 PARAMETER Experiment Name: At_Drought_Soil_Dry_P Parameter: Post Timepoint (hr) Value: None
  misc_feature: MA Experiment 20001556 PARAMETER Experiment Name: At_Drought_Soil_Dry_P Parameter: Post-Treatment Value: None
  misc_feature: MA Experiment 20001556 PARAMETER Experiment Name: At_Drought_Soil_Dry_P Parameter: Timepoint (day) Value: 12
  misc_feature: MA Experiment 20001556 PARAMETER Experiment Name: At_Drought_Soil_Dry_P Parameter: Treatment Value: Drought vs. No Drought
  misc_feature: MA Experiment ID: 20001557 Result: Up-regulated in Transcription
  misc_feature: MA Experiment 20001557 PARAMETER Experiment Name: At_Drought_Soil_Dry_P Parameter: Age (day) Value: 27
  misc_feature: MA Experiment 20001557 PARAMETER Experiment Name: At_Drought_Soil_Dry_P Parameter: Organism Value: A. thaliana
  misc_feature: MA Experiment 20001557 PARAMETER Experiment Name: At_Drought_Soil_Dry_P Parameter: Plant Line Value: WS
  misc_feature: MA Experiment 20001557 PARAMETER Experiment Name: At_Drought_Soil_Dry_P Parameter: Post Timepoint (hr) Value: 3
  misc_feature: MA Experiment 20001557 PARAMETER Experiment Name: At_Drought_Soil_Dry_P Parameter: Post-Treatment Value: Re-Water vs. No Drought
  misc_feature: MA Experiment 20001557 PARAMETER Experiment Name: At_Drought_Soil_Dry_P Parameter: Timepoint (day) Value: 13
  misc_feature: MA Experiment 20001557 PARAMETER Experiment Name: At_Drought_Soil_Dry_P Parameter: Treatment Value: Drought vs. No Drought
  misc_feature: MA Experiment ID: 20001773 Result: Up-regulated in Transcription
  misc_feature: MA Experiment 20001773 PARAMETER Experiment Name: At_Far-red-enriched-adult_P Parameter: Age (day) Value: 30
  misc_feature: MA Experiment 20001773 PARAMETER Experiment Name: At_Far-red-enriched-adult_P Parameter: Light Value: Far-red enriched vs. White
  misc_feature: MA Experiment 20001773 PARAMETER Experiment Name: At_Far-red-enriched-adult_P Parameter: Organism Value: A. thaliana
  misc_feature: MA Experiment 20001773 PARAMETER Experiment Name: At_Far-red-enriched-adult_P Parameter: Plant Line Value: Columbia
  misc_feature: MA Experiment 20001773 PARAMETER Experiment Name: At_Far-red-enriched-adult_P Parameter: Timepoint (hr) Value: 48
  misc_feature: MA Experiment 20001773 PARAMETER Experiment Name: At_Far-red-enriched-adult_P Parameter: Tissue Value: Aerial
ctccctcttcttctcctctctttctctactccaagttttcacaatgacattcttcatcgaagacactagtctcatcatcagccacgttctctacaaaacggcacttatcatcaccgttttacgatggatctttgcatggatcctccgttaccgctcaagatcctcctcatcatcatcatctcaatcctcctcttctccttctatttcatcacaaaccatcaaagaaagcctagccgtgtccgctttccgcgacgcggtggagagatctcccgcggcgataaacgacatgtgtgccgtgtgtctaggagatcttgaagacgaggacgaaatcagagagcttaggaactgtactcacgtgtttcatcgtgattgtattgaccgatggctagattatgaatgttgcggcggtgatgatgataaccaccgtacttgtcccctatgtcgaacgccgttgcttccatctttcactgattactcaaccgttactcaaactagttgggctgttgaacgacttctttacctcttcggcgacgatcttcttccctgacttttatttttcttttagaaaacatttgatttcatattttttttatgaatattgtaattggtagaggggtcgaataggaaatataagagtgattgatcgcaattatacgaaatcgaatcaatttgatttgattgtatatacaaatgttaaactgtattaattctcctcttcagataaatgtctaacattttttattatt

SEQ ID NO: 103551 - protein, 181 aa, Arabidopsis thaliana
  peptide (1)..(181): Ceres Seq. ID no. 13613002
  misc_feature (97)..(147): Pfam Name: Zinc finger, C3HC4 type (RING finger) Pfam Description: Zinc finger, C3HC4 type (RING finger)
  misc_feature (15)..(181): Homolog of NCBI NO: 15229284 NR Description: zinc finger (C3HC4-type RING finger) protein
  misc_feature (15)..(179): Homolog of NCBI NO: 18420336 NR Description: zinc finger (C3HC4-type RING finger) protein [Arabidopsis thaliana] >gi|16209696|gb|AAL14405.1| [Arabidopsis thaliana] >gi|23463037|gb|AAN33188.1|
  misc_feature (15)..(167): Homolog of NCBI NO: 15233117 NR Description: BRH1 RING finger protein [Arabidopsis thaliana]
  misc_feature (67)..(153): Homolog of NCBI NO: 32488512 NR Description: OSJNBa0011J08.19 [Oryza sativa (japonica
  misc_feature (50)..(172): Homolog of NCBI NO: 21554155 NR Description: RING zinc finger protein-like [Arabidopsis
  misc_feature (50)..(172): Homolog of NCBI NO: 15238072 NR Description: RING-H2 zinc finger protein, putative
  misc_feature (23)..(165): Homolog of NCBI NO: 23451086 NR Description: RING-H2 protein [Medicago sativa]
  misc_feature (60)..(155): Homolog of NCBI NO: 18411282 NR Description: zinc finger (C3HC4-type RING finger) protein
  misc_feature (64)..(167): Homolog of NCBI NO: 15222553 NR Description: RING-H2 finger protein, putative [Arabidopsis >gi|25404448|pir||E96663 probable RING zinc finger protein
  misc_feature (19)..(157): Homolog of NCBI NO: 25456491 NR Description: RING-H2 zinc finger protein ATL4 [imported] -
SLFFSSLSLLQVFTMTFFIEDTSLIISHVLYKTALIITVLRWIFAWILRYRSRSSSSSSSQSSSSPSISSQTIKESLAVSAFRDAVERSPAAINDMCAVCLGDLEDEDEIRELRNCTHVFHRDCIDRWLDYECCGGDDDNHRTCPLCRTPLLPSFTDYSTVTQTSWAVERLLYLFGDDLLP

SEQ ID NO: 103552 - protein, 167 aa, Arabidopsis thaliana
  peptide (1)..(167): Ceres Seq. ID no. 13613003
  misc_feature (83)..(133): Pfam Name: Zinc finger, C3HC4 type (RING finger) Pfam Description: Zinc finger, C3HC4 type (RING finger)
  misc_feature (1)..(167): Homolog of NCBI NO: 15229284 NR Description: zinc finger (C3HC4-type RING finger) protein
  misc_feature (1)..(165): Homolog of NCBI NO: 18420336 NR Description: zinc finger (C3HC4-type RING finger) protein [Arabidopsis thaliana] >gi|16209696|gb|AAL14405.1| [Arabidopsis thaliana] >gi|23463037|gb|AAN33188.1|
  misc_feature (1)..(153): Homolog of NCBI NO: 15233117 NR Description: BRH1 RING finger protein [Arabidopsis thaliana]
  misc_feature (53)..(139): Homolog of NCBI NO: 32488512 NR Description: OSJNBa0011J08.19 [Oryza sativa (japonica
  misc_feature (36)..(158): Homolog of NCBI NO: 21554155 NR Description: RING zinc finger protein-like [Arabidopsis
  misc_feature (36)..(158): Homolog of NCBI NO: 15238072 NR Description: RING-H2 zinc finger protein, putative
  misc_feature (9)..(151): Homolog of NCBI NO: 23451086 NR Description: RING-H2 protein [Medicago sativa]
  misc_feature (46)..(141): Homolog of NCBI NO: 18411282 NR Description: zinc finger (C3HC4-type RING finger) protein
  misc_feature (50)..(153): Homolog of NCBI NO: 15222553 NR Description: RING-H2 finger protein, putative [Arabidopsis >gi|25404448|pir||E96663 probable RING zinc finger protein
  misc_feature (5)..(143): Homolog of NCBI NO: 25456491 NR Description: RING-H2 zinc finger protein ATL4 [imported] -
MTFFIEDTSLIISHVLYKTALIITVLRWIFAWILRYRSRSSSSSSSQSSSSPSISSQTIKESLAVSAFRDAVERSPAAINDMCAVCLGDLEDEDEIRELRNCTHVFHRDCIDRWLDYECCGGDDDNHRTCPLCRTPLLPSFTDYSTVTQTSWAVERLLYLFGDDLLP

SEQ ID NO: 103553 - DNA, 801 bp, Arabidopsis thaliana
  misc_feature (1)..(801): Ceres Seq. ID no. 13613013
  misc_feature: MA Experiment ID: 108561 Result: Down-regulated in Transcription
  misc_feature: MA Experiment 108561 PARAMETER Experiment Name: At_100uM_ABA_cDNA_P Parameter: Timepoint (hr) Value: 6
  misc_feature: MA Experiment 108561 PARAMETER Experiment Name: At_100uM_ABA_cDNA_P Parameter: Tissue Value: Aerial
  misc_feature: MA Experiment 108561 PARAMETER Experiment Name: At_100uM_ABA_cDNA_P Parameter: Treatment Value: 100uM ABA vs. No Treatment
  misc_feature: MA Experiment ID: 108573 Result: Down-regulated in Transcription
  misc_feature: MA Experiment 108573 PARAMETER Experiment Name: At_Drought_cDNA_P Parameter: Timepoint (hr) Value: 6
  misc_feature: MA Experiment 108573 PARAMETER Experiment Name: At_Drought_cDNA_P Parameter: Tissue Value: Aerial
  misc_feature: MA Experiment 108573 PARAMETER Experiment Name: At_Drought_cDNA_P Parameter: Treatment Value: Drought vs. No Drought
  misc_feature: MA Experiment ID: 20000087 Result: Up-regulated in Transcription
  misc_feature: MA Experiment 20000087 PARAMETER Experiment Name: At_100uM_ABA_Mutants_cDNA_P Parameter: Plant Line Value: WS
  misc_feature: MA Experiment 20000087 PARAMETER Experiment Name: At_100uM_ABA_Mutants_cDNA_P Parameter: Timepoint (hr) Value: 6
  misc_feature: MA Experiment 20000087 PARAMETER Experiment Name: At_100uM_ABA_Mutants_cDNA_P Parameter: Tissue Value: Aerial
  misc_feature: MA Experiment 20000087 PARAMETER Experiment Name: At_100uM_ABA_Mutants_cDNA_P Parameter: Treatment Value: 100uM ABA vs. No Treatment
aaaggagaaggaacattcactctcacgcgcttcaactttctccagaaacaagaaaatatcacagcaaaaattttctcgagaaaatccgaagaagacaaaaaaaatggcggatcagctaaccgatgaccagatctccgagttcaaggaagcttttagcctattcgacaaagacggagatggttgtatcaccacaaaggagcttgggactgtgatgagatcacttgggcagaacccgacagaagccgagctccaggacatgatcaacgaagtggatgcagacgggaacgggacaatagatttcccagagttcctgaacctaatggcacgtaagatgaaagacactgattcagaggaagagcttaaggaagccttcagggtttttgacaaggaccagaacggtttcatctcggcggctgagcttcgtcacgtgatgacaaatcttggggagaagttgacggatgaggaagtcgatgagatgatccgagaggctgacgtcgatggtgatggtcagatcaactatgaagagttcgtcaaagtcatgatggcaaagtgagattcttcttatccctcgaaatcctaagcatgtttttcttttacatctttaaaactgagaaaagtaatttattgaaccaaaagaaacagagagatttgcttccttgtttgttttgttgatcgtgattttttggtaacgttgcttcttctttgccttttggttttgttattgtccgtgacgtttgaactcataatttgctttagtctctcgagtcatgaccacttgatgatgttattttctcttttctc

SEQ ID NO: 103554 - protein, 183 aa, Arabidopsis thaliana
  peptide (1)..(183): Ceres Seq. ID no. 13613014
  misc_feature (46)..(74): Pfam Name: EF hand Pfam Description: EF hand
  misc_feature (35)..(183): Homolog of NCBI NO: 15229784 NR Description: calmodulin [Arabidopsis thaliana]
  misc_feature (35)..(183): Homolog of NCBI NO: 34304715 NR Description: calmodulin 4 [Daucus carota]
  misc_feature (35)..(183): Homolog of NCBI NO: 3121848 NR Description: CALMODULIN >gi|1835521|gb|AAB46588.1| calmodulin annuum] >gi|7643792|gb|AAF65511.1| calmodulin [Capsicum annuum]
  misc_feature (35)..(183): Homolog of NCBI NO: 15225840 NR Description: calmodulin [Arabidopsis thaliana] calmodulin [Arabidopsis thaliana] >gi|30688531|ref|NP_850344.1| [Arabidopsis thaliana] >gi|115486|sp|P25069|CAL2_ARATH calmodulin
  misc_feature (35)..(183): Homolog of NCBI NO: 30683369 NR Description: calmodulin [Arabidopsis thaliana]
  misc_feature (35)..(183): Homolog of NCBI NO: 34903134 NR Description: unnamed protein product [Oryza sativa (japonica
  misc_feature (35)..(183): Homolog of NCBI NO: 115515 NR Description: Calmodulin >gi|71683|pir||MCAA calmodulin -
  misc_feature (35)..(183): Homolog of NCBI NO: 3121849 NR Description: CALMODULIN >gi|1773321|gb|AAB68399.1| calmodulin
  misc_feature (35)..(183): Homolog of NCBI NO: 30688187 NR Description: calmodulin-6 (CAM6) [Arabidopsis thaliana]
  misc_feature (35)..(183): Homolog of NCBI NO: 289525 NR Description: calmodulin
KEKEHSLSRASTFSRNKKISQQKFSRENPKKTKKMADQLTDDQISEFKEAFSLFDKDGDGCITTKELGTVMRSLGQNPTEAELQDMINEVDADGNGTIDFPEFLNLMARKMKDTDSEEELKEAFRVFDKDQNGFISAAELRHVMTNLGEKLTDEEVDEMIREADVDGDGQINYEEFVKVMMAK

SEQ ID NO: 103555 - protein, 149 aa, Arabidopsis thaliana; identical to SEQ ID NO: 27688
  peptide (1)..(149): Ceres Seq. ID no. 13613015
  misc_feature (12)..(40): Pfam Name: EF hand Pfam Description: EF hand
  misc_feature (1)..(149): Homolog of NCBI NO: 15229784 NR Description: calmodulin [Arabidopsis thaliana]
  misc_feature (1)..(149): Homolog of NCBI NO: 34304715 NR Description: calmodulin 4 [Daucus carota]
  misc_feature (1)..(149): Homolog of NCBI NO: 3121848 NR Description: CALMODULIN >gi|1835521|gb|AAB46588.1| calmodulin annuum] >gi|7643792|gb|AAF65511.1| calmodulin [Capsicum annuum]
  misc_feature (1)..(149): Homolog of NCBI NO: 30683369 NR Description: calmodulin [Arabidopsis thaliana]
  misc_feature (1)..(149): Homolog of NCBI NO: 15225840 NR Description: calmodulin [Arabidopsis thaliana] calmodulin [Arabidopsis thaliana] >gi|30688531|ref|NP_850344.1| [Arabidopsis thaliana] >gi|115486|sp|P25069|CAL2_ARATH calmodulin
  misc_feature (1)..(149): Homolog of NCBI NO: 34903134 NR Description: unnamed protein product [Oryza sativa (japonica
  misc_feature (1)..(149): Homolog of NCBI NO: 115515 NR Description: Calmodulin >gi|71683|pir||MCAA calmodulin -
  misc_feature (1)..(149): Homolog of NCBI NO: 3121849 NR Description: CALMODULIN >gi|1773321|gb|AAB68399.1| calmodulin
  misc_feature (1)..(149): Homolog of NCBI NO: 30688187 NR Description: calmodulin-6 (CAM6) [Arabidopsis thaliana]
  misc_feature (1)..(149): Homolog of NCBI NO: 289525 NR Description: calmodulin

SEQ ID NO: 103556 - protein, 113 aa, Arabidopsis thaliana; identical to SEQ ID NO: 27689
  peptide (1)..(113): Ceres Seq. ID no. 13613016
  misc_feature (1)..(113): Homolog of NCBI NO: 15229784 NR Description: calmodulin [Arabidopsis thaliana]
  misc_feature (1)..(113): Homolog of NCBI NO: 34304715 NR Description: calmodulin 4 [Daucus carota]
  misc_feature (1)..(113): Homolog of NCBI NO: 3121848 NR Description: CALMODULIN >gi|1835521|gb|AAB46588.1| calmodulin annuum] >gi|7643792|gb|AAF65511.1| calmodulin [Capsicum annuum]
  misc_feature (1)..(113): Homolog of NCBI NO: 15225840 NR Description: calmodulin [Arabidopsis thaliana] calmodulin [Arabidopsis thaliana] >gi|30688531|ref|NP_850344.1| [Arabidopsis thaliana] >gi|115486|sp|P25069|CAL2_ARATH calmodulin
  misc_feature (1)..(113): Homolog of NCBI NO: 30683369 NR Description: calmodulin [Arabidopsis thaliana]
  misc_feature (1)..(113): Homolog of NCBI NO: 34903134 NR Description: unnamed protein product [Oryza sativa (japonica
  misc_feature (1)..(113): Homolog of NCBI NO: 115515 NR Description: Calmodulin >gi|71683|pir||MCAA calmodulin -
  misc_feature (1)..(113): Homolog of NCBI NO: 3121849 NR Description: CALMODULIN >gi|1773321|gb|AAB68399.1| calmodulin
  misc_feature (1)..(113): Homolog of NCBI NO: 30688187 NR Description: calmodulin-6 (CAM6) [Arabidopsis thaliana]
  misc_feature (1)..(113): Homolog of NCBI NO: 289525 NR Description: calmodulin

SEQ ID NO: 103557 - DNA, 1352 bp, Arabidopsis thaliana
  misc_feature (1)..(1352): Ceres Seq. ID no. 13613017
  misc_feature: MA Experiment ID: 108433 Result: Down-regulated in Transcription
  misc_feature: MA Experiment 108433 PARAMETER Experiment Name: At_rhl_Mutant2_cDNA_P Parameter: Age (day) Value: 7
  misc_feature: MA Experiment 108433 PARAMETER Experiment Name: At_rhl_Mutant2_cDNA_P Parameter: Organism Value: A. thaliana
  misc_feature: MA Experiment 108433 PARAMETER Experiment Name: At_rhl_Mutant2_cDNA_P Parameter: Plant Line Value: rhl Mutant vs. wt landsburg
  misc_feature: MA Experiment 108433 PARAMETER Experiment Name: At_rhl_Mutant2_cDNA_P Parameter: Tissue Value: Roots
  misc_feature: MA Experiment ID: 108434 Result: Up-regulated in Transcription
  misc_feature: MA Experiment 108434 PARAMETER Experiment Name: At_Root_Tips_cDNA_P Parameter: Tissue Value: Root Tips
  misc_feature: MA Experiment ID: 108462 Result: Down-regulated in Transcription
  misc_feature: MA Experiment 108462 PARAMETER Experiment Name: At_Germinating_Seeds_cDNA_P Parameter: Age (day) Value: 2 vs. 0
  misc_feature: MA Experiment 108462 PARAMETER Experiment Name: At_Germinating_Seeds_cDNA_P Parameter: Tissue Value: Germinating Seeds
  misc_feature: MA Experiment ID: 108463 Result: Down-regulated in Transcription
  misc_feature: MA Experiment 108463 PARAMETER Experiment Name: At_Germinating_Seeds_cDNA_P Parameter: Age (day) Value: 3 vs. 0
  misc_feature: MA Experiment 108463 PARAMETER Experiment Name: At_Germinating_Seeds_cDNA_P Parameter: Tissue Value: Germinating Seeds
  misc_feature: MA Experiment ID: 108489 Result: Up-regulated in Transcription
  misc_feature: MA Experiment ID: 108573 Result: Down-regulated in Transcription
  misc_feature: MA Experiment 108573 PARAMETER Experiment Name: At_Drought_cDNA_P Parameter: Timepoint (hr) Value: 6
  misc_feature: MA Experiment 108573 PARAMETER Experiment Name: At_Drought_cDNA_P Parameter: Tissue Value: Aerial
  misc_feature: MA Experiment 108573 PARAMETER Experiment Name: At_Drought_cDNA_P Parameter: Treatment Value: Drought vs. No Drought
  misc_feature: MA Experiment ID: 20001557 Result: Up-regulated in Transcription
  misc_feature: MA Experiment 20001557 PARAMETER Experiment Name: At_Drought_Soil_Dry_P Parameter: Age (day) Value: 27
  misc_feature: MA Experiment 20001557 PARAMETER Experiment Name: At_Drought_Soil_Dry_P Parameter: Organism Value: A. thaliana
  misc_feature: MA Experiment 20001557 PARAMETER Experiment Name: At_Drought_Soil_Dry_P Parameter: Plant Line Value: WS
  misc_feature: MA Experiment 20001557 PARAMETER Experiment Name: At_Drought_Soil_Dry_P Parameter: Post Timepoint (hr) Value: 3
  misc_feature: MA Experiment 20001557 PARAMETER Experiment Name: At_Drought_Soil_Dry_P Parameter: Post-Treatment Value: Re-Water vs. No Drought
  misc_feature: MA Experiment 20001557 PARAMETER Experiment Name: At_Drought_Soil_Dry_P Parameter: Timepoint (day) Value: 13
  misc_feature: MA Experiment 20001557 PARAMETER Experiment Name: At_Drought_Soil_Dry_P Parameter: Treatment Value: Drought vs. No Drought
  misc_feature: MA Experiment ID: 20001558 Result: Up-regulated in Transcription
  misc_feature: MA Experiment 20001558 PARAMETER Experiment Name: At_Drought_Soil_Dry_P Parameter: Age (day) Value: 27
  misc_feature: MA Experiment 20001558 PARAMETER Experiment Name: At_Drought_Soil_Dry_P Parameter: Organism Value: A. thaliana
  misc_feature: MA Experiment 20001558 PARAMETER Experiment Name: At_Drought_Soil_Dry_P Parameter: Plant Line Value: WS
  misc_feature: MA Experiment 20001558 PARAMETER Experiment Name: At_Drought_Soil_Dry_P Parameter: Post Timepoint (hr) Value: 6
  misc_feature: MA Experiment 20001558 PARAMETER Experiment Name: At_Drought_Soil_Dry_P Parameter: Post-Treatment Value: Re-Water vs. No Drought
  misc_feature: MA Experiment 20001558 PARAMETER Experiment Name: At_Drought_Soil_Dry_P Parameter: Timepoint (day) Value: 13
  misc_feature: MA Experiment 20001558 PARAMETER Experiment Name: At_Drought_Soil_Dry_P Parameter: Treatment Value: Drought vs. No Drought
  misc_feature: MA Experiment ID: 20001560 Result: Up-regulated in Transcription
  misc_feature: MA Experiment 20001560 PARAMETER Experiment Name: At_Drought_Soil_Dry_P Parameter: Age (day) Value: 28
  misc_feature: MA Experiment 20001560 PARAMETER Experiment Name: At_Drought_Soil_Dry_P Parameter: Organism Value: A. thaliana
  misc_feature: MA Experiment 20001560 PARAMETER Experiment Name: At_Drought_Soil_Dry_P Parameter: Plant Line Value: WS
  misc_feature: MA Experiment 20001560 PARAMETER Experiment Name: At_Drought_Soil_Dry_P Parameter: Post Timepoint (hr) Value: None
  misc_feature: MA Experiment 20001560 PARAMETER Experiment Name: At_Drought_Soil_Dry_P Parameter: Post-Treatment Value: None
  misc_feature: MA Experiment 20001560 PARAMETER Experiment Name: At_Drought_Soil_Dry_P Parameter: Timepoint (day) Value: 14
  misc_feature: MA Experiment 20001560 PARAMETER Experiment Name: At_Drought_Soil_Dry_P Parameter: Treatment Value: Drought vs. No Drought
  misc_feature: MA Experiment ID: 20001757 Result: Up-regulated in Transcription
  misc_feature: MA Experiment 20001757 PARAMETER Experiment Name: At_50mM_NH4NO3_L-to-H_P Parameter: Timepoint (hr) Value: 6
  misc_feature: MA Experiment 20001757 PARAMETER Experiment Name: At_50mM_NH4NO3_L-to-H_P Parameter: Tissue Value: Leaf
  misc_feature: MA Experiment 20001757 PARAMETER Experiment Name: At_50mM_NH4NO3_L-to-H_P Parameter: Treatment Value: 50mM NH4NO3 vs 100mM Mannitol
aagctgaagaaaacccttaattctctttctcttgttccatttcgtcccattttgttctttctactgtcgccgtaaaggatattcaaaagcggtagaggcggcgatggcggatcttttaccacctcttacggcggcacaagtcgatgctaagactaaagtcgatgagaaagtcgattactcgaacctcccttctcctgttccctatgaggaactccaccgtgaagctctcatgtctttaaagtcggacaattttgagggtttacgcttcgactttaccagggcgttgaatcagaagttttctctcagtcatagtgtaatgatggggccaaccgaagttcctgctcagtcacctgaaactactatcaaaattccaacagcccattatgagtttggtgccaattattatgacccaaagttgctgctcatcggaagggtaatgactgatggtagactaaatgcgagactgaaagcagatttaactgataagttagttgtgaaggcgaatgctctgataacaaatgaggaacatatgtcacaagcaatgttcaactttgattacatgggatcagactacagagctcagcttcaacttggacagagtgccctaattggagcaacttatatccagagtgttacaaaccatttatccttgggtggtgaaattttctgggctggtgtgcctcggaagtcgggaataggctatgctgctagatacgagacagataaaatggttgcttctggtcaagttgctagcacgggtgctgttgttatgaactatgttcagaagatttcagataaggtgtcacttgccactgatttcatgtacaactacttttcaagagatgtaacagctagtgtgggttatgactatatgcttagacaggctcgtgtgcggggtaagatcgattcaaacggtgttgcatccgctctccttgaagaaagattgagtatgggactcaattttcttctttctgcagagctggatcataagaagaaggactacaagtttggtttcggattaacagttggttaaaagaccgaataaaaaccggcacacaataagcctggcgcacagagcagattgcagcagtagtggtttcagctgcgaggatttcggttaaaatttattctatttcagtttaggctttttggtgaagttgggaagataaacggtaacgatgttgtgttgttatttgaggtttaggatttgtttccaagaaccattttataaaagaagaagaagcaaatgaggtttttgttttacttccttgctctaagatctcgtgaacttccgagagaggtgtatcatttcatttccttgccataaaaaaaaacgaattctttttttcttc

SEQ ID NO: 103558 - protein, 309 aa, Arabidopsis thaliana; identical to SEQ ID NO: 24718
  peptide (1)..(309): Ceres Seq. ID no. 13613018
  misc_feature (30)..(303): Pfam Name: Eukaryotic porin Pfam Description: Eukaryotic porin
  misc_feature (1)..(309): Homolog of NCBI NO: 15231008 NR Description: membrane import protein -related [Arabidopsis >gi|13632086|sp|Q9LHE5|OM40_ARATH Probable mitochondrial import subunit TOM40 homolog (Translocase of outer membrane 40 putative
  misc_feature (137)..(309): Homolog of NCBI NO: 11994775 NR Description: membrane import protein-like [Arabidopsis
  misc_feature (1)..(105): Homolog of NCBI NO: 11994775 NR Description: membrane import protein-like [Arabidopsis
  misc_feature (1)..(306): Homolog of NCBI NO: 15222963 NR Description: hypothetical protein [Arabidopsis thaliana]
  misc_feature (137)..(306): Homolog of NCBI NO: 13162531 NR Description: Hypothetical protein [Arabidopsis thaliana]
  misc_feature (1)..(105): Homolog of NCBI NO: 13162531 NR Description: Hypothetical protein [Arabidopsis thaliana]
  misc_feature (137)..(306): Homolog of NCBI NO: 25405370 NR Description: hypothetical protein F14I3.2 [imported] -
  misc_feature (73)..(105): Homolog of NCBI NO: 25405370 NR Description: hypothetical protein F14I3.2 [imported] -
  misc_feature (218)..(309): Homolog of NCBI NO: 2982293 NR Description: ISP42-like protein [Picea mariana]
  misc_feature (213)..(309): Homolog of NCBI NO: 34903264 NR Description: unnamed protein product [Oryza sativa (japonica group)] >gi|6539563|dbj|BAA88180.1| unnamed protein product

SEQ ID NO: 103559 - protein, 267 aa, Arabidopsis thaliana; identical to SEQ ID NO: 24719
  peptide (1)..(267): Ceres Seq. ID no. 13613019
  misc_feature (1)..(261): Pfam Name: Eukaryotic porin Pfam Description: Eukaryotic porin
  misc_feature (1)..(267): Homolog of NCBI NO: 15231008 NR Description: membrane import protein -related [Arabidopsis >gi|13632086|sp|Q9LHE5|OM40_ARATH Probable mitochondrial import subunit TOM40 homolog (Translocase of outer membrane 40 putative
  misc_feature (95)..(267): Homolog of NCBI NO: 11994775 NR Description: membrane import protein-like [Arabidopsis
  misc_feature (1)..(63): Homolog of NCBI NO: 11994775 NR Description: membrane import protein-like [Arabidopsis
  misc_feature (1)..(264): Homolog of NCBI NO: 15222963 NR Description: hypothetical protein [Arabidopsis thaliana]
  misc_feature (95)..(264): Homolog of NCBI NO: 13162531 NR Description: Hypothetical protein [Arabidopsis thaliana]
  misc_feature (1)..(63): Homolog of NCBI NO: 13162531 NR Description: Hypothetical protein [Arabidopsis thaliana]
  misc_feature (95)..(264): Homolog of NCBI NO: 25405370 NR Description: hypothetical protein F14I3.2 [imported] -
  misc_feature (31)..(63): Homolog of NCBI NO: 25405370 NR Description: hypothetical protein F14I3.2 [imported] -
  misc_feature (176)..(267): Homolog of NCBI NO: 2982293 NR Description: ISP42-like protein [Picea mariana]
  misc_feature (171)..(267): Homolog of NCBI NO: 34903264 NR Description: unnamed protein product [Oryza sativa (japonica group)] >gi|6539563|dbj|BAA88180.1| unnamed protein product

SEQ ID NO: 103560 - protein, 238 aa, Arabidopsis thaliana; identical to SEQ ID NO: 24720
  peptide (1)..(238): Ceres Seq. ID no. 13613020
  misc_feature (1)..(232): Pfam Name: Eukaryotic porin Pfam Description: Eukaryotic porin
  misc_feature (1)..(238): Homolog of NCBI NO: 15231008 NR Description: membrane import protein -related [Arabidopsis >gi|13632086|sp|Q9LHE5|OM40_ARATH Probable mitochondrial import subunit TOM40 homolog (Translocase of outer membrane 40 putative
  misc_feature (66)..(238): Homolog of NCBI NO: 11994775 NR Description: membrane import protein-like [Arabidopsis
  misc_feature (1)..(34): Homolog of NCBI NO: 11994775 NR Description: membrane import protein-like [Arabidopsis
  misc_feature (1)..(235): Homolog of NCBI NO: 15222963 NR Description: hypothetical protein [Arabidopsis thaliana]
  misc_feature (66)..(235): Homolog of NCBI NO: 13162531 NR Description: Hypothetical protein [Arabidopsis thaliana]
  misc_feature (1)..(34): Homolog of NCBI NO: 13162531 NR Description: Hypothetical protein [Arabidopsis thaliana]
  misc_feature (66)..(235): Homolog of NCBI NO: 25405370 NR Description: hypothetical protein F14I3.2 [imported] -
  misc_feature (2)..(34): Homolog of NCBI NO: 25405370 NR Description: hypothetical protein F14I3.2 [imported] -
  misc_feature (147)..(238): Homolog of NCBI NO: 2982293 NR Description: ISP42-like protein [Picea mariana]
  misc_feature (142)..(238): Homolog of NCBI NO: 34903264 NR Description: unnamed protein product [Oryza sativa (japonica group)] >gi|6539563|dbj|BAA88180.1| unnamed protein product

SEQ ID NO: 103561 - DNA, 1665 bp, Arabidopsis thaliana
  misc_feature (1)..(1665): Ceres Seq. ID no. 13613021
  misc_feature: MA Experiment ID: 20000308 Result: Up-regulated in Transcription
  misc_feature: MA Experiment 20000308 PARAMETER Experiment Name: At_100mM_NaCl__P Parameter: Age (day) Value: 17
  misc_feature: MA Experiment 20000308 PARAMETER Experiment Name: At_100mM_NaCl__P Parameter: Organism Value: A. thaliana
  misc_feature: MA Experiment 20000308 PARAMETER Experiment Name: At_100mM_NaCl__P Parameter: Plant Line Value: WS
  misc_feature: MA Experiment 20000308 PARAMETER Experiment Name: At_100mM_NaCl__P Parameter: Timepoint (hr) Value: 72
  misc_feature: MA Experiment 20000308 PARAMETER Experiment Name: At_100mM_NaCl__P Parameter: Tissue Value: Whole Plant
  misc_feature: MA Experiment 20000308 PARAMETER Experiment Name: At_100mM_NaCl__P Parameter: Treatment Value: 100mM NaCl vs. No Treatment
  misc_feature: MA Experiment ID: 20000453 Result: Up-regulated in Transcription
  misc_feature: MA Experiment 20000453 PARAMETER Experiment Name: At_100uM_ABA_P Parameter: Age (day) Value: 15
  misc_feature: MA Experiment 20000453 PARAMETER Experiment Name: At_100uM_ABA_P Parameter: Organism Value: A. thaliana
  misc_feature: MA Experiment 20000453 PARAMETER Experiment Name: At_100uM_ABA_P Parameter: Plant Line Value: WS
  misc_feature: MA Experiment 20000453 PARAMETER Experiment Name: At_100uM_ABA_P Parameter: Timepoint (hr) Value: 24
  misc_feature: MA Experiment 20000453 PARAMETER Experiment Name: At_100uM_ABA_P Parameter: Tissue Value: Aerial
  misc_feature: MA Experiment 20000453 PARAMETER Experiment Name: At_100uM_ABA_P Parameter: Treatment Value: 100uM ABA vs. No Treatment
  misc_feature: MA Experiment ID: 20000455 Result: Up-regulated in Transcription
  misc_feature: MA Experiment 20000455 PARAMETER Experiment Name: At_100uM_ABA_P Parameter: Age (day) Value: 16
  misc_feature: MA Experiment 20000455 PARAMETER Experiment Name: At_100uM_ABA_P Parameter: Organism Value: A. thaliana
  misc_feature: MA Experiment 20000455 PARAMETER Experiment Name: At_100uM_ABA_P Parameter: Plant Line Value: WS
  misc_feature: MA Experiment 20000455 PARAMETER Experiment Name: At_100uM_ABA_P Parameter: Timepoint (hr) Value: 48
  misc_feature: MA Experiment 20000455 PARAMETER Experiment Name: At_100uM_ABA_P Parameter: Tissue Value: Aerial
  misc_feature: MA Experiment 20000455 PARAMETER Experiment Name: At_100uM_ABA_P Parameter: Treatment Value: 100uM ABA vs. No Treatment
  misc_feature: MA Experiment ID: 20001248 Result: Down-regulated in Transcription
  misc_feature: MA Experiment 20001248 PARAMETER Experiment Name: At_Far-red-induction_P Parameter: Age (day) Value: 7
  misc_feature: MA Experiment 20001248 PARAMETER Experiment Name: At_Far-red-induction_P Parameter: Light Value: Far-red vs. White
  misc_feature: MA Experiment 20001248 PARAMETER Experiment Name: At_Far-red-induction_P Parameter: Organism Value: A. thaliana
  misc_feature: MA Experiment 20001248 PARAMETER Experiment Name: At_Far-red-induction_P Parameter: Plant Line Value: Columbia
  misc_feature: MA Experiment 20001248 PARAMETER Experiment Name: At_Far-red-induction_P Parameter: Timepoint (hr) Value: 4
  misc_feature: MA Experiment 20001248 PARAMETER Experiment Name: At_Far-red-induction_P Parameter: Tissue Value: Whole Plant
  misc_feature: MA Experiment ID: 20001554 Result: Up-regulated in Transcription
  misc_feature: MA Experiment 20001554 PARAMETER Experiment Name: At_Drought_Soil_Dry_P Parameter: Age (day) Value: 21
  misc_feature: MA Experiment 20001554 PARAMETER Experiment Name: At_Drought_Soil_Dry_P Parameter: Organism Value: A. thaliana
  misc_feature: MA Experiment 20001554 PARAMETER Experiment Name: At_Drought_Soil_Dry_P Parameter: Plant Line Value: WS
  misc_feature: MA Experiment 20001554 PARAMETER Experiment Name: At_Drought_Soil_Dry_P Parameter: Post Timepoint (hr) Value: None
  misc_feature: MA Experiment 20001554 PARAMETER Experiment Name: At_Drought_Soil_Dry_P Parameter: Post-Treatment Value: None
  misc_feature: MA Experiment 20001554 PARAMETER Experiment Name: At_Drought_Soil_Dry_P Parameter: Timepoint (day) Value: 7
  misc_feature: MA Experiment 20001554 PARAMETER Experiment Name: At_Drought_Soil_Dry_P Parameter: Treatment Value: Drought vs. No Drought
  misc_feature: MA Experiment ID: 20001555 Result: Up-regulated in Transcription
  misc_feature: MA Experiment 20001555 PARAMETER Experiment Name: At_Drought_Soil_Dry_P Parameter: Age (day) Value: 24
  misc_feature: MA Experiment 20001555 PARAMETER Experiment Name: At_Drought_Soil_Dry_P Parameter: Organism Value: A. thaliana
  misc_feature: MA Experiment 20001555 PARAMETER Experiment Name: At_Drought_Soil_Dry_P Parameter: Plant Line Value: WS
  misc_feature: MA Experiment 20001555 PARAMETER Experiment Name: At_Drought_Soil_Dry_P Parameter: Post Timepoint (hr) Value: None
  misc_feature: MA Experiment 20001555 PARAMETER Experiment Name: At_Drought_Soil_Dry_P Parameter: Post-Treatment Value: None
  misc_feature: MA Experiment 20001555 PARAMETER Experiment Name: At_Drought_Soil_Dry_P Parameter: Timepoint (day) Value: 10
  misc_feature: MA Experiment 20001555 PARAMETER Experiment Name: At_Drought_Soil_Dry_P Parameter: Treatment Value: Drought vs. No Drought
  misc_feature: MA Experiment ID: 20001556 Result: Up-regulated in Transcription
  misc_feature: MA Experiment 20001556 PARAMETER Experiment Name: At_Drought_Soil_Dry_P Parameter: Age (day) Value: 26
  misc_feature: MA Experiment 20001556 PARAMETER Experiment Name: At_Drought_Soil_Dry_P Parameter: Organism Value: A. thaliana
  misc_feature: MA Experiment 20001556 PARAMETER Experiment Name: At_Drought_Soil_Dry_P Parameter: Plant Line Value: WS
  misc_feature: MA Experiment 20001556 PARAMETER Experiment Name: At_Drought_Soil_Dry_P Parameter: Post Timepoint (hr) Value: None
  misc_feature: MA Experiment 20001556 PARAMETER Experiment Name: At_Drought_Soil_Dry_P Parameter: Post-Treatment Value: None
  misc_feature: MA Experiment 20001556 PARAMETER Experiment Name: At_Drought_Soil_Dry_P Parameter: Timepoint (day) Value: 12
  misc_feature: MA Experiment 20001556 PARAMETER Experiment Name: At_Drought_Soil_Dry_P Parameter: Treatment Value: Drought vs. No Drought
  misc_feature: MA Experiment ID: 20001559 Result: Up-regulated in Transcription
  misc_feature: MA Experiment 20001559 PARAMETER Experiment Name: At_Drought_Soil_Dry_P Parameter: Age (day) Value: 28
  misc_feature: MA Experiment 20001559 PARAMETER Experiment Name: At_Drought_Soil_Dry_P Parameter: Organism Value: A. thaliana
  misc_feature: MA Experiment 20001559 PARAMETER Experiment Name: At_Drought_Soil_Dry_P Parameter: Plant Line Value: WS
  misc_feature: MA Experiment 20001559 PARAMETER Experiment Name: At_Drought_Soil_Dry_P Parameter: Post Timepoint (hr) Value: 29
  misc_feature: MA Experiment 20001559 PARAMETER Experiment Name: At_Drought_Soil_Dry_P Parameter: Post-Treatment Value: Re-Water vs. No Drought
  misc_feature: MA Experiment 20001559 PARAMETER Experiment Name: At_Drought_Soil_Dry_P Parameter: Timepoint (day) Value: 14
  misc_feature: MA Experiment 20001559 PARAMETER Experiment Name: At_Drought_Soil_Dry_P Parameter: Treatment Value: Drought vs. No Drought
  misc_feature: MA Experiment ID: 20001904 Result: Up-regulated in Transcription
  misc_feature: MA Experiment 20001904 PARAMETER Experiment Name: At_Drought_Reproduction_P Parameter: Age (day) Value: 37
  misc_feature: MA Experiment 20001904 PARAMETER Experiment Name: At_Drought_Reproduction_P Parameter: Organism Value: A. thaliana
  misc_feature: MA Experiment 20001904 PARAMETER Experiment Name: At_Drought_Reproduction_P Parameter: Plant Line Value: WS
  misc_feature: MA Experiment 20001904 PARAMETER Experiment Name: At_Drought_Reproduction_P Parameter: Timepoint (day) Value: 7
  misc_feature: MA Experiment 20001904 PARAMETER Experiment Name: At_Drought_Reproduction_P Parameter: Tissue Value: Rosettes
  misc_feature: MA Experiment 20001904 PARAMETER Experiment Name: At_Drought_Reproduction_P Parameter: Treatment Value: Drought vs. No Drought
gagcatcactggcagcaatgaccaccactgagtttcaaagctgcttcatcttcctcctcttatgtctcttctcactcgtctgttactctctctttttcaggaaaccaagctcaagacgggacgcccatggctgtgatctgcctccgagccctccttctttgccagtcatcggccatcttcaccttatcctctcttcccttgtccacaagtcttttcaaaagatctcctccaactacggacctctcctccatctccgcatcttcaacgttcccatagtcctcgtctcctctgcgtcagtggcctacgatatcttcagggtgcatgacttgaacgtctcttctcgcggctcccctccgtttgaggagtcactgttgttcggatctaccggcttcattagtgctccctatggagattatttcaagttcatgaagaaacacctggtcacaaagctccttggaccacaggcactcgagcgctcacgcctcatccggacaaatgaactagaacggttttacataaacctgcttgataaggcgacgaagaaggagagcgttgaaattggtaaggaagcgatgaagctcagtaacaacagcatctgcaagatgatcatggggaggagttgtttagaggaaaagggtgaggcagagagagtcaggggtttgattatcgagtcgttttacttgacgaagaaatttttcttggcattcactttgcgcgggctgctcgagaagcttggaatctcgctgttcaaaaaagaaataatgggagtttcccgcagatttgatgatttgctcgaaaggtatcttagggaacatgaagagaaaccagataatgagcatcaagatacggacatgattgatgcactattggcagcttatcgagacgaaaaggccgagtataagatcactaggaaccagatcaaggcgtttttagtggatattttcattgcgggcactgacatctcggcgctaacaacgcagggaacaatggctgagatcattaacaaccctaacatatttgtgagaattagagaagaaatcgattctgttgtagggaaatcaaggctgattcaagaaacggatctaccaaagctcccttacttgcaagcggtagtcaaagaagggcttagattgcacccgcctacgcctctcatggtaagggagttccaagaagggtgtaaggtcaaaggtttctacataccagcgagcacaacccttgttgttaatggttatgctgtgatgagagatccaaatgtctgggaagaccctgaggagttcaagccggagaggtttttagcttcttcaagattaatgcaagaggacgagataagagagcaagccctcaagtacatcgctttcggtagtggaaggagaggctgcccaggagcaaatgtagcttatatctttgtaggaaccgcgattggaatgatggtgcaatgctttgactggagaatcaatggagaaaaggttgacatgaaagaggccattggaggactgaacctgaccttggctcatccccttaagtgcactcctgttgctcgattcccaaaacctttttaagttcaaattattaaaaccgatgttccatgtttgatgttggtgactggactagtgttgtaagatggttgaagtaaaataataaggaagcttgctttctgttgttctg

SEQ ID NO: 103562 - protein, 518 aa, Arabidopsis thaliana
  peptide (1)..(518): Ceres Seq. ID no. 13613022
  misc_feature (6)..(518): Homolog of NCBI NO: 15231049 NR Description: cytochrome P450 family [Arabidopsis thaliana]
  misc_feature (6)..(518): Homolog of NCBI NO: 21553521 NR Description: cytochrome P450, putative [Arabidopsis thaliana]
  misc_feature (3)..(518): Homolog of NCBI NO: 15231047 NR Description: cytochrome P450 family [Arabidopsis thaliana]
  misc_feature (14)..(513): Homolog of NCBI NO: 9293969 NR Description: cytochrome P450-like protein [Arabidopsis
  misc_feature (3)..(518): Homolog of NCBI NO: 9294003 NR Description: cytochrome P450-like protein [Arabidopsis
  misc_feature (225)..(518): Homolog of NCBI NO: 9293964 NR Description: contains similarity to cytochrome
  misc_feature (3)..(108): Homolog of NCBI NO: 9293964 NR Description: contains similarity to cytochrome
  misc_feature (16)..(513): Homolog of NCBI NO: 15233774 NR Description: cytochrome P450 family [Arabidopsis thaliana]
  misc_feature (3)..(515): Homolog of NCBI NO: 15231052 NR Description: cytochrome P450 family [Arabidopsis thaliana]
  misc_feature (3)..(517): Homolog of NCBI NO: 30685997 NR Description: cytochrome P450 family [Arabidopsis thaliana]
ASLAAMTTTEFQSCFIFLLLCLFSLVCYSLFFRKPSSRRDAHGCDLPPSPPSLPVIGHLHLILSSLVHKSFQKISSNYGPLLHLRIFNVPIVLVSSASVAYDIFRVHDLNVSSRGSPPFEESLLFGSTGFISAPYGDYFKFMKKHLVTKLLGPQALERSRLIRTNELERFYINLLDKATKKESVEIGKEAMKLSNNSICKMIMGRSCLEEKGEAERVRGLIIESFYLTKKFFLAFTLRGLLEKLGISLFKKEIMGVSRRFDDLLERYLREHEEKPDNEHQDTDMIDALLAAYRDEKAEYKITRNQIKAFLVDIFIAGTDISALTTQGTMAEIINNPNIFVRIREEIDSVVGKSRLIQETDLPKLPYLQAVVKEGLRLHPPTPLMVREFQEGCKVKGFYIPASTTLVVNGYAVMRDPNVWEDPEEFKPERFLASSRLMQEDEIREQALKYIAFGSGRRGCPGANVAYIFVGTAIGMMVQCFDWRINGEKVDMKEAIGGLNLTLAHPLKCTPVARFPKPF

SEQ ID NO: 103563 - protein, 513 aa, Arabidopsis thaliana; identical to SEQ ID NO: 42595
  peptide (1)..(513): Ceres Seq. ID no. 13613023
  misc_feature (1)..(513): Homolog of NCBI NO: 15231049 NR Description: cytochrome P450 family [Arabidopsis thaliana]
  misc_feature (1)..(513): Homolog of NCBI NO: 21553521 NR Description: cytochrome P450, putative [Arabidopsis thaliana]
  misc_feature (1)..(513): Homolog of NCBI NO: 15231047 NR Description: cytochrome P450 family [Arabidopsis thaliana]
  misc_feature (9)..(508): Homolog of NCBI NO: 9293969 NR Description: cytochrome P450-like protein [Arabidopsis
  misc_feature (1)..(513): Homolog of NCBI NO: 9294003 NR Description: cytochrome P450-like protein [Arabidopsis
  misc_feature (220)..(513): Homolog of NCBI NO: 9293964 NR Description: contains similarity to cytochrome
  misc_feature (1)..(103): Homolog of NCBI NO: 9293964 NR Description: contains similarity to cytochrome
  misc_feature (11)..(508): Homolog of NCBI NO: 15233774 NR Description: cytochrome P450 family [Arabidopsis thaliana]
  misc_feature (1)..(510): Homolog of NCBI NO: 15231052 NR Description: cytochrome P450 family [Arabidopsis thaliana]
  misc_feature (1)..(512): Homolog of NCBI NO: 30685997 NR Description: cytochrome P450 family [Arabidopsis thaliana]

SEQ ID NO: 103564 - protein, 377 aa, Arabidopsis thaliana; identical to SEQ ID NO: 42596
  peptide (1)..(377): Ceres Seq. ID no. 13613024
  misc_feature (1)..(377): Homolog of NCBI NO: 15231049 NR Description: cytochrome P450 family [Arabidopsis thaliana]
  misc_feature (1)..(377): Homolog of NCBI NO: 21553521 NR Description: cytochrome P450, putative [Arabidopsis thaliana]
  misc_feature (1)..(377): Homolog of NCBI NO: 15231047 NR Description: cytochrome P450 family [Arabidopsis thaliana]
  misc_feature (1)..(372): Homolog of NCBI NO: 9293969 NR Description: cytochrome P450-like protein [Arabidopsis
  misc_feature (1)..(377): Homolog of NCBI NO: 9294003 NR Description: cytochrome P450-like protein [Arabidopsis
  misc_feature (84)..(377): Homolog of NCBI NO: 9293964 NR Description: contains similarity to cytochrome
  misc_feature (1)..(372): Homolog of NCBI NO: 15233774 NR Description: cytochrome P450 family [Arabidopsis thaliana]
  misc_feature (1)..(374): Homolog of NCBI NO: 15231052 NR Description: cytochrome P450 family [Arabidopsis thaliana]
  misc_feature (1)..(376): Homolog of NCBI NO: 30685997 NR Description: cytochrome P450 family [Arabidopsis thaliana]
  misc_feature (1)..(372): Homolog of NCBI NO: 7430617 NR Description: cytochrome P450 - Arabidopsis thaliana

SEQ ID NO: 103565 - DNA, 2000 bp, Arabidopsis thaliana
  misc_feature (1)..(2000): Ceres Seq. ID no. 13613031
  misc_feature: MA Experiment ID: 108573 Result: Up-regulated in Transcription
  misc_feature: MA Experiment 108573 PARAMETER Experiment Name: At_Drought_cDNA_P Parameter: Timepoint (hr) Value: 6
  misc_feature: MA Experiment 108573 PARAMETER Experiment Name: At_Drought_cDNA_P Parameter: Tissue Value: Aerial
  misc_feature: MA Experiment 108573 PARAMETER Experiment Name: At_Drought_cDNA_P Parameter: Treatment Value: Drought vs. No Drought
  misc_feature: MA Experiment ID: 108585 Result: Up-regulated in Transcription
  misc_feature: MA Experiment 108585 PARAMETER Experiment Name: At_5mM_NaNP_cDNA_P Parameter: Timepoint (hr) Value: 6
  misc_feature: MA Experiment 108585 PARAMETER Experiment Name: At_5mM_NaNP_cDNA_P Parameter: Tissue Value: Aerial
  misc_feature: MA Experiment 108585 PARAMETER Experiment Name: At_5mM_NaNP_cDNA_P Parameter: Treatment Value: null
  misc_feature: MA Experiment ID: 20000112 Result: Up-regulated in Transcription
  misc_feature: MA Experiment 20000112 PARAMETER Experiment Name: At_42deg_Heat_cDNA_P Parameter: Temperature (deg C) Value: 42 vs. 22
  misc_feature: MA Experiment 20000112 PARAMETER Experiment Name: At_42deg_Heat_cDNA_P Parameter: Timepoint (hr) Value: 2
  misc_feature: MA Experiment 20000112 PARAMETER Experiment Name: At_42deg_Heat_cDNA_P Parameter: Tissue Value: Aerial
  misc_feature: MA Experiment ID: 20000179 Result: Up-regulated in Transcription
  misc_feature: MA Experiment 20000179 PARAMETER Experiment Name: At_Germinating_Seeds_P Parameter: Age (hr) Value: 6 vs. 0
  misc_feature: MA Experiment 20000179 PARAMETER Experiment Name: At_Germinating_Seeds_P Parameter: Tissue Value: Germinating Seeds
  misc_feature: MA Experiment ID: 20001451 Result: Up-regulated in Transcription
  misc_feature: MA Experiment 20001451 PARAMETER Experiment Name: At_Far-red-induction_P Parameter: Age (day) Value: 7
  misc_feature: MA Experiment 20001451 PARAMETER Experiment Name: At_Far-red-induction_P Parameter: Light Value: Far-red vs. White
  misc_feature: MA Experiment 20001451 PARAMETER Experiment Name: At_Far-red-induction_P Parameter: Organism Value: A. thaliana
  misc_feature: MA Experiment 20001451 PARAMETER Experiment Name: At_Far-red-induction_P Parameter: Plant Line Value: Columbia
  misc_feature: MA Experiment 20001451 PARAMETER Experiment Name: At_Far-red-induction_P Parameter: Timepoint (hr) Value: 24
  misc_feature: MA Experiment 20001451 PARAMETER Experiment Name: At_Far-red-induction_P Parameter: Tissue Value: Whole Plant
atcttcttcctcatctttcttctctcttcaacattttcttctcttcttcacacaaacacacacagatctcttcttcatcacattacttctggctttacatcttttttcttctccatgaggaaagggagaggctcttccgtcgttggacccgcccttccagtaaccgccggtggatctgtgaaggagccgaggtatagaggcgttaggaagagaccttggggtcgattcgcagctgagatccgtgatccattaaaaaaatctcgtgtctggctcggtactttcgattccgccgtagatgctgcacgcgcttacgataccgccgcacgtaacctccgtggtccaaaggccaagaccaatttcccgatcgattgttctccttcttctcctctccaacctctcacctacctccacaatcaaaacctctgttctcctccggtgattcagaaccagatcgatccgtttatggaccatcggttatacggcggaggtaatttccaggagcagcagcagcagcagattattagtcggccggcgagtagcagcatgagcagcaccgttaaatcttgtagcggaccgagaccgatggaagccgcggcggcgtcttcgtcggtggcgaaaccgttacatgcgattaagagatatccgagaactccaccggtagctccggaggattgtcatagcgactgcgattcttcgtcgtctgttattgacgacggagatgatatcgcatcttcgtcttcccgccggaaaacgccgtttcagtttgatcttaatttcccgccgttggatggcgttgacttattcgctggcgggatagatgatctccactgtaccgatctacgtctctgatttgctgctttacaaaaaaaatccgttgattacacacaaaaaaaattctcaaattttacaaaatgataactttatgctcttttgtttttccattttcctttgatatcatattgaaagagaaaaaaaggaagaacaaaaaaaaaagattgagcgtgatgattttatcatcaacgaagatgatgacgattaaaaagagagagagattgtgttaagatctgttactgtaagaaccagatctgggtttcatttttatctgtttcttcttataaaagatccaacaaccctttgttacatatatataacattctgaagctggtgatgatttctgaatgattcaaatccattatctttagatttctacttattcatagagtgtcccctgatgtaagtaggaagctgcatttacatagtatgtaacagaaccacacagggcacaagtatttgtttgtgttttgtctcttggcttgatcttgatcaattcagggtttcttctattcaacaagtaaagcttagtggttctctgagatggaagcaataaaaagatgaaaggaagaaagacggtgaagctcctttgctatctaattgggtgattcgaagaggaagttagaatactcattgtcattgttaagcctcaagttttcattcatcagcgaggagacaagaaaggctttcccttttgtgtacccaatgaatattttggatggtgaagaacatagagattaagggcatggtcaatgggcggtgagtggttttgttgtgatcgataaagctcaatgagcacaggccaaatctttaggttaaagtttggtggctgagatgattgttttgatctttaagagctgtgggttgaggtggcagaattcgttgtgtgtttgacctttttgatttgaatttgctggtagagagttttcccaattttggtatctactttgcttctatgccacggattcagacagtgaatctttgtgtctgaagcaaaaaccgagtatttttttaccgttttggggtaggcttcttcttaacttaaagtggaagtcaaaagcaatgtcttgttattttcactgtaacgatttaagacaactgatctcaagtcgcttttcctgtttcggttcgtactcttaataatcttctattattctggagttgagatt

SEQ ID NO: 103566 - protein, 282 aa, Arabidopsis thaliana; identical to SEQ ID NO: 41915
  peptide (1)..(282): Ceres Seq. ID no. 13613032
  misc_feature (62)..(126): Pfam Name: AP2 domain Pfam Description: AP2 domain
  misc_feature (39)..(282): Homolog of NCBI NO: 15231110 NR Description: ethylene responsive element binding factor 7 [Arabidopsis thaliana] >gi|8467962|dbj|BAA96653.1| ERF factor 7 [Arabidopsis thaliana] >gi|9294548|dbj|BAB02811.1|
  misc_feature (39)..(227): Homolog of NCBI NO: 15223609 NR Description: ethylene responsive element binding factor 3 [Arabidopsis thaliana] >gi|7531109|sp|O80339|ERF3_ARATH Ethylene element binding factor 3 (AtERF3) >gi|25453551|pir||T52011
  misc_feature (148)..(282): Homolog of NCBI NO: 15223609 NR Description: ethylene responsive element binding factor 3 [Arabidopsis thaliana] >gi|7531109|sp|O80339|ERF3_ARATH Ethylene element binding factor 3 (AtERF3) >gi|25453551|pir||T52011
  misc_feature (174)..(282): Homolog of NCBI NO: 32488388 NR Description: OSJNBa0043A12.18 [Oryza sativa (japonica
  misc_feature (63)..(146): Homolog of NCBI NO: 32488388 NR Description: OSJNBa0043A12.18 [Oryza sativa (japonica
  misc_feature (39)..(261): Homolog of NCBI NO: 4587373 NR Description: ethylene responsive element binding factor
  misc_feature (50)..(261): Homolog of NCBI NO: 15232526 NR Description: ethylene responsive element binding factor 4 [Arabidopsis thaliana] >gi|7531110|sp|O80340|ERF4_ARATH Ethylene element binding factor 4 (AtERF4) >gi|25453552|pir||T52019
  misc_feature (50)..(121): Homolog of NCBI NO: 4099921 NR Description: EREBP-3 homolog [Stylosanthes hamata]
  misc_feature (50)..(140): Homolog of NCBI NO: 4099914 NR Description: ethylene-responsive element binding protein
  misc_feature (57)..(261): Homolog of NCBI NO: 38345793 NR Description: OSJNBa0085I10.10 [Oryza sativa (japonica

SEQ ID NO: 103567 - protein, 244 aa, Arabidopsis thaliana; identical to SEQ ID NO: 41916
  peptide (1)..(244): Ceres Seq. ID no. 13613033
  misc_feature (24)..(88): Pfam Name: AP2 domain Pfam Description: AP2 domain
  misc_feature (1)..(244): Homolog of NCBI NO: 15231110 NR Description: ethylene responsive element binding factor 7 [Arabidopsis thaliana] >gi|8467962|dbj|BAA96653.1| ERF factor 7 [Arabidopsis thaliana] >gi|9294548|dbj|BAB02811.1|
  misc_feature (1)..(189): Homolog of NCBI NO: 15223609 NR Description: ethylene responsive element binding factor 3 [Arabidopsis thaliana] >gi|7531109|sp|O80339|ERF3_ARATH Ethylene element binding factor 3 (AtERF3) >gi|25453551|pir||T52011
  misc_feature (110)..(244): Homolog of NCBI NO: 15223609 NR Description: ethylene responsive element binding factor 3 [Arabidopsis thaliana] >gi|7531109|sp|O80339|ERF3_ARATH Ethylene element binding factor 3 (AtERF3) >gi|25453551|pir||T52011
  misc_feature (136)..(244): Homolog of NCBI NO: 32488388 NR Description: OSJNBa0043A12.18 [Oryza sativa (japonica
  misc_feature (25)..(108): Homolog of NCBI NO: 32488388 NR Description: OSJNBa0043A12.18 [Oryza sativa (japonica
  misc_feature (1)..(223): Homolog of NCBI NO: 4587373 NR Description: ethylene responsive element binding factor
  misc_feature (12)..(223): Homolog of NCBI NO: 15232526 NR Description: ethylene responsive element binding factor 4 [Arabidopsis thaliana] >gi|7531110|sp|O80340|ERF4_ARATH Ethylene element binding factor 4 (AtERF4) >gi|25453552|pir||T52019
  misc_feature (12)..(83): Homolog of NCBI NO: 4099921 NR Description: EREBP-3 homolog [Stylosanthes hamata]
  misc_feature (12)..(102): Homolog of NCBI NO: 4099914 NR Description: ethylene-responsive element binding protein
  misc_feature (19)..(223): Homolog of NCBI NO: 38345793 NR Description: OSJNBa0085I10.10 [Oryza sativa (japonica

SEQ ID NO: 103568 - DNA, 1666 bp, Arabidopsis thaliana
  misc_feature (1)..(1666): Ceres Seq. ID no. 13613034
  misc_feature: MA Experiment ID: 20000227 Result: Up-regulated in Transcription
  misc_feature: MA Experiment 20000227 PARAMETER Experiment Name: At_Root-Tips-vs-Tops_P Parameter: Tissue Value: Root Tips vs. Root Tops
  misc_feature: MA Experiment ID: 20001247 Result: Down-regulated in Transcription
  misc_feature: MA Experiment 20001247 PARAMETER Experiment Name: At_Far-red-induction_P Parameter: Age (day) Value: 7
  misc_feature: MA Experiment 20001247 PARAMETER Experiment Name: At_Far-red-induction_P Parameter: Light Value: Far-red vs. White
  misc_feature: MA Experiment 20001247 PARAMETER Experiment Name: At_Far-red-induction_P Parameter: Organism Value: A. thaliana
  misc_feature: MA Experiment 20001247 PARAMETER Experiment Name: At_Far-red-induction_P Parameter: Plant Line Value: Columbia
  misc_feature: MA Experiment 20001247 PARAMETER Experiment Name: At_Far-red-induction_P Parameter: Timepoint (hr) Value: 1
  misc_feature: MA Experiment 20001247 PARAMETER Experiment Name: At_Far-red-induction_P Parameter: Tissue Value: Whole Plant
  misc_feature: MA Experiment ID: 20001451 Result: Down-regulated in Transcription
  misc_feature: MA Experiment 20001451 PARAMETER Experiment Name: At_Far-red-induction_P Parameter: Age (day) Value: 7
  misc_feature: MA Experiment 20001451 PARAMETER Experiment Name: At_Far-red-induction_P Parameter: Light Value: Far-red vs. White
  misc_feature: MA Experiment 20001451 PARAMETER Experiment Name: At_Far-red-induction_P Parameter: Organism Value: A. thaliana
  misc_feature: MA Experiment 20001451 PARAMETER Experiment Name: At_Far-red-induction_P Parameter: Plant Line Value: Columbia
  misc_feature: MA Experiment 20001451 PARAMETER Experiment Name: At_Far-red-induction_P Parameter: Timepoint (hr) Value: 24
  misc_feature: MA Experiment 20001451 PARAMETER Experiment Name: At_Far-red-induction_P Parameter: Tissue Value: Whole Plant
agtttcctttccttagtaaaaccctacatttctccgcccgcctttgatttctccccggccgttcccgccgccggtctccgatttaaccaggattgagtctaattccttctttttgtgctcattgctgtcggattctctaccggcgttacatcgaccagccagactcttccccatttgactgctttactgattcaatcgctcttttagattctggaagttgtgactcagtatctccccttcaacgaattagcatcctgcgcaagaatgtctattgcatcatcacttacttcagccacactttgcggcgcctcagtttttcctaaagcattagcctgcagctctgagttccctatcaatcttcccagcccttttgaaagttcaaagatttgtttgacttcgtttcctgcctctagggatctcaagaaaaatgctactttgaatctgactcgaaatgttggtccagtcaggtgtcatgctatgcaagctgggacgagggagttgaagaaatttgaacttagtgatgtgattgaagggaaacagtttgatagagagatgctaagcgctatattcgatgttgcacgcgaaatggaaaagatagaaaagagctcttcacaaagtgaaatcctcaagggttatttaatggctaccctcttttatgagccttctacccgtaccaggctttcatttgaatctgctatgaaacgccttggaggtgaagtcttaactactgagaacgctagagagttttcgtctgccgcgaaaggggaaacacttgaagacacaataagaacagtggagggttattcagatataattgtgatgcgacattttgaaagcggtgctgcaagaaaagctgcagctactgccaatatacctgtcattaatgcaggtgatggtcctggagagcatcctactcaggctctattggacgtctataccatccaaagtgaaattggaaaattagatggcatcagtgtagccttagttggagaccttgccaacggaaggactgtgcggtctcttgcatacttgcttgccaagttcaaagacgtgaagatctactttgtttcccctgaaattgtgaaaatgaaggatgatataaaagactatttgacatcaagcggggttgaatgggaagaaagttcagatttaatggaagtagcatccaagtgtgatgtagtttatcaaacacgaatccaaagagagaggtttggagaaaggctggacctttacgaagcagctcgtgggaagtatatcgtagacaaggatctgttaggagtgatgcagaaaaaagctattatcatgcatcctttaccgagattggatgaaatcaccgcagatgttgatgctgatccaagagctgcctacttcagacaagcaaagaacggtttgttcattagaatggctcttctaaagctactgcttgtcggttggtgattggatagttcatggtcgttaagttaaatcctttaatggactgattctcaagcctaccatgagctcaaggaatctgcaataataaaatccgaagctttagtgatttttgagtgttaagcacaaaagctgtgatcttgatgttaattaaaagaaggatctgttggtttgttggttaaaagactgatatgaggaagagttgttgaacttaatgaataaattgatttgagct

SEQ ID NO: 103569 - protein, 390 aa, Arabidopsis thaliana
  peptide (1)..(390): Ceres Seq. ID no. 13613035
  misc_feature (233)..(387): Pfam Name: Aspartate/ornithine carbamoyltransferase, Pfam Description: Aspartate/ornithine carbamoyltransferase,
  misc_feature (1)..(390): Homolog of NCBI NO: 15231112 NR Description: aspartate carbamoyltransferase precursor transcarbamylase) [Arabidopsis thaliana] Aspartate carbamoyltransferase, chloroplast precursor (Aspartate
  misc_feature (1)..(390): Homolog of NCBI NO: 1076293 NR Description: aspartate carbamoyltransferase (EC 2.1.3.2) - thaliana >gi|443820|emb|CAA50687.1| aspartate
  misc_feature (1)..(390): Homolog of NCBI NO: 15215706 NR Description: AT3g20330/MQC12_8 [Arabidopsis thaliana]
  misc_feature (49)..(390): Homolog of NCBI NO: 21535795 NR Description: aspartate carbamoyltransferase [Solanum tuberosum]
  misc_feature (1)..(390): Homolog of NCBI NO: 3914503 NR Description: Aspartate carbamoyltransferase 2, chloroplast (Aspartate transcarbamylase 2) (ATCase 2) >gi|7433605|pir||T10181
  misc_feature (1)..(390): Homolog of NCBI NO: 3914501 NR Description: Aspartate carbamoyltransferase 3, chloroplast (Aspartate transcarbamylase 3) (ATCase 3) >gi|7433584|pir||T06425
  misc_feature (1)..(390): Homolog of NCBI NO: 3914502 NR Description: Aspartate carbamoyltransferase 1, chloroplast (Aspartate transcarbamylase 1) (ATCase 1) >gi|7433585|pir||T06484
  misc_feature (65)..(389): Homolog of NCBI NO: 9453916 NR Description: aspartate carbamoyl transferase [Oryza sativa
  misc_feature (123)..(390): Homolog of NCBI NO: 479713 NR Description: aspartate carbamoyltransferase (EC 2.1.3.2) -
  misc_feature (123)..(390): Homolog of NCBI NO: 397385 NR Description: aspartate carbamoyltransferase [Lycopersicon
MSIASSLTSATLCGASVFPKALACSSEFPINLPSPFESSKICLTSFPASRDLKKNATLNLTRNVGPVRCHAMQAGTRELKKFELSDVIEGKQFDREMLSAIFDVAREMEKIEKSSSQSEILKGYLMATLFYEPSTRTRLSFESAMKRLGGEVLTTENAREFSSAAKGETLEDTIRTVEGYSDIIVMRHFESGAARKAAATANIPVINAGDGPGEHPTQALLDVYTIQSEIGKLDGISVALVGDLANGRTVRSLAYLLAKFKDVKIYFVSPEIVKMKDDIKDYLTSSGVEWEESSDLMEVASKCDVVYQTRIQRERFGERLDLYEAARGKYIVDKDLLGVMQKKAIIMHPLPRLDEITADVDADPRAAYFRQAKNGLFIRMALLKLLLVGW

SEQ ID NO: 103570 - protein, 319 aa, Arabidopsis thaliana
  peptide (1)..(319): Ceres Seq. ID no. 13613036
  misc_feature (162)..(316): Pfam Name: Aspartate/ornithine carbamoyltransferase, Pfam Description: Aspartate/ornithine carbamoyltransferase,
  misc_feature (1)..(319): Homolog of NCBI NO: 15231112 NR Description: aspartate carbamoyltransferase precursor transcarbamylase) [Arabidopsis thaliana] Aspartate carbamoyltransferase, chloroplast precursor (Aspartate
  misc_feature (1)..(319): Homolog of NCBI NO: 1076293 NR Description: aspartate carbamoyltransferase (EC 2.1.3.2) - thaliana >gi|443820|emb|CAA50687.1| aspartate
  misc_feature (1)..(319): Homolog of NCBI NO: 15215706 NR Description: AT3g20330/MQC12_8 [Arabidopsis thaliana]
  misc_feature (1)..(319): Homolog of NCBI NO: 21535795 NR Description: aspartate carbamoyltransferase [Solanum tuberosum]
  misc_feature (1)..(319): Homolog of NCBI NO: 3914503 NR Description: Aspartate carbamoyltransferase 2, chloroplast (Aspartate transcarbamylase 2) (ATCase 2) >gi|7433605|pir||T10181
  misc_feature (1)..(319): Homolog of NCBI NO: 3914501 NR Description: Aspartate carbamoyltransferase 3, chloroplast (Aspartate transcarbamylase 3) (ATCase 3) >gi|7433584|pir||T06425
  misc_feature (1)..(319): Homolog of NCBI NO: 3914502 NR Description: Aspartate carbamoyltransferase 1, chloroplast (Aspartate transcarbamylase 1) (ATCase 1) >gi|7433585|pir||T06484
  misc_feature (1)..(318): Homolog of NCBI NO: 9453916 NR Description: aspartate carbamoyl transferase [Oryza sativa
  misc_feature (52)..(319): Homolog of NCBI NO: 479713 NR Description: aspartate carbamoyltransferase (EC 2.1.3.2) -
  misc_feature (52)..(319): Homolog of NCBI NO: 397385 NR Description: aspartate carbamoyltransferase [Lycopersicon
MQAGTRELKKFELSDVIEGKQFDREMLSAIFDVAREMEKIEKSSSQSEILKGYLMATLFYEPSTRTRLSFESAMKRLGGEVLTTENAREFSSAAKGETLEDTIRTVEGYSDIIVMRHFESGAARKAAATANIPVINAGDGPGEHPTQALLDVYTIQSEIGKLDGISVALVGDLANGRTVRSLAYLLAKFKDVKIYFVSPEIVKMKDDIKDYLTSSGVEWEESSDLMEVASKCDVVYQTRIQRERFGERLDLYEAARGKYIVDKDLLGVMQKKAIIMHPLPRLDEITADVDADPRAAYFRQAKNGLFIRMALLKLLLVGW

SEQ ID NO: 103571 - protein, 294 aa, Arabidopsis thaliana
  peptide (1)..(294): Ceres Seq. ID no. 13613037
  misc_feature (137)..(291): Pfam Name: Aspartate/ornithine carbamoyltransferase, Pfam Description: Aspartate/ornithine carbamoyltransferase,
  misc_feature (1)..(294): Homolog of NCBI NO: 15231112 NR Description: aspartate carbamoyltransferase precursor transcarbamylase) [Arabidopsis thaliana] Aspartate carbamoyltransferase, chloroplast precursor (Aspartate
  misc_feature (1)..(294): Homolog of NCBI NO: 1076293 NR Description: aspartate carbamoyltransferase (EC 2.1.3.2) - thaliana >gi|443820|emb|CAA50687.1| aspartate
  misc_feature (1)..(294): Homolog of NCBI NO: 15215706 NR Description: AT3g20330/MQC12_8 [Arabidopsis thaliana]
  misc_feature (1)..(294): Homolog of NCBI NO: 21535795 NR Description: aspartate carbamoyltransferase [Solanum tuberosum]
  misc_feature (1)..(294): Homolog of NCBI NO: 3914503 NR Description: Aspartate carbamoyltransferase 2, chloroplast (Aspartate transcarbamylase 2) (ATCase 2) >gi|7433605|pir||T10181
  misc_feature (1)..(294): Homolog of NCBI NO: 3914501 NR Description: Aspartate carbamoyltransferase 3, chloroplast (Aspartate transcarbamylase 3) (ATCase 3) >gi|7433584|pir||T06425
  misc_feature (1)..(294): Homolog of NCBI NO: 3914502 NR Description: Aspartate carbamoyltransferase 1, chloroplast (Aspartate transcarbamylase 1) (ATCase 1) >gi|7433585|pir||T06484
  misc_feature (1)..(293): Homolog of NCBI NO: 9453916 NR Description: aspartate carbamoyl transferase [Oryza sativa
  misc_feature (27)..(294): Homolog of NCBI NO: 479713 NR Description: aspartate carbamoyltransferase (EC 2.1.3.2) -
  misc_feature (27)..(294): Homolog of NCBI NO: 397385 NR Description: aspartate carbamoyltransferase [Lycopersicon
MLSAIFDVAREMEKIEKSSSQSEILKGYLMATLFYEPSTRTRLSFESAMKRLGGEVLTTENAREFSSAAKGETLEDTIRTVEGYSDIIVMRHFESGAARKAAATANIPVINAGDGPGEHPTQALLDVYTIQSEIGKLDGISVALVGDLANGRTVRSLAYLLAKFKDVKIYFVSPEIVKMKDDIKDYLTSSGVEWEESSDLMEVASKCDVVYQTRIQRERFGERLDLYEAARGKYIVDKDLLGVMQKKAIIMHPLPRLDEITADVDADPRAAYFRQAKNGLFIRMALLKLLLVGW

SEQ ID NO: 103572 - DNA, 812 bp, Arabidopsis thaliana
  misc_feature (1)..(812): Ceres Seq. ID no. 13613069
  misc_feature: MA Experiment ID: 108434 Result: Up-regulated in Transcription
  misc_feature: MA Experiment 108434 PARAMETER Experiment Name: At_Root_Tips_cDNA_P Parameter: Tissue Value: Root Tips
  misc_feature: MA Experiment ID: 108488 Result: Up-regulated in Transcription
  misc_feature: MA Experiment ID: 108595 Result: Down-regulated in Transcription
  misc_feature: MA Experiment 108595 PARAMETER Experiment Name: At_Ler-pi_Ovule_cDNA_P Parameter: Plant Line Value: null
  misc_feature: MA Experiment ID: 20000185 Result: Down-regulated in Transcription
  misc_feature: MA Experiment 20000185 PARAMETER Experiment Name: At_Roots__P Parameter: Age (day) Value: 7 vs. 21
  misc_feature: MA Experiment 20000185 PARAMETER Experiment Name: At_Roots__P Parameter: Organism Value: A. thaliana
  misc_feature: MA Experiment 20000185 PARAMETER Experiment Name: At_Roots__P Parameter: Tissue Value: Roots vs. Whole Plant
  misc_feature: MA Experiment ID: 20000437 Result: Down-regulated in Transcription
  misc_feature: MA Experiment 20000437 PARAMETER Experiment Name: At_Drought_P Parameter: Age (day) Value: 8
  misc_feature: MA Experiment 20000437 PARAMETER Experiment Name: At_Drought_P Parameter: Organism Value: A. thaliana
  misc_feature: MA Experiment 20000437 PARAMETER Experiment Name: At_Drought_P Parameter: Plant Line Value: WS
  misc_feature: MA Experiment 20000437 PARAMETER Experiment Name: At_Drought_P Parameter: Timepoint (hr) Value: 24
  misc_feature: MA Experiment 20000437 PARAMETER Experiment Name: At_Drought_P Parameter: Tissue Value: Whole Plant
  misc_feature: MA Experiment 20000437 PARAMETER Experiment Name: At_Drought_P Parameter: Treatment Value: Drought vs. No Drought
  misc_feature: MA Experiment ID: 20000495 Result: Down-regulated in Transcription
  misc_feature: MA Experiment 20000495 PARAMETER Experiment Name: At_Guard_Cells_P Parameter: Harvest Date Value: 8/2/2002
  misc_feature: MA Experiment 20000495 PARAMETER Experiment Name: At_Guard_Cells_P Parameter: Organism Value: A. thaliana
  misc_feature: MA Experiment 20000495 PARAMETER Experiment Name: At_Guard_Cells_P Parameter: Tissue Value: Guard Cells vs. Leaves
  misc_feature: MA Experiment ID: 20000794 Result: Down-regulated in Transcription
  misc_feature: MA Experiment 20000794 PARAMETER Experiment Name: At_Petals_P Parameter: Age (day) Value: 23-25 days
  misc_feature: MA Experiment 20000794 PARAMETER Experiment Name: At_Petals_P Parameter: Plant Line Value: WS
  misc_feature: MA Experiment 20000794 PARAMETER Experiment Name: At_Petals_P Parameter: Tissue Value: Petals vs. Whole plant
  misc_feature: MA Experiment ID: 20001560 Result: Up-regulated in Transcription
  misc_feature: MA Experiment 20001560 PARAMETER Experiment Name: At_Drought_Soil_Dry_P Parameter: Age (day) Value: 28
  misc_feature: MA Experiment 20001560 PARAMETER Experiment Name: At_Drought_Soil_Dry_P Parameter: Organism Value: A. thaliana
  misc_feature: MA Experiment 20001560 PARAMETER Experiment Name: At_Drought_Soil_Dry_P Parameter: Plant Line Value: WS
  misc_feature: MA Experiment 20001560 PARAMETER Experiment Name: At_Drought_Soil_Dry_P Parameter: Post Timepoint (hr) Value: None
  misc_feature: MA Experiment 20001560 PARAMETER Experiment Name: At_Drought_Soil_Dry_P Parameter: Post-Treatment Value: None
  misc_feature: MA Experiment 20001560 PARAMETER Experiment Name: At_Drought_Soil_Dry_P Parameter: Timepoint (day) Value: 14
  misc_feature: MA Experiment 20001560 PARAMETER Experiment Name: At_Drought_Soil_Dry_P Parameter: Treatment Value: Drought vs. No Drought
  misc_feature: MA Experiment ID: 20001757 Result: Up-regulated in Transcription
  misc_feature: MA Experiment 20001757 PARAMETER Experiment Name: At_50mM_NH4NO3_L-to-H_P Parameter: Timepoint (hr) Value: 6
  misc_feature: MA Experiment 20001757 PARAMETER Experiment Name: At_50mM_NH4NO3_L-to-H_P Parameter: Tissue Value: Leaf
  misc_feature: MA Experiment 20001757 PARAMETER Experiment Name: At_50mM_NH4NO3_L-to-H_P Parameter: Treatment Value: 50mM NH4NO3 vs 100mM Mannitol
  misc_feature: MA Experiment ID: 20001905 Result: Down-regulated in Transcription
  misc_feature: MA Experiment 20001905 PARAMETER Experiment Name: At_Drought_Reproduction_P Parameter: Age (day) Value: 40
  misc_feature: MA Experiment 20001905 PARAMETER Experiment Name: At_Drought_Reproduction_P Parameter: Organism Value: A. thaliana
  misc_feature: MA Experiment 20001905 PARAMETER Experiment Name: At_Drought_Reproduction_P Parameter: Plant Line Value: WS
  misc_feature: MA Experiment 20001905 PARAMETER Experiment Name: At_Drought_Reproduction_P Parameter: Timepoint (day) Value: 10
  misc_feature: MA Experiment 20001905 PARAMETER Experiment Name: At_Drought_Reproduction_P Parameter: Tissue Value: Rosettes
  misc_feature: MA Experiment 20001905 PARAMETER Experiment Name: At_Drought_Reproduction_P Parameter: Treatment Value: Drought vs. No Drought
  misc_feature: MA Experiment ID: 20001906 Result: Down-regulated in Transcription
  misc_feature: MA Experiment 20001906 PARAMETER Experiment Name: At_Drought_Reproduction_P Parameter: Age (day) Value: 35
  misc_feature: MA Experiment 20001906 PARAMETER Experiment Name: At_Drought_Reproduction_P Parameter: Organism Value: A. thaliana
  misc_feature: MA Experiment 20001906 PARAMETER Experiment Name: At_Drought_Reproduction_P Parameter: Plant Line Value: WS
  misc_feature: MA Experiment 20001906 PARAMETER Experiment Name: At_Drought_Reproduction_P Parameter: Timepoint (day) Value: 5
  misc_feature: MA Experiment 20001906 PARAMETER Experiment Name: At_Drought_Reproduction_P Parameter: Tissue Value: Siliques
  misc_feature: MA Experiment 20001906 PARAMETER Experiment Name: At_Drought_Reproduction_P Parameter: Treatment Value: Drought vs. No Drought
  misc_feature: MA Experiment ID: 20001908 Result: Down-regulated in Transcription
  misc_feature: MA Experiment 20001908 PARAMETER Experiment Name: At_Drought_Reproduction_P Parameter: Age (day) Value: 40
  misc_feature: MA Experiment 20001908 PARAMETER Experiment Name: At_Drought_Reproduction_P Parameter: Organism Value: A. thaliana
  misc_feature: MA Experiment 20001908 PARAMETER Experiment Name: At_Drought_Reproduction_P Parameter: Plant Line Value: WS
  misc_feature: MA Experiment 20001908 PARAMETER Experiment Name: At_Drought_Reproduction_P Parameter: Timepoint (day) Value: 10
  misc_feature: MA Experiment 20001908 PARAMETER Experiment Name: At_Drought_Reproduction_P Parameter: Tissue Value: Siliques
  misc_feature: MA Experiment 20001908 PARAMETER Experiment Name: At_Drought_Reproduction_P Parameter: Treatment Value: Drought vs. No Drought
  misc_feature: MA Experiment ID: 20001911 Result: Down-regulated in Transcription
  misc_feature: MA Experiment 20001911 PARAMETER Experiment Name: At_Drought_Reproduction_P Parameter: Age (day) Value: 40
  misc_feature: MA Experiment 20001911 PARAMETER Experiment Name: At_Drought_Reproduction_P Parameter: Organism Value: A. thaliana
  misc_feature: MA Experiment 20001911 PARAMETER Experiment Name: At_Drought_Reproduction_P Parameter: Plant Line Value: WS
  misc_feature: MA Experiment 20001911 PARAMETER Experiment Name: At_Drought_Reproduction_P Parameter: Timepoint (day) Value: 10
  misc_feature: MA Experiment 20001911 PARAMETER Experiment Name: At_Drought_Reproduction_P Parameter: Tissue Value: Flowers
  misc_feature: MA Experiment 20001911 PARAMETER Experiment Name: At_Drought_Reproduction_P Parameter: Treatment Value: Drought vs. No Drought
ataatgtgagaaaagagcaaaacacaaaaatgaaaaaaccttcttctcttgtaactcgcacaaccttatcgagtgaaagaagattgggtcagtagtgaaaaatggcgtcgattgcagcttcttctacctttcactcgttttgcagaaccaaaagccctaatctttcttcgacccaccttcttcctttgtcgaaaaacctcaactttcggaccagagctatcggaaatagccgcaattgcagttttgctgggtttataaaacaaaatcgccttggattgaggaagctttcgtctattggagaaggaggagaaggtgtcgctgtcgcagaggagcaaccgcaagagactgtctctgttcctgtctctccttcagacatgctcaccatgtttttccaggctgatggaactttgaacgaagcagctattcctaatgtgacaagggccttacaggatattgatggagtttccaatttaaaggttcaggtttctgaaggtgttgccgtcgttgagcttttgaagcaaacaacggttcaagcaacaggagtggcgtcaaacttggtggagactatacaaggagctggatttaagttacagactttgaatctgagttttgaagatgacgatgaggttcttgtctagtgaaatcatccttttcctccattttgtgattaaagaaactcataatgttcaattctagggataatttctttcatttgttcctctaaagaaaacaaatgtggtaactttttttagaaagtgggaattaatgttttctttgttgaaataaaagagaaatggaaaatatctatattg

SEQ ID NO: 103573 - protein, 178 aa, Arabidopsis thaliana; identical to SEQ ID NO: 34914
  peptide (1)..(178): Ceres Seq. ID no. 13613070
  misc_feature (1)..(178): Homolog of NCBI NO: 18417512 NR Description: heavy-metal-associated domain-containing protein thaliana] >gi|14517526|gb|AAK62653.1| AT5g14910/F2G14_30 thaliana] >gi|15810113|gb|AAL06982.1| AT5g14910/F2G14_30
  misc_feature (1)..(178): Homolog of NCBI NO: 11346179 NR Description: hypothetical protein F2G14_30 - Arabidopsis >gi|9755658|emb|CAC01810.1| putative protein [Arabidopsis

SEQ ID NO: 103574 - DNA, 1441 bp, Arabidopsis thaliana
  misc_feature (1)..(1441): Ceres Seq. ID no. 13613078
  misc_feature: MA Experiment ID: 108434 Result: Up-regulated in Transcription
  misc_feature: MA Experiment 108434 PARAMETER Experiment Name: At_Root_Tips_cDNA_P Parameter: Tissue Value: Root Tips
  misc_feature: MA Experiment ID: 108462 Result: Down-regulated in Transcription
  misc_feature: MA Experiment 108462 PARAMETER Experiment Name: At_Germinating_Seeds_cDNA_P Parameter: Age (day) Value: 2 vs. 0
  misc_feature: MA Experiment 108462 PARAMETER Experiment Name: At_Germinating_Seeds_cDNA_P Parameter: Tissue Value: Germinating Seeds
  misc_feature: MA Experiment ID: 108463 Result: Down-regulated in Transcription
  misc_feature: MA Experiment 108463 PARAMETER Experiment Name: At_Germinating_Seeds_cDNA_P Parameter: Age (day) Value: 3 vs. 0
  misc_feature: MA Experiment 108463 PARAMETER Experiment Name: At_Germinating_Seeds_cDNA_P Parameter: Tissue Value: Germinating Seeds
  misc_feature: MA Experiment ID: 108464 Result: Down-regulated in Transcription
  misc_feature: MA Experiment 108464 PARAMETER Experiment Name: At_Germinating_Seeds_cDNA_P Parameter: Age (day) Value: 4 vs. 0
  misc_feature: MA Experiment 108464 PARAMETER Experiment Name: At_Germinating_Seeds_cDNA_P Parameter: Tissue Value: Germinating Seeds
  misc_feature: MA Experiment ID: 20000173 Result: Up-regulated in Transcription
  misc_feature: MA Experiment 20000173 PARAMETER Experiment Name: At_42deg_Heat_P Parameter: Age (day) Value: 14
  misc_feature: MA Experiment 20000173 PARAMETER Experiment Name: At_42deg_Heat_P Parameter: Organism Value: A. thaliana
  misc_feature: MA Experiment 20000173 PARAMETER Experiment Name: At_42deg_Heat_P Parameter: Plant Line Value: WS
  misc_feature: MA Experiment 20000173 PARAMETER Experiment Name: At_42deg_Heat_P Parameter: Temperature (deg C) Value: 42 vs. 22
  misc_feature: MA Experiment 20000173 PARAMETER Experiment Name: At_42deg_Heat_P Parameter: Timepoint (hr) Value: 6
  misc_feature: MA Experiment 20000173 PARAMETER Experiment Name: At_42deg_Heat_P Parameter: Tissue Value: Aerial
  misc_feature: MA Experiment ID: 20000224 Result: Down-regulated in Transcription
  misc_feature: MA Experiment ID: 20000227 Result: Up-regulated in Transcription
  misc_feature: MA Experiment 20000227 PARAMETER Experiment Name: At_Root-Tips-vs-Tops_P Parameter: Tissue Value: Root Tips vs. Root Tops
  misc_feature: MA Experiment ID: 20000437 Result: Down-regulated in Transcription
  misc_feature: MA Experiment 20000437 PARAMETER Experiment Name: At_Drought_P Parameter: Age (day) Value: 8
  misc_feature: MA Experiment 20000437 PARAMETER Experiment Name: At_Drought_P Parameter: Organism Value: A. thaliana
  misc_feature: MA Experiment 20000437 PARAMETER Experiment Name: At_Drought_P Parameter: Plant Line Value: WS
  misc_feature: MA Experiment 20000437 PARAMETER Experiment Name: At_Drought_P Parameter: Timepoint (hr) Value: 24
  misc_feature: MA Experiment 20000437 PARAMETER Experiment Name: At_Drought_P Parameter: Tissue Value: Whole Plant
  misc_feature: MA Experiment 20000437 PARAMETER Experiment Name: At_Drought_P Parameter: Treatment Value: Drought vs. No Drought
  misc_feature: MA Experiment ID: 20000794 Result: Down-regulated in Transcription
  misc_feature: MA Experiment 20000794 PARAMETER Experiment Name: At_Petals_P Parameter: Age (day) Value: 23-25 days
  misc_feature: MA Experiment 20000794 PARAMETER Experiment Name: At_Petals_P Parameter: Plant Line Value: WS
  misc_feature: MA Experiment 20000794 PARAMETER Experiment Name: At_Petals_P Parameter: Tissue Value: Petals vs. Whole plant
  misc_feature: MA Experiment ID: 20001557 Result: Up-regulated in Transcription
  misc_feature: MA Experiment 20001557 PARAMETER Experiment Name: At_Drought_Soil_Dry_P Parameter: Age (day) Value: 27
  misc_feature: MA Experiment 20001557 PARAMETER Experiment Name: At_Drought_Soil_Dry_P Parameter: Organism Value: A. thaliana
  misc_feature: MA Experiment 20001557 PARAMETER Experiment Name: At_Drought_Soil_Dry_P Parameter: Plant Line Value: WS
  misc_feature: MA Experiment 20001557 PARAMETER Experiment Name: At_Drought_Soil_Dry_P Parameter: Post Timepoint (hr) Value: 3
  misc_feature: MA Experiment 20001557 PARAMETER Experiment Name: At_Drought_Soil_Dry_P Parameter: Post-Treatment Value: Re-Water vs. No Drought
  misc_feature: MA Experiment 20001557 PARAMETER Experiment Name: At_Drought_Soil_Dry_P Parameter: Timepoint (day) Value: 13
  misc_feature: MA Experiment 20001557 PARAMETER Experiment Name: At_Drought_Soil_Dry_P Parameter: Treatment Value: Drought vs. No Drought
  misc_feature: MA Experiment ID: 20001558 Result: Up-regulated in Transcription
  misc_feature: MA Experiment 20001558 PARAMETER Experiment Name: At_Drought_Soil_Dry_P Parameter: Age (day) Value: 27
  misc_feature: MA Experiment 20001558 PARAMETER Experiment Name: At_Drought_Soil_Dry_P Parameter: Organism Value: A. thaliana
  misc_feature: MA Experiment 20001558 PARAMETER Experiment Name: At_Drought_Soil_Dry_P Parameter: Plant Line Value: WS
  misc_feature: MA Experiment 20001558 PARAMETER Experiment Name: At_Drought_Soil_Dry_P Parameter: Post Timepoint (hr) Value: 6
  misc_feature: MA Experiment 20001558 PARAMETER Experiment Name: At_Drought_Soil_Dry_P Parameter: Post-Treatment Value: Re-Water vs. No Drought
  misc_feature: MA Experiment 20001558 PARAMETER Experiment Name: At_Drought_Soil_Dry_P Parameter: Timepoint (day) Value: 13
  misc_feature: MA Experiment 20001558 PARAMETER Experiment Name: At_Drought_Soil_Dry_P Parameter: Treatment Value: Drought vs. No Drought
  misc_feature: MA Experiment ID: 20001757 Result: Up-regulated in Transcription
  misc_feature: MA Experiment 20001757 PARAMETER Experiment Name: At_50mM_NH4NO3_L-to-H_P Parameter: Timepoint (hr) Value: 6
  misc_feature: MA Experiment 20001757 PARAMETER Experiment Name: At_50mM_NH4NO3_L-to-H_P Parameter: Tissue Value: Leaf
  misc_feature: MA Experiment 20001757 PARAMETER Experiment Name: At_50mM_NH4NO3_L-to-H_P Parameter: Treatment Value: 50mM NH4NO3 vs 100mM Mannitol
tctctcttgcagtcctcatcgttggagcttagaagccgtcggcacaagaagaagaagaagaagaatgtctcacaggaagtttgagcacccaagacatggttctcttggtttccttccaaggaagagagctaaccgtcacagaggaaaggtgaaggcgttccctaaggatgaccaaaccaagccttgcaagttcacagctttcatgggttacaaagctggtatgactcacattgtcagagaagtggagaaacctggatccaagcttcacaagaaggagacatgtgaggctgttaccatcattgagacacctgctatggtggttgttggagttgttgcctatgtgaagactcctagaggtttgaggtctttgaacactgtctgggcacagcatttgagtgaggaggtcaggagaaggttctacaagaactgggctaagtctaagaagaaggctttcactgggtacgctaagcagtatgacagtgaggatggcaagaagggtattcaggctcagcttgagaagatgaagaagtacgctactgtcatccgtgttttggctcacactcagatcaggaagatgaagggattgaagcagaagaaggctcacatgatggagatccagatcaatggtggtaccattgcccagaaggttgactttgcctacagtttctttgagaagcagatcccaattgaagctgtcttccagaaggatgaaatgattgatatcattggtgtgaccaagggtaagggttatgaaggtgttgttactcgttggggtgttacccgtcttcctcgtaagactcacagaggtctgcgtaaggttgcttgtattggtgcgtggcatcctgctagagtgtcctacactgttgctagggctggtcagaacggttaccatcaccgtactgagcttaacaagaagatttacaggttgggtaaggttggtactgaggcacacacagccatgactgaatatgacaggactgagaaggatgtgactccaatgggaggcttcccacactacggtattgtgaaggatgactacttgatgattaaggggtgctgtgttggtcccaagaagagagttgtaactctcagacagtcacttctcactcagacttcccgtcttgccttggaggagatcaaactcaagtttattgacaccgcctccatttttggacatggtcgcttccagacctcccttgagaagatgaggttttacaaccgtgtcacgaagtaagagttgttttatcacaattcttcttagaaagtttcatgtttggttatctgttgctacttatctcagagatgttatcctttaaacaatgttatggagttttcttttgcttttagtttgttacttttttggaagttaaaacgatttgcttctcaagttttgagactttgatgtgttctttatcatttatgaaaaaccaacctggagcat

SEQ ID NO: 103575 - protein, 410 aa, Arabidopsis thaliana; identical to SEQ ID NO: 29578
  peptide (1)..(410): Ceres Seq. ID no. 13613079
  misc_feature (71)..(364): Pfam Name: Ribosomal protein L3 Pfam Description: Ribosomal protein L3
  misc_feature (22)..(410): Homolog of NCBI NO: 15218306 NR Description: 60S ribosomal protein L3 (RPL3A) [Arabidopsis
  misc_feature (22)..(410): Homolog of NCBI NO: 23397228 NR Description: putative ribosomal protein [Arabidopsis thaliana]
  misc_feature (22)..(410): Homolog of NCBI NO: 81657 NR Description: ribosomal protein L3.e (clone ARP1), cytosolic -
  misc_feature (22)..(410): Homolog of NCBI NO: 15220533 NR Description: 60S ribosomal protein L3 (RPL3B) [Arabidopsis
  misc_feature (22)..(410): Homolog of NCBI NO: 81658 NR Description: ribosomal protein L3.e (clone ARP2), cytosolic -
  misc_feature (22)..(408): Homolog of NCBI NO: 548770 NR Description: 60S RIBOSOMAL PROTEIN L3 >gi|481228|pir||S38359
  misc_feature (22)..(405): Homolog of NCBI NO: 6688812 NR Description: L3 Ribosomal protein [Medicago sativa subsp. x
  misc_feature (22)..(410): Homolog of NCBI NO: 1350745 NR Description: 60S RIBOSOMAL PROTEIN L3 >gi|2119105|pir||JC4382
  misc_feature (22)..(410): Homolog of NCBI NO: 27769202 NR Description: Similar to ribosomal protein L3 [Xenopus laevis]
  misc_feature (22)..(410): Homolog of NCBI NO: 4506649 NR Description: ribosomal protein L3; 60S ribosomal protein L3;

SEQ ID NO: 103576 - protein, 389 aa, Arabidopsis thaliana; identical to SEQ ID NO: 29579
  peptide (1)..(389): Ceres Seq. ID no. 13613080
  misc_feature (50)..(343): Pfam Name: Ribosomal protein L3 Pfam Description: Ribosomal protein L3
  misc_feature (1)..(389): Homolog of NCBI NO: 15218306 NR Description: 60S ribosomal protein L3 (RPL3A) [Arabidopsis
  misc_feature (1)..(389): Homolog of NCBI NO: 23397228 NR Description: putative ribosomal protein [Arabidopsis thaliana]
  misc_feature (1)..(389): Homolog of NCBI NO: 81657 NR Description: ribosomal protein L3.e (clone ARP1), cytosolic -
  misc_feature (1)..(389): Homolog of NCBI NO: 15220533 NR Description: 60S ribosomal protein L3 (RPL3B) [Arabidopsis
  misc_feature (1)..(389): Homolog of NCBI NO: 81658 NR Description: ribosomal protein L3.e (clone ARP2), cytosolic -
  misc_feature (1)..(387): Homolog of NCBI NO: 548770 NR Description: 60S RIBOSOMAL PROTEIN L3 >gi|481228|pir||S38359
  misc_feature (1)..(384): Homolog of NCBI NO: 6688812 NR Description: L3 Ribosomal protein [Medicago sativa subsp. x
  misc_feature (1)..(389): Homolog of NCBI NO: 1350745 NR Description: 60S RIBOSOMAL PROTEIN L3 >gi|2119105|pir||JC4382
  misc_feature (1)..(389): Homolog of NCBI NO: 27769202 NR Description: Similar to ribosomal protein L3 [Xenopus laevis]
  misc_feature (1)..(389): Homolog of NCBI NO: 4506649 NR Description: ribosomal protein L3; 60S ribosomal protein L3;

SEQ ID NO: 103577 - protein, 343 aa, Arabidopsis thaliana; identical to SEQ ID NO: 29580
  peptide (1)..(343): Ceres Seq. ID no. 13613081
  misc_feature (4)..(297): Pfam Name: Ribosomal protein L3 Pfam Description: Ribosomal protein L3
  misc_feature (1)..(343): Homolog of NCBI NO: 15218306 NR Description: 60S ribosomal protein L3 (RPL3A) [Arabidopsis
  misc_feature (1)..(343): Homolog of NCBI NO: 23397228 NR Description: putative ribosomal protein [Arabidopsis thaliana]
  misc_feature (1)..(343): Homolog of NCBI NO: 81657 NR Description: ribosomal protein L3.e (clone ARP1), cytosolic -
  misc_feature (1)..(343): Homolog of NCBI NO: 15220533 NR Description: 60S ribosomal protein L3 (RPL3B) [Arabidopsis
  misc_feature (1)..(343): Homolog of NCBI NO: 81658 NR Description: ribosomal protein L3.e (clone ARP2), cytosolic -
  misc_feature (1)..(341): Homolog of NCBI NO: 548770 NR Description: 60S RIBOSOMAL PROTEIN L3 >gi|481228|pir||S38359
  misc_feature (1)..(338): Homolog of NCBI NO: 6688812 NR Description: L3 Ribosomal protein [Medicago sativa subsp. x
  misc_feature (1)..(343): Homolog of NCBI NO: 1350745 NR Description: 60S RIBOSOMAL PROTEIN L3 >gi|2119105|pir||JC4382
  misc_feature (1)..(343): Homolog of NCBI NO: 27769202 NR Description: Similar to ribosomal protein L3 [Xenopus laevis]
  misc_feature (1)..(343): Homolog of NCBI NO: 4506649 NR Description: ribosomal protein L3; 60S ribosomal protein L3;

SEQ ID NO: 103578 - DNA, 672 bp, Arabidopsis thaliana
  misc_feature (1)..(672): Ceres Seq. ID no. 13613082
  misc_feature: MA Experiment ID: 20000184 Result: Up-regulated in Transcription
  misc_feature: MA Experiment 20000184 PARAMETER Experiment Name: At_Shoots__P Parameter: Age (day) Value: 7
  misc_feature: MA Experiment 20000184 PARAMETER Experiment Name: At_Shoots__P Parameter: Tissue Value: Shoots vs. Whole Plant
  misc_feature: MA Experiment ID: 20000437 Result: Down-regulated in Transcription
  misc_feature: MA Experiment 20000437 PARAMETER Experiment Name: At_Drought_P Parameter: Age (day) Value: 8
  misc_feature: MA Experiment 20000437 PARAMETER Experiment Name: At_Drought_P Parameter: Organism Value: A. thaliana
  misc_feature: MA Experiment 20000437 PARAMETER Experiment Name: At_Drought_P Parameter: Plant Line Value: WS
  misc_feature: MA Experiment 20000437 PARAMETER Experiment Name: At_Drought_P Parameter: Timepoint (hr) Value: 24
  misc_feature: MA Experiment 20000437 PARAMETER Experiment Name: At_Drought_P Parameter: Tissue Value: Whole Plant
  misc_feature: MA Experiment 20000437 PARAMETER Experiment Name: At_Drought_P Parameter: Treatment Value: Drought vs. No Drought
  misc_feature: MA Experiment ID: 20000438 Result: Up-regulated in Transcription
  misc_feature: MA Experiment 20000438 PARAMETER Experiment Name: At_Shoots__P Parameter: Age (day) Value: 14
  misc_feature: MA Experiment 20000438 PARAMETER Experiment Name: At_Shoots__P Parameter: Tissue Value: Shoots vs. Whole Plant
  misc_feature: MA Experiment ID: 20000439 Result: Down-regulated in Transcription
  misc_feature: MA Experiment 20000439 PARAMETER Experiment Name: At_Roots__P Parameter: Age (day) Value: 14 vs. 21
  misc_feature: MA Experiment 20000439 PARAMETER Experiment Name: At_Roots__P Parameter: Organism Value: A. thaliana
  misc_feature: MA Experiment 20000439 PARAMETER Experiment Name: At_Roots__P Parameter: Tissue Value: Roots vs. Whole Plant
  misc_feature: MA Experiment ID: 20000527 Result: Up-regulated in Transcription
  misc_feature: MA Experiment 20000527 PARAMETER Experiment Name: At_10percent_PEG_P Parameter: Age (day) Value: 20
  misc_feature: MA Experiment 20000527 PARAMETER Experiment Name: At_10percent_PEG_P Parameter: Organism Value: A. thaliana
  misc_feature: MA Experiment 20000527 PARAMETER Experiment Name: At_10percent_PEG_P Parameter: Plant Line Value: WS
  misc_feature: MA Experiment 20000527 PARAMETER Experiment Name: At_10percent_PEG_P Parameter: Timepoint (day) Value: 20
  misc_feature: MA Experiment 20000527 PARAMETER Experiment Name: At_10percent_PEG_P Parameter: Tissue Value: Whole Plant
  misc_feature: MA Experiment 20000527 PARAMETER Experiment Name: At_10percent_PEG_P Parameter: Treatment Value: 10percent PEG vs. No Treatment
  misc_feature: MA Experiment ID: 20001248 Result: Down-regulated in Transcription
  misc_feature: MA Experiment 20001248 PARAMETER Experiment Name: At_Far-red-induction_P Parameter: Age (day) Value: 7
  misc_feature: MA Experiment 20001248 PARAMETER Experiment Name: At_Far-red-induction_P Parameter: Light Value: Far-red vs. White
  misc_feature: MA Experiment 20001248 PARAMETER Experiment Name: At_Far-red-induction_P Parameter: Organism Value: A. thaliana
  misc_feature: MA Experiment 20001248 PARAMETER Experiment Name: At_Far-red-induction_P Parameter: Plant Line Value: Columbia
  misc_feature: MA Experiment 20001248 PARAMETER Experiment Name: At_Far-red-induction_P Parameter: Timepoint (hr) Value: 4
  misc_feature: MA Experiment 20001248 PARAMETER Experiment Name: At_Far-red-induction_P Parameter: Tissue Value: Whole Plant
  misc_feature: MA Experiment ID: 20001450 Result: Down-regulated in Transcription
  misc_feature: MA Experiment 20001450 PARAMETER Experiment Name: At_Far-red-induction_P Parameter: Age (day) Value: 7
  misc_feature: MA Experiment 20001450 PARAMETER Experiment Name: At_Far-red-induction_P Parameter: Light Value: Far-red vs. White
  misc_feature: MA Experiment 20001450 PARAMETER Experiment Name: At_Far-red-induction_P Parameter: Organism Value: A. thaliana
  misc_feature: MA Experiment 20001450 PARAMETER Experiment Name: At_Far-red-induction_P Parameter: Plant Line Value: Columbia
  misc_feature: MA Experiment 20001450 PARAMETER Experiment Name: At_Far-red-induction_P Parameter: Timepoint (hr) Value: 8
  misc_feature: MA Experiment 20001450 PARAMETER Experiment Name: At_Far-red-induction_P Parameter: Tissue Value: Whole Plant
  misc_feature: MA Experiment ID: 20001451 Result: Down-regulated in Transcription
  misc_feature: MA Experiment 20001451 PARAMETER Experiment Name: At_Far-red-induction_P Parameter: Age (day) Value: 7
  misc_feature: MA Experiment 20001451 PARAMETER Experiment Name: At_Far-red-induction_P Parameter: Light Value: Far-red vs. White
  misc_feature: MA Experiment 20001451 PARAMETER Experiment Name: At_Far-red-induction_P Parameter: Organism Value: A. thaliana
  misc_feature: MA Experiment 20001451 PARAMETER Experiment Name: At_Far-red-induction_P Parameter: Plant Line Value: Columbia
  misc_feature: MA Experiment 20001451 PARAMETER Experiment Name: At_Far-red-induction_P Parameter: Timepoint (hr) Value: 24
  misc_feature: MA Experiment 20001451 PARAMETER Experiment Name: At_Far-red-induction_P Parameter: Tissue Value: Whole Plant
  misc_feature: MA Experiment ID: 20001757 Result: Up-regulated in Transcription
  misc_feature: MA Experiment 20001757 PARAMETER Experiment Name: At_50mM_NH4NO3_L-to-H_P Parameter: Timepoint (hr) Value: 6
  misc_feature: MA Experiment 20001757 PARAMETER Experiment Name: At_50mM_NH4NO3_L-to-H_P Parameter: Tissue Value: Leaf
  misc_feature: MA Experiment 20001757 PARAMETER Experiment Name: At_50mM_NH4NO3_L-to-H_P Parameter: Treatment Value: 50mM NH4NO3 vs 100mM Mannitol
gtcacatttctttaacttaaaaactctcccgtttcgccgaagcttcttcaatggcgatttctctcgccaccgcctatatctctccatgttttacaccggaatcgtctaattccgcttcaccatcacgaactctttcctccgtacgattaccttctcagattcgccgattcggaagtgttcaatcgccgtcttcgtctactcgcttcgctccactcactgtaagagcagcaaagaagcaaactttcaactcttttgatgatttgttgcagaactctgataaacctgtacttgtagacttctatgctacttggtgtggtccatgtcagcttatggtacctatactcaatgaagtgagtgaaacactgaaagatataattgcagttgtgaaaattgatactgagaagtacccaagtcttgctaacaaataccagattgaggctttgcccacattcatcttattcaaagacggcaaactctgggaccgtttcgagggtgccttgccagcgaaccaactcgttgagcgtattgagaattctttgcaagtgaaacagtaggtttgagaaaccaagaaaacttgtcatctatgaacaatctgttgtgacataagccattgttgattgtttgctcggtataatcatctacctattcatatatggcatctgccatttttct

SEQ ID NO: 103579 - protein, 167 aa, Arabidopsis thaliana
  peptide (1)..(167): Ceres Seq. ID no. 13613083
  misc_feature (1)..(167): Homolog of NCBI NO: 30693659 NR Description: thioredoxin family [Arabidopsis thaliana]
  misc_feature (57)..(167): Homolog of NCBI NO: 25405118 NR Description: hypothetical protein T10P12.4 [imported] - thaliana >gi|5080763|gb|AAD39273.1|AC007203_5 Hypothetical
  misc_feature (1)..(69): Homolog of NCBI NO: 25405118 NR Description: hypothetical protein T10P12.4 [imported] - thaliana >gi|5080763|gb|AAD39273.1|AC007203_5 Hypothetical
  misc_feature (2)..(166): Homolog of NCBI NO: 38454080 NR Description: At1g76760 [Arabidopsis thaliana]
  misc_feature (19)..(166): Homolog of NCBI NO: 15223728 NR Description: thioredoxin family [Arabidopsis thaliana]
  misc_feature (60)..(165): Homolog of NCBI NO: 23039598 NR Description: hypothetical protein [Trichodesmium erythraeum
  misc_feature (59)..(163): Homolog of NCBI NO: 23123943 NR Description: hypothetical protein [Nostoc punctiforme]
  misc_feature (61)..(161): Homolog of NCBI NO: 17229385 NR Description: thioredoxin [Nostoc sp. PCC 7120]
  misc_feature (59)..(159): Homolog of NCBI NO: 27763679 NR Description: thioredoxin y [Chlamydomonas reinhardtii]
  misc_feature (59)..(160): Homolog of NCBI NO: 16331440 NR Description: thioredoxin M [Synechocystis sp. PCC 6803]
MAISLATAYISPCFTPESSNSASPSRTLSSVRLPSQIRRFGSVQSPSSSTRFAPLTVRAAKKQTFNSFDDLLQNSDKPVLVDFYATWCGPCQLMVPILNEVSETLKDIIAVVKIDTEKYPSLANKYQIEALPTFILFKDGKLWDRFEGALPANQLVERIENSLQVKQ

SEQ ID NO: 103580 - DNA, 839 bp, Arabidopsis thaliana
  misc_feature (1)..(839): Ceres Seq. ID no. 13613106
  misc_feature: MA Experiment ID: 108434 Result: Up-regulated in Transcription
  misc_feature: MA Experiment 108434 PARAMETER Experiment Name: At_Root_Tips_cDNA_P Parameter: Tissue Value: Root Tips
  misc_feature: MA Experiment ID: 108462 Result: Down-regulated in Transcription
  misc_feature: MA Experiment 108462 PARAMETER Experiment Name: At_Germinating_Seeds_cDNA_P Parameter: Age (day) Value: 2 vs. 0
  misc_feature: MA Experiment 108462 PARAMETER Experiment Name: At_Germinating_Seeds_cDNA_P Parameter: Tissue Value: Germinating Seeds
  misc_feature: MA Experiment ID: 108463 Result: Down-regulated in Transcription
  misc_feature: MA Experiment 108463 PARAMETER Experiment Name: At_Germinating_Seeds_cDNA_P Parameter: Age (day) Value: 3 vs. 0
  misc_feature: MA Experiment 108463 PARAMETER Experiment Name: At_Germinating_Seeds_cDNA_P Parameter: Tissue Value: Germinating Seeds
  misc_feature: MA Experiment ID: 108576 Result: Up-regulated in Transcription
  misc_feature: MA Experiment 108576 PARAMETER Experiment Name: At_42deg_Heat_cDNA_P Parameter: Temperature (deg C) Value: 42 vs. 22
  misc_feature: MA Experiment 108576 PARAMETER Experiment Name: At_42deg_Heat_cDNA_P Parameter: Timepoint (hr) Value: 1
  misc_feature: MA Experiment 108576 PARAMETER Experiment Name: At_42deg_Heat_cDNA_P Parameter: Tissue Value: Aerial
  misc_feature: MA Experiment ID: 20000234 Result: Up-regulated in Transcription
  misc_feature: MA Experiment 20000234 PARAMETER Experiment Name: At_Siliques_P Parameter: Age (day) Value: 21
  misc_feature: MA Experiment 20000234 PARAMETER Experiment Name: At_Siliques_P Parameter: Organism Value: A. thaliana
  misc_feature: MA Experiment 20000234 PARAMETER Experiment Name: At_Siliques_P Parameter: Plant Line Value: WS
  misc_feature: MA Experiment 20000234 PARAMETER Experiment Name: At_Siliques_P Parameter: Tissue Value: Less Than 5mm Siliques vs. Whole Plant
  misc_feature: MA Experiment ID: 20001558 Result: Up-regulated in Transcription
  misc_feature: MA Experiment 20001558 PARAMETER Experiment Name: At_Drought_Soil_Dry_P Parameter: Age (day) Value: 27
  misc_feature: MA Experiment 20001558 PARAMETER Experiment Name: At_Drought_Soil_Dry_P Parameter: Organism Value: A. thaliana
  misc_feature: MA Experiment 20001558 PARAMETER Experiment Name: At_Drought_Soil_Dry_P Parameter: Plant Line Value: WS
  misc_feature: MA Experiment 20001558 PARAMETER Experiment Name: At_Drought_Soil_Dry_P Parameter: Post Timepoint (hr) Value: 6
  misc_feature: MA Experiment 20001558 PARAMETER Experiment Name: At_Drought_Soil_Dry_P Parameter: Post-Treatment Value: Re-Water vs. No Drought
  misc_feature: MA Experiment 20001558 PARAMETER Experiment Name: At_Drought_Soil_Dry_P Parameter: Timepoint (day) Value: 13
  misc_feature: MA Experiment 20001558 PARAMETER Experiment Name: At_Drought_Soil_Dry_P Parameter: Treatment Value: Drought vs. No Drought
  misc_feature: MA Experiment ID: 20001560 Result: Up-regulated in Transcription
  misc_feature: MA Experiment 20001560 PARAMETER Experiment Name: At_Drought_Soil_Dry_P Parameter: Age (day) Value: 28
  misc_feature: MA Experiment 20001560 PARAMETER Experiment Name: At_Drought_Soil_Dry_P Parameter: Organism Value: A. thaliana
  misc_feature: MA Experiment 20001560 PARAMETER Experiment Name: At_Drought_Soil_Dry_P Parameter: Plant Line Value: WS
  misc_feature: MA Experiment 20001560 PARAMETER Experiment Name: At_Drought_Soil_Dry_P Parameter: Post Timepoint (hr) Value: None
  misc_feature: MA Experiment 20001560 PARAMETER Experiment Name: At_Drought_Soil_Dry_P Parameter: Post-Treatment Value: None
  misc_feature: MA Experiment 20001560 PARAMETER Experiment Name: At_Drought_Soil_Dry_P Parameter: Timepoint (day) Value: 14
  misc_feature: MA Experiment 20001560 PARAMETER Experiment Name: At_Drought_Soil_Dry_P Parameter: Treatment Value: Drought vs. No Drought
  misc_feature: MA Experiment ID: 20001757 Result: Up-regulated in Transcription
  misc_feature: MA Experiment 20001757 PARAMETER Experiment Name: At_50mM_NH4NO3_L-to-H_P Parameter: Timepoint (hr) Value: 6
  misc_feature: MA Experiment 20001757 PARAMETER Experiment Name: At_50mM_NH4NO3_L-to-H_P Parameter: Tissue Value: Leaf
  misc_feature: MA Experiment 20001757 PARAMETER Experiment Name: At_50mM_NH4NO3_L-to-H_P Parameter: Treatment Value: 50mM NH4NO3 vs 100mM Mannitol
tttagggtttttttcagcggagattagcttcagtatccattggcggattagcctcagagtgctctgatcaaggttttggaggttgcatttgagtgaggagatgttttcggctcagcataagattcataaggagaagggtgtggaactttctgaattggatgagcaagttgctcaggctttctttgatttggagaacaccaatcaagaattgaaaagtgagctgaaggatttatacgtcaactcggctgttcaagttgatatctctggaggacgcaaggcaattgttgtcaatgttccttacagactgagaaaagcttaccggaaaatccatgttaggcttgttcgtgaacttgagaagaagttcagtggaaaggatgtgatcctcattgctacaaggaggattgtgaggccgccaaagaagggttcagcggcaaagagaccacgcaaccgtactctgacctcagtccatgaagctattcttgatgatgtggtcttacctgcagagattgttgggaagcgcacaaggtacagactcgacggtaccaaaatcatgaaggtcttcttggacccaaaggaaaggaacaacacagagtacaaggttgaggctttctctgcggtttacaagaagctcactggcaaagatgtcgtctttgagtttcccatcactgaagcctaagagatgaaatgagacgtagagaatctgttatgatctcagatattttaatcttctttttcgtctactttctttaatgtggcaagacattggttttacttctgaaaatctgtacaatggtcgagttttctcaaaagttttgagaaactttttgatgttggtgttt

SEQ ID NO: 103581 - protein, 191 aa, Arabidopsis thaliana; identical to SEQ ID NO: 21129
  peptide (1)..(191): Ceres Seq. ID no. 13613107
  misc_feature (4)..(191): Pfam Name: Ribosomal protein S7e Pfam Description: Ribosomal protein S7e
  misc_feature (1)..(191): Homolog of NCBI NO: 15221972 NR Description: 40S ribosomal protein S7 (RPS7A) [Arabidopsis >gi|30694420|ref|NP_849786.1| 40S ribosomal protein S7 (RPS7A) thaliana] >gi|25294579|pir||A96526 probable 40S ribosomal protein
  misc_feature (1)..(190): Homolog of NCBI NO: 20139962 NR Description: 40S ribosomal protein S7
  misc_feature (1)..(191): Homolog of NCBI NO: 15232926 NR Description: 40S ribosomal protein S7 (RPS7B) [Arabidopsis >gi|30678607|ref|NP_850504.1| 40S ribosomal protein S7 (RPS7B) thaliana] >gi|6957719|gb|AAF32463.1| putative 40S ribosomal
  misc_feature (1)..(188): Homolog of NCBI NO: 21592413 NR Description: 40S ribosomal protein S7-like [Arabidopsis
  misc_feature (1)..(190): Homolog of NCBI NO: 22671664 NR Description: ribosomal protein S7 [Oryza sativa (japonica
  misc_feature (1)..(188): Homolog of NCBI NO: 15237278 NR Description: 40S ribosomal protein S7 (RPS7C) [Arabidopsis
  misc_feature (1)..(190): Homolog of NCBI NO: 20139964 NR Description: 40S ribosomal protein S7 unknown [Avicennia marina] >gi|4128206|gb|AAD03501.1| 40S
  misc_feature (1)..(190): Homolog of NCBI NO: 4588906 NR Description: ribosomal protein S7 [Secale cereale]
  misc_feature (1)..(190): Homolog of NCBI NO: 14787424 NR Description: Ribosomal protein S7 [Hordeum vulgare subsp.
  misc_feature (17)..(191): Homolog of NCBI NO: 32403462 NR Description: 40S RIBOSOMAL PROTEIN S7 [Neurospora crassa]

SEQ ID NO: 103582 - DNA, 1601 bp, Arabidopsis thaliana
  misc_feature (1)..(1601): Ceres Seq. ID no. 13613108
  misc_feature: MA Experiment ID: 108434 Result: Down-regulated in Transcription
  misc_feature: MA Experiment 108434 PARAMETER Experiment Name: At_Root_Tips_cDNA_P Parameter: Tissue Value: Root Tips
  misc_feature: MA Experiment ID: 108579 Result: Up-regulated in Transcription
  misc_feature: MA Experiment 108579 PARAMETER Experiment Name: At_4deg_Cold_cDNA_P Parameter: Temperature (deg C) Value: 4 vs. 22
  misc_feature: MA Experiment 108579 PARAMETER Experiment Name: At_4deg_Cold_cDNA_P Parameter: Timepoint (hr) Value: 6
  misc_feature: MA Experiment 108579 PARAMETER Experiment Name: At_4deg_Cold_cDNA_P Parameter: Tissue Value: Aerial
  misc_feature: MA Experiment ID: 108595 Result: Down-regulated in Transcription
  misc_feature: MA Experiment 108595 PARAMETER Experiment Name: At_Ler-pi_Ovule_cDNA_P Parameter: Plant Line Value: null
  misc_feature: MA Experiment ID: 20000185 Result: Up-regulated in Transcription
  misc_feature: MA Experiment 20000185 PARAMETER Experiment Name: At_Roots__P Parameter: Age (day) Value: 7 vs. 21
  misc_feature: MA Experiment 20000185 PARAMETER Experiment Name: At_Roots__P Parameter: Organism Value: A. thaliana
  misc_feature: MA Experiment 20000185 PARAMETER Experiment Name: At_Roots__P Parameter: Tissue Value: Roots vs. Whole Plant
  misc_feature: MA Experiment ID: 20000224 Result: Up-regulated in Transcription
  misc_feature: MA Experiment ID: 20000439 Result: Up-regulated in Transcription
  misc_feature: MA Experiment 20000439 PARAMETER Experiment Name: At_Roots__P Parameter: Age (day) Value: 14 vs. 21
  misc_feature: MA Experiment 20000439 PARAMETER Experiment Name: At_Roots__P Parameter: Organism Value: A. thaliana
  misc_feature: MA Experiment 20000439 PARAMETER Experiment Name: At_Roots__P Parameter: Tissue Value: Roots vs. Whole Plant
  misc_feature: MA Experiment ID: 20000451 Result: Up-regulated in Transcription
  misc_feature: MA Experiment 20000451 PARAMETER Experiment Name: At_CS6879_Shoots-Roots_P Parameter: Age (day) Value: 14
  misc_feature: MA Experiment 20000451 PARAMETER Experiment Name: At_CS6879_Shoots-Roots_P Parameter: Organism Value: A. thaliana
  misc_feature: MA Experiment 20000451 PARAMETER Experiment Name: At_CS6879_Shoots-Roots_P Parameter: Plant Line Value: CS6879 vs. WS
  misc_feature: MA Experiment 20000451 PARAMETER Experiment Name: At_CS6879_Shoots-Roots_P Parameter: Tissue Value: Roots
  misc_feature: MA Experiment ID: 20001451 Result: Down-regulated in Transcription
  misc_feature: MA Experiment 20001451 PARAMETER Experiment Name: At_Far-red-induction_P Parameter: Age (day) Value: 7
  misc_feature: MA Experiment 20001451 PARAMETER Experiment Name: At_Far-red-induction_P Parameter: Light Value: Far-red vs. White
  misc_feature: MA Experiment 20001451 PARAMETER Experiment Name: At_Far-red-induction_P Parameter: Organism Value: A. thaliana
  misc_feature: MA Experiment 20001451 PARAMETER Experiment Name: At_Far-red-induction_P Parameter: Plant Line Value: Columbia
  misc_feature: MA Experiment 20001451 PARAMETER Experiment Name: At_Far-red-induction_P Parameter: Timepoint (hr) Value: 24
  misc_feature: MA Experiment 20001451 PARAMETER Experiment Name: At_Far-red-induction_P Parameter: Tissue Value: Whole Plant
tttgcaattaggcataatatatgtcctaactcaccaaccccctcaaaattgccaccaacttcaaatttctctcctttaaacctttctcaatcatctttcttctgccttggaatcctgatcatggcgtcgtcttctctcacttcgaaatccattctcggatccaccaaactcggttcttcttctcttccctcggagctccgtcgtctctcttctcccgccgttcagatctctctccgtacccaaaccaggaagaacttccagatacaagctactggaagttcatatgggactcattttcgagtttcaacttttggagaatcacatggaggaggagttggttgtatcattgatggttgtcctcctcgtattccacttactgaatctgatttgcaattcgatctcgatagaaggaggcctggtcagagcaggatcacaactcctagaaaagagactgatacttgccggatatcgtctggagtctctgaaggaatgacgacaggaacacctatccatgtgtttgtaccaaacacagatcagagaggacttgattacagtgaaatgtcggttgcctatagaccatcgcatgctgatgcaacttatgacatgaagtatggtgtcagatcagtgcagggtggaggaagatcttcagctagagagaccattggaagagttgctcctggagctttggccaagaaaattttgaagcaatttgcaggaactgagattcttgcctatgtctcgcaagttcaccatgttgtacttccagaagaattggtagaccacgagaatttaacactcgaacagatagaaaataacattgtcagatgccctaatcccgagtatgcggaaaagatgatagctgcgattgatgctgtcaggacaaaagggaactctgttggtggtgttgtgacctgcattgttcggaatgctccacgtgggcttggtacaccggttttcgataaacttgaagcagaactggcaaaagcttgtatgtcgctacctgcaactaagggatttgagtttggaagcggctttgcaggtacctttttgactggtcttgaacacaatgatgagttctataccgatgaaaatggaagaatacgtaccagaaccaaccgatctggtggaattcagggagggatctcaaatggtgaaataataaacatgagagtagccttcaagccaacatcaacaattggaaggaagcaaaatacggtaaccagagacaaggtagaaaccgaaatgattgcgcgtggtcgtcatgatccttgtgttgttccacgagctgtgccaatggtggaagcaatggtggctctagttcttgtggatcaattgatggcgcaatacgcacaatgccatttgtttccaataaatccagagttgcaggaacctctccagatagagcagccgcaaaatgctactgctttgtaagcaaatctcgagaagataaagagtcatagagagtgagagttcgcttttgttgtgtgattattatgctgaataaaaaaatgttaattttgtgcccaccagaaaaacaaagaacatgattttttataagaggatttgcttctatatcattcagctaaatgtgattttaccac

SEQ ID NO: 103583 - protein, 476 aa, Arabidopsis thaliana
  peptide (1)..(476): Ceres Seq. ID no. 13613109
  misc_feature (99)..(449): Pfam Name: Chorismate synthase Pfam Description: Chorismate synthase
  misc_feature (41)..(476): Homolog of NCBI NO: 18402389 NR Description: chorismate synthase phospholyase), putative [Arabidopsis thaliana]
  misc_feature (41)..(476): Homolog of NCBI NO: 12229700 NR Description: Chorismate synthase, chloroplast precursor (5-
  misc_feature (47)..(473): Homolog of NCBI NO: 2492952 NR Description: Chorismate synthase 1, chloroplast precursor (5-
  misc_feature (43)..(475): Homolog of NCBI NO: 114182 NR Description: Chorismate synthase, chloroplast precursor (5-
  misc_feature (41)..(473): Homolog of NCBI NO: 2492953 NR Description: Chorismate synthase 2, chloroplast precursor (5-
  misc_feature (41)..(346): Homolog of NCBI NO: 11094811 NR Description: chorismate synthase precursor, putative, 3'
  misc_feature (92)..(454): Homolog of NCBI NO: 22298006 NR Description: chorismate synthase [Thermosynechococcus BP-1] >gi|22294184|dbj|BAC08015.1| chorismate synthase
  misc_feature (92)..(452): Homolog of NCBI NO: 16330007 NR Description: chorismate synthase [Synechocystis sp. PCC 6803]
  misc_feature (92)..(453): Homolog of NCBI NO: 23039390 NR Description: hypothetical protein [Trichodesmium erythraeum
  misc_feature (92)..(452): Homolog of NCBI NO: 23126882 NR Description: hypothetical protein [Nostoc punctiforme]
FAIRHNICPNSPTPSKLPPTSNFSPLNLSQSSFFCLGILIMASSSLTSKSILGSTKLGSSSLPSELRRLSSPAVQISLRTQTRKNFQIQATGSSYGTHFRVSTFGESHGGGVGCIIDGCPPRIPLTESDLQFDLDRRRPGQSRITTPRKETDTCRISSGVSEGMTTGTPIHVFVPNTDQRGLDYSEMSVAYRPSHADATYDMKYGVRSVQGGGRSSARETIGRVAPGALAKKILKQFAGTEILAYVSQVHHVVLPEELVDHENLTLEQIENNIVRCPNPEYAEKMIAAIDAVRTKGNSVGGVVTCIVRNAPRGLGTPVFDKLEAELAKACMSLPATKGFEFGSGFAGTFLTGLEHNDEFYTDENGRIRTRTNRSGGIQGGISNGEIINMRVAFKPTSTIGRKQNTVTRDKVETEMIARGRHDPCVVPRAVPMVEAMVALVLVDQLMAQYAQCHLFPINPELQEPLQIEQPQNATAL

SEQ ID NO: 103584 - protein, 436 aa, Arabidopsis thaliana; identical to SEQ ID NO: 42486
  peptide (1)..(436): Ceres Seq. ID no. 13613110
  misc_feature (59)..(409): Pfam Name: Chorismate synthase Pfam Description: Chorismate synthase
  misc_feature (1)..(436): Homolog of NCBI NO: 18402389 NR Description: chorismate synthase phospholyase), putative [Arabidopsis thaliana]
  misc_feature (1)..(436): Homolog of NCBI NO: 12229700 NR Description: Chorismate synthase, chloroplast precursor (5-
  misc_feature (7)..(433): Homolog of NCBI NO: 2492952 NR Description: Chorismate synthase 1, chloroplast precursor (5-
  misc_feature (3)..(435): Homolog of NCBI NO: 114182 NR Description: Chorismate synthase, chloroplast precursor (5-
  misc_feature (1)..(433): Homolog of NCBI NO: 2492953 NR Description: Chorismate synthase 2, chloroplast precursor (5-
  misc_feature (1)..(306): Homolog of NCBI NO: 11094811 NR Description: chorismate synthase precursor, putative, 3'
  misc_feature (52)..(414): Homolog of NCBI NO: 22298006 NR Description: chorismate synthase [Thermosynechococcus BP-1] >gi|22294184|dbj|BAC08015.1| chorismate synthase
  misc_feature (52)..(412): Homolog of NCBI NO: 16330007 NR Description: chorismate synthase [Synechocystis sp. PCC 6803]
  misc_feature (52)..(413): Homolog of NCBI NO: 23039390 NR Description: hypothetical protein [Trichodesmium erythraeum
  misc_feature (52)..(412): Homolog of NCBI NO: 23126882 NR Description: hypothetical protein [Nostoc punctiforme]

SEQ ID NO: 103585 - protein, 313 aa, Arabidopsis thaliana; identical to SEQ ID NO: 42487
  peptide (1)..(313): Ceres Seq. ID no. 13613111
  misc_feature (1)..(286): Pfam Name: Chorismate synthase Pfam Description: Chorismate synthase
  misc_feature (1)..(313): Homolog of NCBI NO: 18402389 NR Description: chorismate synthase phospholyase), putative [Arabidopsis thaliana]
  misc_feature (1)..(313): Homolog of NCBI NO: 12229700 NR Description: Chorismate synthase, chloroplast precursor (5-
  misc_feature (1)..(310): Homolog of NCBI NO: 2492952 NR Description: Chorismate synthase 1, chloroplast precursor (5-
  misc_feature (1)..(312): Homolog of NCBI NO: 114182 NR Description: Chorismate synthase, chloroplast precursor (5-
  misc_feature (1)..(310): Homolog of NCBI NO: 2492953 NR Description: Chorismate synthase 2, chloroplast precursor (5-
  misc_feature (1)..(183): Homolog of NCBI NO: 11094811 NR Description: chorismate synthase precursor, putative, 3'
  misc_feature (1)..(291): Homolog of NCBI NO: 22298006 NR Description: chorismate synthase [Thermosynechococcus BP-1] >gi|22294184|dbj|BAC08015.1| chorismate synthase
  misc_feature (1)..(289): Homolog of NCBI NO: 16330007 NR Description: chorismate synthase [Synechocystis sp. PCC 6803]
  misc_feature (1)..(290): Homolog of NCBI NO: 23039390 NR Description: hypothetical protein [Trichodesmium erythraeum
  misc_feature (1)..(289): Homolog of NCBI NO: 23126882 NR Description: hypothetical protein [Nostoc punctiforme]

SEQ ID NO: 103586 - DNA, 1883 bp, Arabidopsis thaliana
  misc_feature (1)..(1883): Ceres Seq. ID no. 13613112
  misc_feature: MA Experiment ID: 108488 Result: Up-regulated in Transcription
  misc_feature: MA Experiment ID: 108573 Result: Up-regulated in Transcription
  misc_feature: MA Experiment 108573 PARAMETER Experiment Name: At_Drought_cDNA_P Parameter: Timepoint (hr) Value: 6
  misc_feature: MA Experiment 108573 PARAMETER Experiment Name: At_Drought_cDNA_P Parameter: Tissue Value: Aerial
  misc_feature: MA Experiment 108573 PARAMETER Experiment Name: At_Drought_cDNA_P Parameter: Treatment Value: Drought vs. No Drought
  misc_feature: MA Experiment ID: 108595 Result: Down-regulated in Transcription
  misc_feature: MA Experiment 108595 PARAMETER Experiment Name: At_Ler-pi_Ovule_cDNA_P Parameter: Plant Line Value: null
  misc_feature: MA Experiment ID: 20000184 Result: Up-regulated in Transcription
  misc_feature: MA Experiment 20000184 PARAMETER Experiment Name: At_Shoots__P Parameter: Age (day) Value: 7
  misc_feature: MA Experiment 20000184 PARAMETER Experiment Name: At_Shoots__P Parameter: Tissue Value: Shoots vs. Whole Plant
cacacattcttgcagaaggttttagaatcacaaagcataactcacctacccctaaaccaactccaatttctctcctcctctattaaatctttctcaatcatctttctttgagtcttttgccttggaatcctgatcatggcgtcttctctcacttccaaatccattctcggatgcaccaaacccgcttcttcttcttttcttccgtcggagctccgtcgtctctcttctcccgccgttcagatatctctccattcacaaaccaggaagaacttccggcagtcgtggggattgaagaagagtgatctgatgctaaatggttctgagattcgtcctgtgaaggttagggcttctgtttccacggcggagaaagcttcggagattgtgcttcaacccattagagaaatctcgggtctcattaagcttcctggctccaagtctctctctaatcgaattctgcttctcgctgctctatctgagggaactactgtagtggacaacttgttgaacagtgatgacatcaattacatgcttgatgcgttgaagatattgggacttaatgtggaaactcacagtgaaaacaatcgtgctgtagttgaaggatgtggcggggtatttccagcttccattgattccaagagtgatatcgaactttacctcggcaatgcaggaacagcaatgcgtccacttaccgccgcagttactgctgcaggtggcaacgcaagttatgtccttgatggggtgcctcggatgagagagagacctataggggatttggttgttggtcttaagcagcttggtgctgatgttgaatgtactcttggcactaactgccctcctgttcgtgtcaacgctaatggtggccttcctggtggaaaggtgaagctttctggatctattagtagtcagtacttgaccgctctgctcatggcagctcccttagctcttggagacgtcgaaattgaaattgtcgataaattgatttctgttccgtatgttgaaatgacattgaagttgatggaacgttttggggtaagtgctgagcatagtgaaagctgggatcgtttctttgttaagggtgggcaaaaatacaagtcgccgggtaatgcttacgtagaaggtgatgcttctagtgctagttatttcctggctggtgctgccattaccggtgaaactgtcactgttgaaggttgtggaacgaccagtttgcagggagatgtgaaatttgccgaggttcttgagaaaatgggatgtaaagtgtcctggacagagaacagtgtgactgtgacagggccgtctagagatgcttttggaatgagacacttgcgggctattgatgtcaacatgaacaaaatgcctgatgtagcaatgactcttgccgtcgttgctctctttgccgatggtccaaccaccattagagatgtggctagctggagagtaaaggagacggaaaggatgattgccatttgcacagagcttagaaaactgggagctacagtggaagaaggttcagattattgtgtgattactccgccgaaaaaggtgaaaccggcagagattgatacatatgatgatcatagaatggcaatggcattctctcttgcagcttgtgctgatgttccaatcaccatcaatgaccccggttgcaccaggaaaaccttccccgactacttccaagtccttgaaagaatcacaaagcattaaacaaaaaaactctaaaatctccactgttttttcttctgatccaagcttatctgtttccatttttcttgtctctgtaacattattagaaagcaagagtagtgtttgtttgtgtgtacctgaactgagtgagatttgagatgcaatcattgaatcggctttggtatatcattttactctgtttt

SEQ ID NO: 103587 - protein, 521 aa, Arabidopsis thaliana; identical to SEQ ID NO: 37317
  peptide (1)..(521): Ceres Seq. ID no. 13613113
  misc_feature (1)..(521): Homolog of NCBI NO: 15221986 NR Description: 3-phosphoshikimate 1-carboxyvinyltransferase (5-
  misc_feature (1)..(521): Homolog of NCBI NO: 21555078 NR Description: 5-enolpyruvylshikimate-3-phosphate (EPSP)
  misc_feature (19)..(521): Homolog of NCBI NO: 18251236 NR Description: 5-enolpyruvylshikimate-3-phosphate synthase
  misc_feature (12)..(521): Homolog of NCBI NO: 15225450 NR Description: 3-phosphoshikimate 1-carboxyvinyltransferase (5-
  misc_feature (12)..(521): Homolog of NCBI NO: 66618 NR Description: 3-phosphoshikimate 1-carboxyvinyltransferase (EC
  misc_feature (24)..(521): Homolog of NCBI NO: 114171 NR Description: 3-phosphoshikimate 1-carboxyvinyltransferase,
  misc_feature (12)..(521): Homolog of NCBI NO: 1351978 NR Description: 3-phosphoshikimate 1-carboxyvinyltransferase,
  misc_feature (12)..(521): Homolog of NCBI NO: 114165 NR Description: 3-phosphoshikimate 1-carboxyvinyltransferase 1,
  misc_feature (32)..(521): Homolog of NCBI NO: 66619 NR Description: 3-phosphoshikimate 1-carboxyvinyltransferase (EC
  misc_feature (40)..(521): Homolog of NCBI NO: 114176 NR Description: 3-phosphoshikimate 1-carboxyvinyltransferase,

SEQ ID NO: 103588 - protein, 464 aa, Arabidopsis thaliana; identical to SEQ ID NO: 37318
  peptide (1)..(464): Ceres Seq. ID no. 13613114
  misc_feature (1)..(464): Homolog of NCBI NO: 15221986 NR Description: 3-phosphoshikimate 1-carboxyvinyltransferase (5-
  misc_feature (1)..(464): Homolog of NCBI NO: 21555078 NR Description: 5-enolpyruvylshikimate-3-phosphate (EPSP)
  misc_feature (1)..(464): Homolog of NCBI NO: 18251236 NR Description: 5-enolpyruvylshikimate-3-phosphate synthase
  misc_feature (1)..(464): Homolog of NCBI NO: 15225450 NR Description: 3-phosphoshikimate 1-carboxyvinyltransferase (5-
  misc_feature (1)..(464): Homolog of NCBI NO: 66618 NR Description: 3-phosphoshikimate 1-carboxyvinyltransferase (EC
  misc_feature (1)..(464): Homolog of NCBI NO: 114171 NR Description: 3-phosphoshikimate 1-carboxyvinyltransferase,
  misc_feature (1)..(464): Homolog of NCBI NO: 1351978 NR Description: 3-phosphoshikimate 1-carboxyvinyltransferase,
  misc_feature (1)..(464): Homolog of NCBI NO: 114165 NR Description: 3-phosphoshikimate 1-carboxyvinyltransferase 1,
  misc_feature (1)..(464): Homolog of NCBI NO: 66619 NR Description: 3-phosphoshikimate 1-carboxyvinyltransferase (EC
  misc_feature (1)..(464): Homolog of NCBI NO: 114176 NR Description: 3-phosphoshikimate 1-carboxyvinyltransferase,

SEQ ID NO: 103589 - protein, 391 aa, Arabidopsis thaliana; identical to SEQ ID NO: 37319
  peptide (1)..(391): Ceres Seq. ID no. 13613115
  misc_feature (1)..(391): Homolog of NCBI NO: 15221986 NR Description: 3-phosphoshikimate 1-carboxyvinyltransferase (5-
  misc_feature (1)..(391): Homolog of NCBI NO: 21555078 NR Description: 5-enolpyruvylshikimate-3-phosphate (EPSP)
  misc_feature (1)..(391): Homolog of NCBI NO: 18251236 NR Description: 5-enolpyruvylshikimate-3-phosphate synthase
  misc_feature (1)..(391): Homolog of NCBI NO: 15225450 NR Description: 3-phosphoshikimate 1-carboxyvinyltransferase (5-
  misc_feature (1)..(391): Homolog of NCBI NO: 66618 NR Description: 3-phosphoshikimate 1-carboxyvinyltransferase (EC
  misc_feature (1)..(391): Homolog of NCBI NO: 114171 NR Description: 3-phosphoshikimate 1-carboxyvinyltransferase,
  misc_feature (1)..(391): Homolog of NCBI NO: 1351978 NR Description: 3-phosphoshikimate 1-carboxyvinyltransferase,
  misc_feature (1)..(391): Homolog of NCBI NO: 114165 NR Description: 3-phosphoshikimate 1-carboxyvinyltransferase 1,
  misc_feature (1)..(391): Homolog of NCBI NO: 66619 NR Description: 3-phosphoshikimate 1-carboxyvinyltransferase (EC
  misc_feature (1)..(391): Homolog of NCBI NO: 114176 NR Description: 3-phosphoshikimate 1-carboxyvinyltransferase,

SEQ ID NO: 103590 - DNA, 1141 bp, Arabidopsis thaliana
  misc_feature (1)..(1141): Ceres Seq. ID no. 13613124
  misc_feature: MA Experiment ID: 108461 Result: Up-regulated in Transcription
  misc_feature: MA Experiment 108461 PARAMETER Experiment Name: At_Germinating_Seeds_cDNA_P Parameter: Age (day) Value: 1 vs. 0
  misc_feature: MA Experiment 108461 PARAMETER Experiment Name: At_Germinating_Seeds_cDNA_P Parameter: Tissue Value: Germinating Seeds
  misc_feature: MA Experiment ID: 108462 Result: Up-regulated in Transcription
  misc_feature: MA Experiment 108462 PARAMETER Experiment Name: At_Germinating_Seeds_cDNA_P Parameter: Age (day) Value: 2 vs. 0
  misc_feature: MA Experiment 108462 PARAMETER Experiment Name: At_Germinating_Seeds_cDNA_P Parameter: Tissue Value: Germinating Seeds
  misc_feature: MA Experiment ID: 108463 Result: Up-regulated in Transcription
  misc_feature: MA Experiment 108463 PARAMETER Experiment Name: At_Germinating_Seeds_cDNA_P Parameter: Age (day) Value: 3 vs. 0
  misc_feature: MA Experiment 108463 PARAMETER Experiment Name: At_Germinating_Seeds_cDNA_P Parameter: Tissue Value: Germinating Seeds
  misc_feature: MA Experiment ID: 108464 Result: Up-regulated in Transcription
  misc_feature: MA Experiment 108464 PARAMETER Experiment Name: At_Germinating_Seeds_cDNA_P Parameter: Age (day) Value: 4 vs. 0
  misc_feature: MA Experiment 108464 PARAMETER Experiment Name: At_Germinating_Seeds_cDNA_P Parameter: Tissue Value: Germinating Seeds
  misc_feature: MA Experiment ID: 108488 Result: Down-regulated in Transcription
  misc_feature: MA Experiment ID: 108594 Result: Down-regulated in Transcription
  misc_feature: MA Experiment 108594 PARAMETER Experiment Name: At_Ler-rhl_Root_cDNA_P Parameter: Plant Line Value: null
  misc_feature: MA Experiment ID: 108609 Result: Down-regulated in Transcription
  misc_feature: MA Experiment 108609 PARAMETER Experiment Name: At_100uM_ABA_cDNA_P Parameter: Timepoint (hr) Value: 24
  misc_feature: MA Experiment 108609 PARAMETER Experiment Name: At_100uM_ABA_cDNA_P Parameter: Tissue Value: Aerial
  misc_feature: MA Experiment 108609 PARAMETER Experiment Name: At_100uM_ABA_cDNA_P Parameter: Treatment Value: 100uM ABA vs. No Treatment
  misc_feature: MA Experiment ID: 20000089 Result: Down-regulated in Transcription
  misc_feature: MA Experiment ID: 20000173 Result: Down-regulated in Transcription
  misc_feature: MA Experiment 20000173 PARAMETER Experiment Name: At_42deg_Heat_P Parameter: Age (day) Value: 14
  misc_feature: MA Experiment 20000173 PARAMETER Experiment Name: At_42deg_Heat_P Parameter: Organism Value: A. thaliana
  misc_feature: MA Experiment 20000173 PARAMETER Experiment Name: At_42deg_Heat_P Parameter: Plant Line Value: WS
  misc_feature: MA Experiment 20000173 PARAMETER Experiment Name: At_42deg_Heat_P Parameter: Temperature (deg C) Value: 42 vs. 22
  misc_feature: MA Experiment 20000173 PARAMETER Experiment Name: At_42deg_Heat_P Parameter: Timepoint (hr) Value: 6
  misc_feature: MA Experiment 20000173 PARAMETER Experiment Name: At_42deg_Heat_P Parameter: Tissue Value: Aerial
  misc_feature: MA Experiment ID: 20000179 Result: Up-regulated in Transcription
  misc_feature: MA Experiment 20000179 PARAMETER Experiment Name: At_Germinating_Seeds_P Parameter: Age (hr) Value: 6 vs. 0
  misc_feature: MA Experiment 20000179 PARAMETER Experiment Name: At_Germinating_Seeds_P Parameter: Tissue Value: Germinating Seeds
  misc_feature: MA Experiment ID: 20000180 Result: Up-regulated in Transcription
  misc_feature: MA Experiment 20000180 PARAMETER Experiment Name: At_Germinating_Seeds_P Parameter: Age (hr) Value: 24 vs. 0
  misc_feature: MA Experiment 20000180 PARAMETER Experiment Name: At_Germinating_Seeds_P Parameter: Tissue Value: Germinating Seeds
  misc_feature: MA Experiment ID: 20000185 Result: Up-regulated in Transcription
  misc_feature: MA Experiment 20000185 PARAMETER Experiment Name: At_Roots__P Parameter: Age (day) Value: 7 vs. 21
  misc_feature: MA Experiment 20000185 PARAMETER Experiment Name: At_Roots__P Parameter: Organism Value: A. thaliana
  misc_feature: MA Experiment 20000185 PARAMETER Experiment Name: At_Roots__P Parameter: Tissue Value: Roots vs. Whole Plant
  misc_feature: MA Experiment ID: 20000234 Result: Down-regulated in Transcription
  misc_feature: MA Experiment 20000234 PARAMETER Experiment Name: At_Siliques_P Parameter: Age (day) Value: 21
  misc_feature: MA Experiment 20000234 PARAMETER Experiment Name: At_Siliques_P Parameter: Organism Value: A. thaliana
  misc_feature: MA Experiment 20000234 PARAMETER Experiment Name: At_Siliques_P Parameter: Plant Line Value: WS
  misc_feature: MA Experiment 20000234 PARAMETER Experiment Name: At_Siliques_P Parameter: Tissue Value: Less Than 5mm Siliques vs. Whole Plant
  misc_feature: MA Experiment ID: 20000235 Result: Down-regulated in Transcription
  misc_feature: MA Experiment 20000235 PARAMETER Experiment Name: At_Siliques_P Parameter: Age (day) Value: 21
  misc_feature: MA Experiment 20000235 PARAMETER Experiment Name: At_Siliques_P Parameter: Organism Value: A. thaliana
  misc_feature: MA Experiment 20000235 PARAMETER Experiment Name: At_Siliques_P Parameter: Plant Line Value: WS
  misc_feature: MA Experiment 20000235 PARAMETER Experiment Name: At_Siliques_P Parameter: Tissue Value: 5-10mm Siliques vs. Whole Plant
  misc_feature: MA Experiment ID: 20000265 Result: Down-regulated in Transcription
  misc_feature: MA Experiment 20000265 PARAMETER Experiment Name: At_Open_Flower_P Parameter: Age (day) Value: 21
  misc_feature: MA Experiment 20000265 PARAMETER Experiment Name: At_Open_Flower_P Parameter: Plant Line Value: WS
  misc_feature: MA Experiment 20000265 PARAMETER Experiment Name: At_Open_Flower_P Parameter: Tissue Value: Closed Flower vs. Whole Plant
  misc_feature: MA Experiment ID: 20000437 Result: Down-regulated in Transcription
  misc_feature: MA Experiment 20000437 PARAMETER Experiment Name: At_Drought_P Parameter: Age (day) Value: 8
  misc_feature: MA Experiment 20000437 PARAMETER Experiment Name: At_Drought_P Parameter: Organism Value: A. thaliana
  misc_feature: MA Experiment 20000437 PARAMETER Experiment Name: At_Drought_P Parameter: Plant Line Value: WS
  misc_feature: MA Experiment 20000437 PARAMETER Experiment Name: At_Drought_P Parameter: Timepoint (hr) Value: 24
  misc_feature: MA Experiment 20000437 PARAMETER Experiment Name: At_Drought_P Parameter: Tissue Value: Whole Plant
  misc_feature: MA Experiment 20000437 PARAMETER Experiment Name: At_Drought_P Parameter: Treatment Value: Drought vs. No Drought
  misc_feature: MA Experiment ID: 20000439 Result: Up-regulated in Transcription
  misc_feature: MA Experiment 20000439 PARAMETER Experiment Name: At_Roots__P Parameter: Age (day) Value: 14 vs. 21
  misc_feature: MA Experiment 20000439 PARAMETER Experiment Name: At_Roots__P Parameter: Organism Value: A. thaliana
  misc_feature: MA Experiment 20000439 PARAMETER Experiment Name: At_Roots__P Parameter: Tissue Value: Roots vs. Whole Plant
  misc_feature: MA Experiment ID: 20000456 Result: Down-regulated in Transcription
  misc_feature: MA Experiment 20000456 PARAMETER Experiment Name: At_100uM_BA_P Parameter: Age (day) Value: 14
  misc_feature: MA Experiment 20000456 PARAMETER Experiment Name: At_100uM_BA_P Parameter: Organism Value: A. thaliana
  misc_feature: MA Experiment 20000456 PARAMETER Experiment Name: At_100uM_BA_P Parameter: Plant Line Value: WS
  misc_feature: MA Experiment 20000456 PARAMETER Experiment Name: At_100uM_BA_P Parameter: Timepoint (hr) Value: 6
  misc_feature: MA Experiment 20000456 PARAMETER Experiment Name: At_100uM_BA_P Parameter: Tissue Value: Aerial
  misc_feature: MA Experiment 20000456 PARAMETER Experiment Name: At_100uM_BA_P Parameter: Treatment Value: 100uM BA vs. No Treatment
  misc_feature: MA Experiment ID: 20000495 Result: Up-regulated in Transcription
  misc_feature: MA Experiment 20000495 PARAMETER Experiment Name: At_Guard_Cells_P Parameter: Harvest Date Value: 8/2/2002
  misc_feature: MA Experiment 20000495 PARAMETER Experiment Name: At_Guard_Cells_P Parameter: Organism Value: A. thaliana
  misc_feature: MA Experiment 20000495 PARAMETER Experiment Name: At_Guard_Cells_P Parameter: Tissue Value: Guard Cells vs. Leaves
  misc_feature: MA Experiment ID: 20000527 Result: Down-regulated in Transcription
  misc_feature: MA Experiment 20000527 PARAMETER Experiment Name: At_10percent_PEG_P Parameter: Age (day) Value: 20
  misc_feature: MA Experiment 20000527 PARAMETER Experiment Name: At_10percent_PEG_P Parameter: Organism Value: A. thaliana
  misc_feature: MA Experiment 20000527 PARAMETER Experiment Name: At_10percent_PEG_P Parameter: Plant Line Value: WS
  misc_feature: MA Experiment 20000527 PARAMETER Experiment Name: At_10percent_PEG_P Parameter: Timepoint (day) Value: 20
  misc_feature: MA Experiment 20000527 PARAMETER Experiment Name: At_10percent_PEG_P Parameter: Tissue Value: Whole Plant
  misc_feature: MA Experiment 20000527 PARAMETER Experiment Name: At_10percent_PEG_P Parameter: Treatment Value: 10percent PEG vs. No Treatment
  misc_feature: MA Experiment ID: 20000709 Result: Down-regulated in Transcription
  misc_feature: MA Experiment 20000709 PARAMETER Experiment Name: At_15mM_NH4NO3_L-to-H_P Parameter: Age (hr) Value: 14
  misc_feature: MA Experiment 20000709 PARAMETER Experiment Name: At_15mM_NH4NO3_L-to-H_P Parameter: Organism Value: A. thaliana
  misc_feature: MA Experiment 20000709 PARAMETER Experiment Name: At_15mM_NH4NO3_L-to-H_P Parameter: Plant Line Value: WS
  misc_feature: MA Experiment 20000709 PARAMETER Experiment Name: At_15mM_NH4NO3_L-to-H_P Parameter: Timepoint (hr) Value: 4
  misc_feature: MA Experiment 20000709 PARAMETER Experiment Name: At_15mM_NH4NO3_L-to-H_P Parameter: Tissue Value: Aerial
  misc_feature: MA Experiment 20000709 PARAMETER Experiment Name: At_15mM_NH4NO3_L-to-H_P Parameter: Treatment Value: 15mM NH4NO3 vs. 30mM Mannitol
  misc_feature: MA Experiment ID: 20000794 Result: Up-regulated in Transcription
  misc_feature: MA Experiment 20000794 PARAMETER Experiment Name: At_Petals_P Parameter: Age (day) Value: 23-25 days
  misc_feature: MA Experiment 20000794 PARAMETER Experiment Name: At_Petals_P Parameter: Plant Line Value: WS
  misc_feature: MA Experiment 20000794 PARAMETER Experiment Name: At_Petals_P Parameter: Tissue Value: Petals vs. Whole plant
  misc_feature: MA Experiment ID: 20001248 Result: Down-regulated in Transcription
  misc_feature: MA Experiment 20001248 PARAMETER Experiment Name: At_Far-red-induction_P Parameter: Age (day) Value: 7
  misc_feature: MA Experiment 20001248 PARAMETER Experiment Name: At_Far-red-induction_P Parameter: Light Value: Far-red vs. White
  misc_feature: MA Experiment 20001248 PARAMETER Experiment Name: At_Far-red-induction_P Parameter: Organism Value: A. thaliana
  misc_feature: MA Experiment 20001248 PARAMETER Experiment Name: At_Far-red-induction_P Parameter: Plant Line Value: Columbia
  misc_feature: MA Experiment 20001248 PARAMETER Experiment Name: At_Far-red-induction_P Parameter: Timepoint (hr) Value: 4
  misc_feature: MA Experiment 20001248 PARAMETER Experiment Name: At_Far-red-induction_P Parameter: Tissue Value: Whole Plant
  misc_feature: MA Experiment ID: 20001451 Result: Up-regulated in Transcription
  misc_feature: MA Experiment 20001451 PARAMETER Experiment Name: At_Far-red-induction_P Parameter: Age (day) Value: 7
  misc_feature: MA Experiment 20001451 PARAMETER Experiment Name: At_Far-red-induction_P Parameter: Light Value: Far-red vs. White
  misc_feature: MA Experiment 20001451 PARAMETER Experiment Name: At_Far-red-induction_P Parameter: Organism Value: A. thaliana
  misc_feature: MA Experiment 20001451 PARAMETER Experiment Name: At_Far-red-induction_P Parameter: Plant Line Value: Columbia
  misc_feature: MA Experiment 20001451 PARAMETER Experiment Name: At_Far-red-induction_P Parameter: Timepoint (hr) Value: 24
  misc_feature: MA Experiment 20001451 PARAMETER Experiment Name: At_Far-red-induction_P Parameter: Tissue Value: Whole Plant
  misc_feature: MA Experiment ID: 20001457 Result: Down-regulated in Transcription
  misc_feature: MA Experiment 20001457 PARAMETER Experiment Name: At_50mM_NH4NO3_L-to-H_P Parameter: Age (day) Value: Undefined
  misc_feature: MA Experiment 20001457 PARAMETER Experiment Name: At_50mM_NH4NO3_L-to-H_P Parameter: Organism Value: Undefined
  misc_feature: MA Experiment 20001457 PARAMETER Experiment Name: At_50mM_NH4NO3_L-to-H_P Parameter: Plant Line Value: Undefined
  misc_feature: MA Experiment 20001457 PARAMETER Experiment Name: At_50mM_NH4NO3_L-to-H_P Parameter: Timepoint (hr) Value: 0.5
  misc_feature: MA Experiment 20001457 PARAMETER Experiment Name: At_50mM_NH4NO3_L-to-H_P Parameter: Tissue Value: Siliques
  misc_feature: MA Experiment 20001457 PARAMETER Experiment Name: At_50mM_NH4NO3_L-to-H_P Parameter: Treatment Value: 50mM NH4NO3 vs. 100mM Manitol
  misc_feature: MA Experiment ID: 20001556 Result: Down-regulated in Transcription
  misc_feature: MA Experiment 20001556 PARAMETER Experiment Name: At_Drought_Soil_Dry_P Parameter: Age (day) Value: 26
  misc_feature: MA Experiment 20001556 PARAMETER Experiment Name: At_Drought_Soil_Dry_P Parameter: Organism Value: A. thaliana
  misc_feature: MA Experiment 20001556 PARAMETER Experiment Name: At_Drought_Soil_Dry_P Parameter: Plant Line Value: WS
  misc_feature: MA Experiment 20001556 PARAMETER Experiment Name: At_Drought_Soil_Dry_P Parameter: Post Timepoint (hr) Value: None
  misc_feature: MA Experiment 20001556 PARAMETER Experiment Name: At_Drought_Soil_Dry_P Parameter: Post-Treatment Value: None
  misc_feature: MA Experiment 20001556 PARAMETER Experiment Name: At_Drought_Soil_Dry_P Parameter: Timepoint (day) Value: 12
  misc_feature: MA Experiment 20001556 PARAMETER Experiment Name: At_Drought_Soil_Dry_P Parameter: Treatment Value: Drought vs. No Drought
  misc_feature: MA Experiment ID: 20001557 Result: Down-regulated in Transcription
  misc_feature: MA Experiment 20001557 PARAMETER Experiment Name: At_Drought_Soil_Dry_P Parameter: Age (day) Value: 27
  misc_feature: MA Experiment 20001557 PARAMETER Experiment Name: At_Drought_Soil_Dry_P Parameter: Organism Value: A. thaliana
  misc_feature: MA Experiment 20001557 PARAMETER Experiment Name: At_Drought_Soil_Dry_P Parameter: Plant Line Value: WS
  misc_feature: MA Experiment 20001557 PARAMETER Experiment Name: At_Drought_Soil_Dry_P Parameter: Post Timepoint (hr) Value: 3
  misc_feature: MA Experiment 20001557 PARAMETER Experiment Name: At_Drought_Soil_Dry_P Parameter: Post-Treatment Value: Re-Water vs. No Drought
  misc_feature: MA Experiment 20001557 PARAMETER Experiment Name: At_Drought_Soil_Dry_P Parameter: Timepoint (day) Value: 13
  misc_feature: MA Experiment 20001557 PARAMETER Experiment Name: At_Drought_Soil_Dry_P Parameter: Treatment Value: Drought vs. No Drought
  misc_feature: MA Experiment ID: 20001558 Result: Down-regulated in Transcription
  misc_feature: MA Experiment 20001558 PARAMETER Experiment Name: At_Drought_Soil_Dry_P Parameter: Age (day) Value: 27
  misc_feature: MA Experiment 20001558 PARAMETER Experiment Name: At_Drought_Soil_Dry_P Parameter: Organism Value: A. thaliana
  misc_feature: MA Experiment 20001558 PARAMETER Experiment Name: At_Drought_Soil_Dry_P Parameter: Plant Line Value: WS
  misc_feature: MA Experiment 20001558 PARAMETER Experiment Name: At_Drought_Soil_Dry_P Parameter: Post Timepoint (hr) Value: 6
  misc_feature: MA Experiment 20001558 PARAMETER Experiment Name: At_Drought_Soil_Dry_P Parameter: Post-Treatment Value: Re-Water vs. No Drought
  misc_feature: MA Experiment 20001558 PARAMETER Experiment Name: At_Drought_Soil_Dry_P Parameter: Timepoint (day) Value: 13
  misc_feature: MA Experiment 20001558 PARAMETER Experiment Name: At_Drought_Soil_Dry_P Parameter: Treatment Value: Drought vs. No Drought
  misc_feature: MA Experiment ID: 20001911 Result: Down-regulated in Transcription
  misc_feature: MA Experiment 20001911 PARAMETER Experiment Name: At_Drought_Reproduction_P Parameter: Age (day) Value: 40
  misc_feature: MA Experiment 20001911 PARAMETER Experiment Name: At_Drought_Reproduction_P Parameter: Organism Value: A. thaliana
  misc_feature: MA Experiment 20001911 PARAMETER Experiment Name: At_Drought_Reproduction_P Parameter: Plant Line Value: WS
  misc_feature: MA Experiment 20001911 PARAMETER Experiment Name: At_Drought_Reproduction_P Parameter: Timepoint (day) Value: 10
  misc_feature: MA Experiment 20001911 PARAMETER Experiment Name: At_Drought_Reproduction_P Parameter: Tissue Value: Flowers
  misc_feature: MA Experiment 20001911 PARAMETER Experiment Name: At_Drought_Reproduction_P Parameter: Treatment Value: Drought vs. No Drought
aacaccacaattaacagatttattgtttttggaaataatcaaaacttaaaaactatcagaatgggaacgttcttaggacactttgtgcctggtctctcacttgctcttcttggtctttggcatctcttcaacaccataagatcttactgtcttaaaggccctgaagctttctctgcaaaattctggttccctttccctaaactcaaacatcttgagcttatcttgattctcttcttctccttcctctccatcactctcctcaccctagatttccctaatttcaacttctcctctctcaaaccagacaacctagaacatgcttccatgttcctccacctcattatctttgcgtgtttcgctctcttctgcgagctaaccctttgctcagatctcttctccggtctaatcggagttctttctgcctctgtcttcgctcaagaactcttccttcttcattttcattccactgatcattcaggtcttgaaggtcactaccatttccttctccaactcattgctttcgtctccttctcctcggcgctagcttctgcttcgttccctaaatccttctctgcggctctattcctcccgatatcggttatgtttcaaggatgctggttcttgaacatggggttcatgctttggatcccagagtatgttcctagaggttgcgtgagtaacatgtcaacatctacagacaataatagaaggagtgtttatcatagtggtgcggtggcttgtgagtcccctggtgctgagattagggcaaaagcattggcgaatctgcagtttagttggatgttgtctgctatacttatcattacatgtgccttgtgcctcaagtattccggtaaagttgtgttgcctaagattaggtcatcgttggagtacgagcgtctttgccggcaaggaagtgatcgttctgcaaccgtaacggtggaagcaccggccagttccgatcaacaatagattttccttactttaatttatcatctgaatatgatgtaatatgtacatatagtacactaataagtagccctaataatagttacataatttataagagggggcagagtgtaacgcactaatgatagtggaccctttcgcatgctttgtgaactaataaaaatttgcatatagc

SEQ ID NO: 103591 - protein, 322 aa, Arabidopsis thaliana
  peptide (1)..(322): Ceres Seq. ID no. 13613125
  misc_feature (124)..(290): Pfam Name: Family of unknown function (DUF716) Pfam Description: Family of unknown function (DUF716)
  misc_feature (21)..(322): Homolog of NCBI NO: 18402650 NR Description: expressed protein [Arabidopsis thaliana]
  misc_feature (21)..(322): Homolog of NCBI NO: 21618061 NR Description: unknown [Arabidopsis thaliana]
  misc_feature (21)..(284): Homolog of NCBI NO: 15222675 NR Description: hypothetical protein [Arabidopsis thaliana]
  misc_feature (21)..(280): Homolog of NCBI NO: 30695897 NR Description: expressed protein [Arabidopsis thaliana]
  misc_feature (21)..(273): Homolog of NCBI NO: 15241195 NR Description: expressed protein [Arabidopsis thaliana]
  misc_feature (21)..(275): Homolog of NCBI NO: 32470632 NR Description: putative plant viral-response family protein bulbocastanum] >gi|32470663|gb|AAP45189.1| hypothetical protein
  misc_feature (20)..(273): Homolog of NCBI NO: 15222573 NR Description: expressed protein [Arabidopsis thaliana]
  misc_feature (21)..(309): Homolog of NCBI NO: 4416307 NR Description: hypothetical protein [Zea mays]
  misc_feature (103)..(280): Homolog of NCBI NO: 25405807 NR Description: unknown protein, 73214-72236 [imported] -
  misc_feature (21)..(263): Homolog of NCBI NO: 4680504 NR Description: hypothetical protein [Oryza sativa]
NTTINRFIVFGNNQNLKTIRMGTFLGHFVPGLSLALLGLWHLFNTIRSYCLKGPEAFSAKFWFPFPKLKHLELILILFFSFLSITLLTLDFPNFNFSSLKPDNLEHASMFLHLIIFACFALFCELTLCSDLFSGLIGVLSASVFAQELFLLHFHSTDHSGLEGHYHFLLQLIAFVSFSSALASASFPKSFSAALFLPISVMFQGCWFLNMGFMLWIPEYVPRGCVSNMSTSTDNNRRSVYHSGAVACESPGAEIRAKALANLQFSWMLSAILIITCALCLKYSGKVVLPKIRSSLEYERLCRQGSDRSATVTVEAPASSDQQ

SEQ ID NO: 103592 - protein, 302 aa, Arabidopsis thaliana
  peptide (1)..(302): Ceres Seq. ID no. 13613126
  misc_feature (104)..(270): Pfam Name: Family of unknown function (DUF716) Pfam Description: Family of unknown function (DUF716)
  misc_feature (1)..(302): Homolog of NCBI NO: 18402650 NR Description: expressed protein [Arabidopsis thaliana]
  misc_feature (1)..(302): Homolog of NCBI NO: 21618061 NR Description: unknown [Arabidopsis thaliana]
  misc_feature (1)..(264): Homolog of NCBI NO: 15222675 NR Description: hypothetical protein [Arabidopsis thaliana]
  misc_feature (1)..(260): Homolog of NCBI NO: 30695897 NR Description: expressed protein [Arabidopsis thaliana]
  misc_feature (1)..(253): Homolog of NCBI NO: 15241195 NR Description: expressed protein [Arabidopsis thaliana]
  misc_feature (1)..(255): Homolog of NCBI NO: 32470632 NR Description: putative plant viral-response family protein bulbocastanum] >gi|32470663|gb|AAP45189.1| hypothetical protein
  misc_feature (1)..(253): Homolog of NCBI NO: 15222573 NR Description: expressed protein [Arabidopsis thaliana]
  misc_feature (1)..(289): Homolog of NCBI NO: 4416307 NR Description: hypothetical protein [Zea mays]
  misc_feature (83)..(260): Homolog of NCBI NO: 25405807 NR Description: unknown protein, 73214-72236 [imported] -
  misc_feature (1)..(243): Homolog of NCBI NO: 4680504 NR Description: hypothetical protein [Oryza sativa]
MGTFLGHFVPGLSLALLGLWHLFNTIRSYCLKGPEAFSAKFWFPFPKLKHLELILILFFSFLSITLLTLDFPNFNFSSLKPDNLEHASMFLHLIIFACFALFCELTLCSDLFSGLIGVLSASVFAQELFLLHFHSTDHSGLEGHYHFLLQLIAFVSFSSALASASFPKSFSAALFLPISVMFQGCWFLNMGFMLWIPEYVPRGCVSNMSTSTDNNRRSVYHSGAVACESPGAEIRAKALANLQFSWMLSAILIITCALCLKYSGKVVLPKIRSSLEYERLCRQGSDRSATVTVEAPASSDQQ

SEQ ID NO: 103593 - protein, 214 aa, Arabidopsis thaliana
  peptide (1)..(214): Ceres Seq. ID no. 13613127
  misc_feature (16)..(182): Pfam Name: Family of unknown function (DUF716) Pfam Description: Family of unknown function (DUF716)
  misc_feature (1)..(214): Homolog of NCBI NO: 18402650 NR Description: expressed protein [Arabidopsis thaliana]
  misc_feature (1)..(214): Homolog of NCBI NO: 21618061 NR Description: unknown [Arabidopsis thaliana]
  misc_feature (1)..(176): Homolog of NCBI NO: 15222675 NR Description: hypothetical protein [Arabidopsis thaliana]
  misc_feature (1)..(172): Homolog of NCBI NO: 30695897 NR Description: expressed protein [Arabidopsis thaliana]
  misc_feature (1)..(165): Homolog of NCBI NO: 15241195 NR Description: expressed protein [Arabidopsis thaliana]
  misc_feature (1)..(167): Homolog of NCBI NO: 32470632 NR Description: putative plant viral-response family protein bulbocastanum] >gi|32470663|gb|AAP45189.1| hypothetical protein
  misc_feature (1)..(165): Homolog of NCBI NO: 15222573 NR Description: expressed protein [Arabidopsis thaliana]
  misc_feature (1)..(201): Homolog of NCBI NO: 4416307 NR Description: hypothetical protein [Zea mays]
  misc_feature (1)..(172): Homolog of NCBI NO: 25405807 NR Description: unknown protein, 73214-72236 [imported] -
  misc_feature (1)..(155): Homolog of NCBI NO: 4680504 NR Description: hypothetical protein [Oryza sativa]
MFLHLIIFACFALFCELTLCSDLFSGLIGVLSASVFAQELFLLHFHSTDHSGLEGHYHFLLQLIAFVSFSSALASASFPKSFSAALFLPISVMFQGCWFLNMGFMLWIPEYVPRGCVSNMSTSTDNNRRSVYHSGAVACESPGAEIRAKALANLQFSWMLSAILIITCALCLKYSGKVVLPKIRSSLEYERLCRQGSDRSATVTVEAPASSDQQ

SEQ ID NO: 103594 - DNA, 1322 bp, Arabidopsis thaliana
  misc_feature (1)..(1322): Ceres Seq. ID no. 13613128
  misc_feature: MA Experiment ID: 108434 Result: Down-regulated in Transcription
  misc_feature: MA Experiment 108434 PARAMETER Experiment Name: At_Root_Tips_cDNA_P Parameter: Tissue Value: Root Tips
  misc_feature: MA Experiment ID: 108462 Result: Up-regulated in Transcription
  misc_feature: MA Experiment 108462 PARAMETER Experiment Name: At_Germinating_Seeds_cDNA_P Parameter: Age (day) Value: 2 vs. 0
  misc_feature: MA Experiment 108462 PARAMETER Experiment Name: At_Germinating_Seeds_cDNA_P Parameter: Tissue Value: Germinating Seeds
  misc_feature: MA Experiment ID: 108463 Result: Up-regulated in Transcription
  misc_feature: MA Experiment 108463 PARAMETER Experiment Name: At_Germinating_Seeds_cDNA_P Parameter: Age (day) Value: 3 vs. 0
  misc_feature: MA Experiment 108463 PARAMETER Experiment Name: At_Germinating_Seeds_cDNA_P Parameter: Tissue Value: Germinating Seeds
  misc_feature: MA Experiment ID: 108464 Result: Up-regulated in Transcription
  misc_feature: MA Experiment 108464 PARAMETER Experiment Name: At_Germinating_Seeds_cDNA_P Parameter: Age (day) Value: 4 vs. 0
  misc_feature: MA Experiment 108464 PARAMETER Experiment Name: At_Germinating_Seeds_cDNA_P Parameter: Tissue Value: Germinating Seeds
  misc_feature: MA Experiment ID: 108561 Result: Down-regulated in Transcription
  misc_feature: MA Experiment 108561 PARAMETER Experiment Name: At_100uM_ABA_cDNA_P Parameter: Timepoint (hr) Value: 6
  misc_feature: MA Experiment 108561 PARAMETER Experiment Name: At_100uM_ABA_cDNA_P Parameter: Tissue Value: Aerial
  misc_feature: MA Experiment 108561 PARAMETER Experiment Name: At_100uM_ABA_cDNA_P Parameter: Treatment Value: 100uM ABA vs. No Treatment
  misc_feature: MA Experiment ID: 20000171 Result: Up-regulated in Transcription
  misc_feature: MA Experiment 20000171 PARAMETER Experiment Name: At_42deg_Heat_P Parameter: Age (day) Value: 14
  misc_feature: MA Experiment 20000171 PARAMETER Experiment Name: At_42deg_Heat_P Parameter: Organism Value: A. thaliana
  misc_feature: MA Experiment 20000171 PARAMETER Experiment Name: At_42deg_Heat_P Parameter: Plant Line Value: WS
  misc_feature: MA Experiment 20000171 PARAMETER Experiment Name: At_42deg_Heat_P Parameter: Temperature (deg C) Value: 42 vs. 22
  misc_feature: MA Experiment 20000171 PARAMETER Experiment Name: At_42deg_Heat_P Parameter: Timepoint (hr) Value: 1
  misc_feature: MA Experiment 20000171 PARAMETER Experiment Name: At_42deg_Heat_P Parameter: Tissue Value: Aerial
  misc_feature: MA Experiment ID: 20000173 Result: Up-regulated in Transcription
  misc_feature: MA Experiment 20000173 PARAMETER Experiment Name: At_42deg_Heat_P Parameter: Age (day) Value: 14
  misc_feature: MA Experiment 20000173 PARAMETER Experiment Name: At_42deg_Heat_P Parameter: Organism Value: A. thaliana
  misc_feature: MA Experiment 20000173 PARAMETER Experiment Name: At_42deg_Heat_P Parameter: Plant Line Value: WS
  misc_feature: MA Experiment 20000173 PARAMETER Experiment Name: At_42deg_Heat_P Parameter: Temperature (deg C) Value: 42 vs. 22
  misc_feature: MA Experiment 20000173 PARAMETER Experiment Name: At_42deg_Heat_P Parameter: Timepoint (hr) Value: 6
  misc_feature: MA Experiment 20000173 PARAMETER Experiment Name: At_42deg_Heat_P Parameter: Tissue Value: Aerial
  misc_feature: MA Experiment ID: 20000439 Result: Up-regulated in Transcription
  misc_feature: MA Experiment 20000439 PARAMETER Experiment Name: At_Roots__P Parameter: Age (day) Value: 14 vs. 21
  misc_feature: MA Experiment 20000439 PARAMETER Experiment Name: At_Roots__P Parameter: Organism Value: A. thaliana
  misc_feature: MA Experiment 20000439 PARAMETER Experiment Name: At_Roots__P Parameter: Tissue Value: Roots vs. Whole Plant
  misc_feature: MA Experiment ID: 20000451 Result: Up-regulated in Transcription
  misc_feature: MA Experiment 20000451 PARAMETER Experiment Name: At_CS6879_Shoots-Roots_P Parameter: Age (day) Value: 14
  misc_feature: MA Experiment 20000451 PARAMETER Experiment Name: At_CS6879_Shoots-Roots_P Parameter: Organism Value: A. thaliana
  misc_feature: MA Experiment 20000451 PARAMETER Experiment Name: At_CS6879_Shoots-Roots_P Parameter: Plant Line Value: CS6879 vs. WS
  misc_feature: MA Experiment 20000451 PARAMETER Experiment Name: At_CS6879_Shoots-Roots_P Parameter: Tissue Value: Roots
  misc_feature: MA Experiment ID: 20000527 Result: Down-regulated in Transcription
  misc_feature: MA Experiment 20000527 PARAMETER Experiment Name: At_10percent_PEG_P Parameter: Age (day) Value: 20
  misc_feature: MA Experiment 20000527 PARAMETER Experiment Name: At_10percent_PEG_P Parameter: Organism Value: A. thaliana
  misc_feature: MA Experiment 20000527 PARAMETER Experiment Name: At_10percent_PEG_P Parameter: Plant Line Value: WS
  misc_feature: MA Experiment 20000527 PARAMETER Experiment Name: At_10percent_PEG_P Parameter: Timepoint (day) Value: 20
  misc_feature: MA Experiment 20000527 PARAMETER Experiment Name: At_10percent_PEG_P Parameter: Tissue Value: Whole Plant
  misc_feature: MA Experiment 20000527 PARAMETER Experiment Name: At_10percent_PEG_P Parameter: Treatment Value: 10percent PEG vs. No Treatment
atcaatctacgatcatatatctttcatttcatcatcatggaccacaaaatgtcaatgtatttgtttgtgtcttacctagcaatctttactcttttcttcaaaggctttgtctcctcgtttccttcgggatataacaatggttacaacaatggtcacggacatggactaactagcaatctcaactatcgattctatgaccggtcttgtccgcgtcttcaaacgattgttaagtccggagtttggagagcttttaaagatgattctcgaatcgctgcatctcttcttcgactccatttccacgattgttttgtcaatggatgtgatggatctatacttctgaacgattcagaggatttcaaaggagagaagaacgctcagccaaaccgaaactcagtccgtggattcgaagtcattgaagacattaaatctgatatcgaaagttcttgtcccttaacagtttcatgcgctgacatagttgctctcgcggctagagaagctgtcgtcctcactggaggaccgttttggcccgtgcctttgggacgaagggactcattaacggcgagtgagcaagcggcgaatacaaatctgccatctccgtttgaggcgttggagaatataacagccaagttcgtgacccttggactcgacctcaaggacgttgttgtcctctcaggagcacatactataggatttgctcaatgtttcgtgatcaagcatagactcttcaacttcaagggctcaggccagcctgacccaaacctagccgcttcctcagcacttctctctaagctaaaggacacgtgtcctaacgtggactcctcagactctaagctcgctgctcttgacgcagctagctcagtcaagtttgacaatgcttactacgtgaacttaatgaacaacataggactgttggattctgatcaaaccctaatgacagatcctacggctgccgccttggtgaagtcgtacagcgagaatccgtacttgttctcgagggatttcgcagtttcaatggttaaaatggggaatatcggagttatgaccggaagtgatggagtaattcgaggaaaatgtggatttccaggttaagttatatatagactcttcacaaaatccaaatcagtctattatatatctagagctaatctagctttaatgaggaatcaaataaaccaaagtctatgaataaaatatgttttatatatatggtgtaaaagcgtccttatgtatcaatatatatatatatggatcccataaacaaaaatacttggacttgtatgtgtgttacgtttgtgtgtaatggaaaatgtatttgtctttgt

SEQ ID NO: 103595 - protein, 362 aa, Arabidopsis thaliana
  peptide (1)..(362): Ceres Seq. ID no. 13613129
  misc_feature (76)..(326): Pfam Name: Peroxidase Pfam Description: Peroxidase
  misc_feature (13)..(362): Homolog of NCBI NO: 30694586 NR Description: peroxidase, putative [Arabidopsis thaliana]
  misc_feature (13)..(362): Homolog of NCBI NO: 1546702 NR Description: peroxidase; peroxidase ATP5a [Arabidopsis
  misc_feature (57)..(358): Homolog of NCBI NO: 21594792 NR Description: peroxidase [Arabidopsis thaliana]
  misc_feature (57)..(358): Homolog of NCBI NO: 15240141 NR Description: peroxidase, putative [Arabidopsis thaliana] Peroxidase 54 precursor (Atperox P54) (ATP29a) peroxidase [Arabidopsis thaliana] >gi|26452668|dbj|BAC43417.1|
  misc_feature (60)..(358): Homolog of NCBI NO: 1730490 NR Description: Peroxidase A2
  misc_feature (57)..(358): Homolog of NCBI NO: 21593262 NR Description: peroxidase [Arabidopsis thaliana]
  misc_feature (57)..(358): Homolog of NCBI NO: 15240140 NR Description: peroxidase, putative [Arabidopsis thaliana] Peroxidase 53 precursor (Atperox P53) (ATPA2) peroxidase [Arabidopsis thaliana] >gi|9759300|dbj|BAB09806.1|
  misc_feature (54)..(358): Homolog of NCBI NO: 5453379 NR Description: bacterial-induced peroxidase precursor [Gossypium
  misc_feature (60)..(358): Homolog of NCBI NO: 11513747 NR Description: Chain A, Arabidopsis Thaliana Peroxidase A2
  misc_feature (17)..(358): Homolog of NCBI NO: 15219493 NR Description: peroxidase, putative [Arabidopsis thaliana] Peroxidase 9 precursor (Atperox P9) (ATP18a) peroxidase; peroxidase ATP18a [Arabidopsis thaliana]
INLRSYIFHFIIMDHKMSMYLFVSYLAIFTLFFKGFVSSFPSGYNNGYNNGHGHGLTSNLNYRFYDRSCPRLQTIVKSGVWRAFKDDSRIAASLLRLHFHDCFVNGCDGSILLNDSEDFKGEKNAQPNRNSVRGFEVIEDIKSDIESSCPLTVSCADIVALAAREAVVLTGGPFWPVPLGRRDSLTASEQAANTNLPSPFEALENITAKFVTLGLDLKDVVVLSGAHTIGFAQCFVIKHRLFNFKGSGQPDPNLAASSALLSKLKDTCPNVDSSDSKLAALDAASSVKFDNAYYVNLMNNIGLLDSDQTLMTDPTAAALVKSYSENPYLFSRDFAVSMVKMGNIGVMTGSDGVIRGKCGFPG

SEQ ID NO: 103596 - protein, 350 aa, Arabidopsis thaliana; identical to SEQ ID NO: 30852
  peptide (1)..(350): Ceres Seq. ID no. 13613130
  misc_feature (64)..(314): Pfam Name: Peroxidase Pfam Description: Peroxidase
  misc_feature (1)..(350): Homolog of NCBI NO: 30694586 NR Description: peroxidase, putative [Arabidopsis thaliana]
  misc_feature (1)..(350): Homolog of NCBI NO: 1546702 NR Description: peroxidase; peroxidase ATP5a [Arabidopsis
  misc_feature (45)..(346): Homolog of NCBI NO: 21594792 NR Description: peroxidase [Arabidopsis thaliana]
  misc_feature (45)..(346): Homolog of NCBI NO: 15240141 NR Description: peroxidase, putative [Arabidopsis thaliana] Peroxidase 54 precursor (Atperox P54) (ATP29a) peroxidase [Arabidopsis thaliana] >gi|26452668|dbj|BAC43417.1|
  misc_feature (48)..(346): Homolog of NCBI NO: 1730490 NR Description: Peroxidase A2
  misc_feature (45)..(346): Homolog of NCBI NO: 21593262 NR Description: peroxidase [Arabidopsis thaliana]
  misc_feature (45)..(346): Homolog of NCBI NO: 15240140 NR Description: peroxidase, putative [Arabidopsis thaliana] Peroxidase 53 precursor (Atperox P53) (ATPA2) peroxidase [Arabidopsis thaliana] >gi|9759300|dbj|BAB09806.1|
  misc_feature (42)..(346): Homolog of NCBI NO: 5453379 NR Description: bacterial-induced peroxidase precursor [Gossypium
  misc_feature (48)..(346): Homolog of NCBI NO: 11513747 NR Description: Chain A, Arabidopsis Thaliana Peroxidase A2
  misc_feature (5)..(346): Homolog of NCBI NO: 15219493 NR Description: peroxidase, putative [Arabidopsis thaliana] Peroxidase 9 precursor (Atperox P9) (ATP18a) peroxidase; peroxidase ATP18a [Arabidopsis thaliana]

SEQ ID NO: 103597 - protein, 346 aa, Arabidopsis thaliana; identical to SEQ ID NO: 30853
  peptide (1)..(346): Ceres Seq. ID no. 13613131
  misc_feature (60)..(310): Pfam Name: Peroxidase Pfam Description: Peroxidase
  misc_feature (1)..(346): Homolog of NCBI NO: 30694586 NR Description: peroxidase, putative [Arabidopsis thaliana]
  misc_feature (1)..(346): Homolog of NCBI NO: 1546702 NR Description: peroxidase; peroxidase ATP5a [Arabidopsis
  misc_feature (41)..(342): Homolog of NCBI NO: 21594792 NR Description: peroxidase [Arabidopsis thaliana]
  misc_feature (41)..(342): Homolog of NCBI NO: 15240141 NR Description: peroxidase, putative [Arabidopsis thaliana] Peroxidase 54 precursor (Atperox P54) (ATP29a) peroxidase [Arabidopsis thaliana] >gi|26452668|dbj|BAC43417.1|
  misc_feature (44)..(342): Homolog of NCBI NO: 1730490 NR Description: Peroxidase A2
  misc_feature (41)..(342): Homolog of NCBI NO: 21593262 NR Description: peroxidase [Arabidopsis thaliana]
  misc_feature (41)..(342): Homolog of NCBI NO: 15240140 NR Description: peroxidase, putative [Arabidopsis thaliana] Peroxidase 53 precursor (Atperox P53) (ATPA2) peroxidase [Arabidopsis thaliana] >gi|9759300|dbj|BAB09806.1|
  misc_feature (38)..(342): Homolog of NCBI NO: 5453379 NR Description: bacterial-induced peroxidase precursor [Gossypium
  misc_feature (44)..(342): Homolog of NCBI NO: 11513747 NR Description: Chain A, Arabidopsis Thaliana Peroxidase A2
  misc_feature (1)..(342): Homolog of NCBI NO: 15219493 NR Description: peroxidase, putative [Arabidopsis thaliana] Peroxidase 9 precursor (Atperox P9) (ATP18a) peroxidase; peroxidase ATP18a [Arabidopsis thaliana]

SEQ ID NO: 103598 - DNA, 1510 bp, Arabidopsis thaliana
  misc_feature (1)..(1510): Ceres Seq. ID no. 13613136
  misc_feature: MA Experiment ID: 108434 Result: Down-regulated in Transcription
  misc_feature: MA Experiment 108434 PARAMETER Experiment Name: At_Root_Tips_cDNA_P Parameter: Tissue Value: Root Tips
  misc_feature: MA Experiment ID: 108488 Result: Down-regulated in Transcription
  misc_feature: MA Experiment ID: 20000265 Result: Up-regulated in Transcription
  misc_feature: MA Experiment 20000265 PARAMETER Experiment Name: At_Open_Flower_P Parameter: Age (day) Value: 21
  misc_feature: MA Experiment 20000265 PARAMETER Experiment Name: At_Open_Flower_P Parameter: Plant Line Value: WS
  misc_feature: MA Experiment 20000265 PARAMETER Experiment Name: At_Open_Flower_P Parameter: Tissue Value: Closed Flower vs. Whole Plant
  misc_feature: MA Experiment ID: 20000495 Result: Up-regulated in Transcription
  misc_feature: MA Experiment 20000495 PARAMETER Experiment Name: At_Guard_Cells_P Parameter: Harvest Date Value: 8/2/2002
  misc_feature: MA Experiment 20000495 PARAMETER Experiment Name: At_Guard_Cells_P Parameter: Organism Value: A. thaliana
  misc_feature: MA Experiment 20000495 PARAMETER Experiment Name: At_Guard_Cells_P Parameter: Tissue Value: Guard Cells vs. Leaves
  misc_feature: MA Experiment ID: 20000794 Result: Up-regulated in Transcription
  misc_feature: MA Experiment 20000794 PARAMETER Experiment Name: At_Petals_P Parameter: Age (day) Value: 23-25 days
  misc_feature: MA Experiment 20000794 PARAMETER Experiment Name: At_Petals_P Parameter: Plant Line Value: WS
  misc_feature: MA Experiment 20000794 PARAMETER Experiment Name: At_Petals_P Parameter: Tissue Value: Petals vs. Whole plant
  misc_feature: MA Experiment ID: 20001248 Result: Down-regulated in Transcription
  misc_feature: MA Experiment 20001248 PARAMETER Experiment Name: At_Far-red-induction_P Parameter: Age (day) Value: 7
  misc_feature: MA Experiment 20001248 PARAMETER Experiment Name: At_Far-red-induction_P Parameter: Light Value: Far-red vs. White
  misc_feature: MA Experiment 20001248 PARAMETER Experiment Name: At_Far-red-induction_P Parameter: Organism Value: A. thaliana
  misc_feature: MA Experiment 20001248 PARAMETER Experiment Name: At_Far-red-induction_P Parameter: Plant Line Value: Columbia
  misc_feature: MA Experiment 20001248 PARAMETER Experiment Name: At_Far-red-induction_P Parameter: Timepoint (hr) Value: 4
  misc_feature: MA Experiment 20001248 PARAMETER Experiment Name: At_Far-red-induction_P Parameter: Tissue Value: Whole Plant
  misc_feature: MA Experiment ID: 20001905 Result: Up-regulated in Transcription
  misc_feature: MA Experiment 20001905 PARAMETER Experiment Name: At_Drought_Reproduction_P Parameter: Age (day) Value: 40
  misc_feature: MA Experiment 20001905 PARAMETER Experiment Name: At_Drought_Reproduction_P Parameter: Organism Value: A. thaliana
  misc_feature: MA Experiment 20001905 PARAMETER Experiment Name: At_Drought_Reproduction_P Parameter: Plant Line Value: WS
  misc_feature: MA Experiment 20001905 PARAMETER Experiment Name: At_Drought_Reproduction_P Parameter: Timepoint (day) Value: 10
  misc_feature: MA Experiment 20001905 PARAMETER Experiment Name: At_Drought_Reproduction_P Parameter: Tissue Value: Rosettes
  misc_feature: MA Experiment 20001905 PARAMETER Experiment Name: At_Drought_Reproduction_P Parameter: Treatment Value: Drought vs. No Drought
actttattttatttgtttcttagaatctttttcacgcaaatgcaaaccaccaacaaatctatattctagcatgatgatgaagtagctacttgcttcttcttcttcttcttcttaaattttggggtttttactttttggtgaagacagccatgtttcaaagattattactcttccttctcattgctcttctgctccaatcttctttccttttagagatttcctctgctctcaaggaaggaaaaacatgtataacaaacagcaactgtgacgctggattacactgcgaaacatgtatagccaacactgattttagacctagatgctccagaacccaacccatcaaccccatcaccaaggcaaaggggttgccttttaacaagtattcatggttaaccacacacaactcttttgctcgtttgggggaagtatcacggaccggttctgctattttggctcctactaaccagcaagattcaatcacaagccaactcaataatggtgtaagagggtttatgctcgacatgtatgacttccaaaacgatatctggctttgccattctttcgatggaacatgtttcaatttcaccgcttttcaaccggctattaacattttaagggagtttcaagtgtttctagagaagaacaaagaggaagttgtaacgattatcatcgaagattatgtgaaatcgcctaaaggtctcacaaaagtgtttgatgcggctggcttacgaaagttcatgtttccagtatctagaatgcccaaaaatggaggggactggccaaggcttgatgacatggtgcgaaaaaaccaacggttgctagtttttacatccgattcacataaagaagcaaccgaagggatcgcctatcaatggaagtatatggttgagaatcaatatggaaatggagggttgaaggtaggagtgtgtccaaatagagctcaatcagcgccaatgagcgataaatcaaaatctcttgttcttgtgaaccatttccctgatgctgcggatgtgatagtagcatgtaagcaaaactcagcttctcttcttgaatccataaagacatgttaccaagccgcgggacagcgatggcctaacttcatagcagtcgatttctacaagagaagcgatggtggaggagctccgcaagcggttgatgttgcgaatggcaatttgatatgcggttgcgataactttgcagcgtgcaaggctgacggcaaatgtggatagtaagaaagactgagccaccagaagcaactcccataaccaaaggctttctgcgtttgttgtcacctttgtgtcatcttttccataaagttttagctagtgtagtaacggttagtttttgttttagattatttagagattagtactgtactggttagtttcattactctaaatttcctaatcatatatgaactagtcaccgaataatctatatatactgaaaacactggtgactaaaaatgttaaacacaaagttatttaatagctaaaaatctaaattaggg

SEQ ID NO: 103599 - protein, 359 aa, Arabidopsis thaliana; identical to SEQ ID NO: 30404
  peptide (1)..(359): Ceres Seq. ID no. 13613137
  misc_feature (1)..(359): Homolog of NCBI NO: 18402763 NR Description: expressed protein [Arabidopsis thaliana]
  misc_feature (1)..(359): Homolog of NCBI NO: 15230348 NR Description: expressed protein [Arabidopsis thaliana]
  misc_feature (20)..(359): Homolog of NCBI NO: 27754722 NR Description: unknown protein [Arabidopsis thaliana]
  misc_feature (4)..(358): Homolog of NCBI NO: 38345461 NR Description: OSJNBa0042L16.16 [Oryza sativa (japonica
  misc_feature (23)..(359): Homolog of NCBI NO: 25407778 NR Description: MAP3K-like protein kinase [imported] -
  misc_feature (4)..(342): Homolog of NCBI NO: 34897530 NR Description: OSJNBa0042L16.2 [Oryza sativa (japonica
  misc_feature (1)..(359): Homolog of NCBI NO: 38637049 NR Description: MAP3K-like protein kinase [Oryza sativa (japonica
  misc_feature (4)..(359): Homolog of NCBI NO: 18425155 NR Description: expressed protein [Arabidopsis thaliana] Unknown protein [Arabidopsis thaliana]
  misc_feature (4)..(359): Homolog of NCBI NO: 21593427 NR Description: unknown [Arabidopsis thaliana]
  misc_feature (7)..(358): Homolog of NCBI NO: 38345515 NR Description: OSJNBa0039K24.18 [Oryza sativa (japonica

SEQ ID NO: 103600 - protein, 238 aa, Arabidopsis thaliana; identical to SEQ ID NO: 30405
  peptide (1)..(238): Ceres Seq. ID no. 13613138
  misc_feature (1)..(238): Homolog of NCBI NO: 18402763 NR Description: expressed protein [Arabidopsis thaliana]
  misc_feature (1)..(238): Homolog of NCBI NO: 15230348 NR Description: expressed protein [Arabidopsis thaliana]
  misc_feature (1)..(238): Homolog of NCBI NO: 27754722 NR Description: unknown protein [Arabidopsis thaliana]
  misc_feature (1)..(237): Homolog of NCBI NO: 38345461 NR Description: OSJNBa0042L16.16 [Oryza sativa (japonica
  misc_feature (1)..(238): Homolog of NCBI NO: 25407778 NR Description: MAP3K-like protein kinase [imported] -
  misc_feature (1)..(221): Homolog of NCBI NO: 34897530 NR Description: OSJNBa0042L16.2 [Oryza sativa (japonica
  misc_feature (1)..(238): Homolog of NCBI NO: 38637049 NR Description: MAP3K-like protein kinase [Oryza sativa (japonica
  misc_feature (1)..(238): Homolog of NCBI NO: 18425155 NR Description: expressed protein [Arabidopsis thaliana] Unknown protein [Arabidopsis thaliana]
  misc_feature (1)..(238): Homolog of NCBI NO: 21593427 NR Description: unknown [Arabidopsis thaliana]
  misc_feature (1)..(237): Homolog of NCBI NO: 38345515 NR Description: OSJNBa0039K24.18 [Oryza sativa (japonica

SEQ ID NO: 103601 - protein, 235 aa, Arabidopsis thaliana; identical to SEQ ID NO: 30406
  peptide (1)..(235): Ceres Seq. ID no. 13613139
  misc_feature (1)..(235): Homolog of NCBI NO: 18402763 NR Description: expressed protein [Arabidopsis thaliana]
  misc_feature (1)..(235): Homolog of NCBI NO: 15230348 NR Description: expressed protein [Arabidopsis thaliana]
  misc_feature (1)..(235): Homolog of NCBI NO: 27754722 NR Description: unknown protein [Arabidopsis thaliana]
  misc_feature (1)..(234): Homolog of NCBI NO: 38345461 NR Description: OSJNBa0042L16.16 [Oryza sativa (japonica
  misc_feature (1)..(235): Homolog of NCBI NO: 25407778 NR Description: MAP3K-like protein kinase [imported] -
  misc_feature (1)..(218): Homolog of NCBI NO: 34897530 NR Description: OSJNBa0042L16.2 [Oryza sativa (japonica
  misc_feature (1)..(235): Homolog of NCBI NO: 38637049 NR Description: MAP3K-like protein kinase [Oryza sativa (japonica
  misc_feature (1)..(235): Homolog of NCBI NO: 18425155 NR Description: expressed protein [Arabidopsis thaliana] Unknown protein [Arabidopsis thaliana]
  misc_feature (1)..(235): Homolog of NCBI NO: 21593427 NR Description: unknown [Arabidopsis thaliana]
  misc_feature (1)..(234): Homolog of NCBI NO: 38345515 NR Description: OSJNBa0039K24.18 [Oryza sativa (japonica

SEQ ID NO: 103602 - DNA, 1383 bp, Arabidopsis thaliana
  misc_feature (1)..(1383): Ceres Seq. ID no. 13613149
  misc_feature: MA Experiment ID: 108462 Result: Down-regulated in Transcription
  misc_feature: MA Experiment 108462 PARAMETER Experiment Name: At_Germinating_Seeds_cDNA_P Parameter: Age (day) Value: 2 vs. 0
  misc_feature: MA Experiment 108462 PARAMETER Experiment Name: At_Germinating_Seeds_cDNA_P Parameter: Tissue Value: Germinating Seeds
  misc_feature: MA Experiment ID: 20000112 Result: Up-regulated in Transcription
  misc_feature: MA Experiment 20000112 PARAMETER Experiment Name: At_42deg_Heat_cDNA_P Parameter: Temperature (deg C) Value: 42 vs. 22
  misc_feature: MA Experiment 20000112 PARAMETER Experiment Name: At_42deg_Heat_cDNA_P Parameter: Timepoint (hr) Value: 2
  misc_feature: MA Experiment 20000112 PARAMETER Experiment Name: At_42deg_Heat_cDNA_P Parameter: Tissue Value: Aerial
  misc_feature: MA Experiment ID: 20000113 Result: Up-regulated in Transcription
  misc_feature: MA Experiment 20000113 PARAMETER Experiment Name: At_42deg_Heat_cDNA_P Parameter: Temperature (deg C) Value: 42 vs. 22
  misc_feature: MA Experiment 20000113 PARAMETER Experiment Name: At_42deg_Heat_cDNA_P Parameter: Timepoint (hr) Value: 8
  misc_feature: MA Experiment 20000113 PARAMETER Experiment Name: At_42deg_Heat_cDNA_P Parameter: Tissue Value: Aerial
  misc_feature: MA Experiment ID: 20000184 Result: Down-regulated in Transcription
  misc_feature: MA Experiment 20000184 PARAMETER Experiment Name: At_Shoots__P Parameter: Age (day) Value: 7
  misc_feature: MA Experiment 20000184 PARAMETER Experiment Name: At_Shoots__P Parameter: Tissue Value: Shoots vs. Whole Plant
gaattgacggaggtccgttactctgaatccttgtattcgcattaaccctaactttttctgcttcccaagcgtctcgaaatctgaatccagagattaaacaaaaattgaacggacttgctttgacacagcagaccgtaaatcgggatgggtgctcctaagcagaaatggactcaagaagaagagtcagctttaaagtctggagttataaagcatggacctggtaaatggcgcacaattctcaaagatcctgaatttagcggagtcttgtacctgcgttccaatgttgatcttaaggacaaatggagaaacatgagtgtcatggcaaatggctggggatcgcgcgaaaagtctaggttagctgttaaaaggacgttctcccttcctaaacaggaagagaactcactagccctaaccaattctttgcaaagtgatgaagaaaatgtggatgcgacctctggactccaagtttcttctaatcctcctccaaggagacctaatgtaaggttggatagccttataatggaagcaatagctaccctgaaagaacctggtggctgtaacaaaacaacaattggtgcctacattgaggatcaatatcatgctccaccagacttcaaacgcttgttgtctaccaagctaaagtacttgacatcttgcgggaaacttgtgaaggttaaacgtaagtacagaattccaaactccactcccttgtcttcccacaggagaaaaggtctgggggtgtttggaggaaaacagaggacttcttctttgccttcacctaaaacagacatagatgaagtgaattttcagacaaggtcacagattgatacagagatagccagaatgaagagtatgaacgtacatgaggcggcagcagttgcagcacaggcagtagcagaggcagaagctgccatggcagaggctgaggaagctgcaaaggaagcggaggcagcagaagccgaagcagaagcagctcaagctttcgctgaggaagcttcaaagacattgaaaggaagaaacatctgcaaaatgatgatccgtgcctgaggtaatggaaagcgagagaagaaggagactaaatgtgaagagagagtagagagaagcctagtgtttgtgttgatcattctctttacttgggaagttgttttttagtagtaagcaatcaaatatgtttgtcagtatgtcgtcgctctgactcttttgattcctgcacaacttttgggaaaaaatgttttatttggctcttctcactctccaatatacatacaactatcgttagtaatgtgtataatttatagaccgatctatctatgcactatcatgcttatcgccaatgagcattttgattatgtatgtattatcaattaatagtagtactgtttt

SEQ ID NO: 103603 - protein, 300 aa, Arabidopsis thaliana; identical to SEQ ID NO: 74539
  peptide (1)..(300): Ceres Seq. ID no. 13613150
  misc_feature (123)..(185): Pfam Name: linker histone H1 and H5 family Pfam Description: linker histone H1 and H5 family
  misc_feature (1)..(300): Homolog of NCBI NO: 18402853 NR Description: DNA-binding protein PcMYB1 -related [Arabidopsis
  misc_feature (1)..(300): Homolog of NCBI NO: 18481420 NR Description: telomere repeat binding factor 1 [Arabidopsis
  misc_feature (1)..(300): Homolog of NCBI NO: 21593573 NR Description: DNA-binding protein PcMYB1, putative [Arabidopsis
  misc_feature (1)..(297): Homolog of NCBI NO: 25405344 NR Description: hypothetical protein F2J10.16 [imported] -
  misc_feature (1)..(297): Homolog of NCBI NO: 34105723 NR Description: Single myb histone 6 [Zea mays subsp. mays]
  misc_feature (1)..(292): Homolog of NCBI NO: 34912214 NR Description: putative telomere repeat binding factor [Oryza
  misc_feature (1)..(300): Homolog of NCBI NO: 33286863 NR Description: Single myb histone 1 [Zea mays subsp. mays]
  misc_feature (1)..(297): Homolog of NCBI NO: 34105719 NR Description: Single myb histone 5 [Zea mays subsp. mays]
  misc_feature (1)..(291): Homolog of NCBI NO: 15240783 NR Description: telomere repeat binding factor 2 (TRB2) thaliana] >gi|30698320|ref|NP_851286.1| telomere repeat binding
  misc_feature (1)..(291): Homolog of NCBI NO: 18481426 NR Description: telomere repeat binding factor 2 [Arabidopsis

SEQ ID NO: 103604 - protein, 245 aa, Arabidopsis thaliana; identical to SEQ ID NO: 74540
  peptide (1)..(245): Ceres Seq. ID no. 13613151
  misc_feature (68)..(130): Pfam Name: linker histone H1 and H5 family Pfam Description: linker histone H1 and H5 family
  misc_feature (1)..(245): Homolog of NCBI NO: 18402853 NR Description: DNA-binding protein PcMYB1 -related [Arabidopsis
  misc_feature (1)..(245): Homolog of NCBI NO: 18481420 NR Description: telomere repeat binding factor 1 [Arabidopsis
  misc_feature (1)..(245): Homolog of NCBI NO: 21593573 NR Description: DNA-binding protein PcMYB1, putative [Arabidopsis
  misc_feature (1)..(242): Homolog of NCBI NO: 25405344 NR Description: hypothetical protein F2J10.16 [imported] -
  misc_feature (1)..(242): Homolog of NCBI NO: 34105723 NR Description: Single myb histone 6 [Zea mays subsp. mays]
  misc_feature (1)..(237): Homolog of NCBI NO: 34912214 NR Description: putative telomere repeat binding factor [Oryza
  misc_feature (1)..(245): Homolog of NCBI NO: 33286863 NR Description: Single myb histone 1 [Zea mays subsp. mays]
  misc_feature (1)..(242): Homolog of NCBI NO: 34105719 NR Description: Single myb histone 5 [Zea mays subsp. mays]
  misc_feature (1)..(236): Homolog of NCBI NO: 15240783 NR Description: telomere repeat binding factor 2 (TRB2) thaliana] >gi|30698320|ref|NP_851286.1| telomere repeat binding
  misc_feature (1)..(236): Homolog of NCBI NO: 18481426 NR Description: telomere repeat binding factor 2 [Arabidopsis

SEQ ID NO: 103605 - protein, 242 aa, Arabidopsis thaliana; identical to SEQ ID NO: 74541
  peptide (1)..(242): Ceres Seq. ID no. 13613152
  misc_feature (65)..(127): Pfam Name: linker histone H1 and H5 family Pfam Description: linker histone H1 and H5 family
  misc_feature (1)..(242): Homolog of NCBI NO: 18402853 NR Description: DNA-binding protein PcMYB1 -related [Arabidopsis
  misc_feature (1)..(242): Homolog of NCBI NO: 18481420 NR Description: telomere repeat binding factor 1 [Arabidopsis
  misc_feature (1)..(242): Homolog of NCBI NO: 21593573 NR Description: DNA-binding protein PcMYB1, putative [Arabidopsis
  misc_feature (1)..(239): Homolog of NCBI NO: 25405344 NR Description: hypothetical protein F2J10.16 [imported] -
  misc_feature (1)..(239): Homolog of NCBI NO: 34105723 NR Description: Single myb histone 6 [Zea mays subsp. mays]
  misc_feature (1)..(234): Homolog of NCBI NO: 34912214 NR Description: putative telomere repeat binding factor [Oryza
  misc_feature (1)..(242): Homolog of NCBI NO: 33286863 NR Description: Single myb histone 1 [Zea mays subsp. mays]
  misc_feature (1)..(239): Homolog of NCBI NO: 34105719 NR Description: Single myb histone 5 [Zea mays subsp. mays]
  misc_feature (1)..(233): Homolog of NCBI NO: 15240783 NR Description: telomere repeat binding factor 2 (TRB2) thaliana] >gi|30698320|ref|NP_851286.1| telomere repeat binding
  misc_feature (1)..(233): Homolog of NCBI NO: 18481426 NR Description: telomere repeat binding factor 2 [Arabidopsis

SEQ ID NO: 103606 - DNA, 1478 bp, Arabidopsis thaliana
  misc_feature (1)..(1478): Ceres Seq. ID no. 13613153
  misc_feature: MA Experiment ID: 20000184 Result: Down-regulated in Transcription
  misc_feature: MA Experiment 20000184 PARAMETER Experiment Name: At_Shoots__P Parameter: Age (day) Value: 7
  misc_feature: MA Experiment 20000184 PARAMETER Experiment Name: At_Shoots__P Parameter: Tissue Value: Shoots vs. Whole Plant
  misc_feature: MA Experiment ID: 20000185 Result: Down-regulated in Transcription
  misc_feature: MA Experiment 20000185 PARAMETER Experiment Name: At_Roots__P Parameter: Age (day) Value: 7 vs. 21
  misc_feature: MA Experiment 20000185 PARAMETER Experiment Name: At_Roots__P Parameter: Organism Value: A. thaliana
  misc_feature: MA Experiment 20000185 PARAMETER Experiment Name: At_Roots__P Parameter: Tissue Value: Roots vs. Whole Plant
  misc_feature: MA Experiment ID: 20000224 Result: Up-regulated in Transcription
  misc_feature: MA Experiment ID: 20000439 Result: Down-regulated in Transcription
  misc_feature: MA Experiment 20000439 PARAMETER Experiment Name: At_Roots__P Parameter: Age (day) Value: 14 vs. 21
  misc_feature: MA Experiment 20000439 PARAMETER Experiment Name: At_Roots__P Parameter: Organism Value: A. thaliana
  misc_feature: MA Experiment 20000439 PARAMETER Experiment Name: At_Roots__P Parameter: Tissue Value: Roots vs. Whole Plant
gtactcagtacttacatcttcttcatctgacgatagcaaaaatgacaagcaatccctaatttcgcctcaaaaaatcccaaaaagcttcgttcttttttagtcatcatcatcttcttcttttcttcttcttcggttgctaaatcgaagatggcgactgctctggtttctcctcttacttcacaactcaaccatgaagctgtctgttccaagtttgtgttacccaaatcgccgttcatgtcgggatctaagctcttttcatcgaacatgccttgctctactgttcctagacgcacaagaagatcacactgctttgcttctgctaaagatatgagctttgaccatatccctaaacaatttcgtggagacaatctcaaagacggagtgatgcagaacttcaagaacgtaccacaatatttttacgggcttaattcagctcaaatggatatgttcatgacagaagatagccctgtccgtaggcaagcggaaaaagttacagaggaaagcatctcgtctagaaataactatttgaacaatggaggaatatggagtatgtccggtatgaatgcagcagatgctagaagatatagcatgagtgtccagatgtacagaggtggaggtggcggcggaggatctgaaagaccaagaactgctcctccagatttgccttctttgctattggatgctcgcatatgctaccttggcatgccaatcgtacctgcagttactgagttactcgttgctcaatttatgtggttagactatgataacccaacaaagcccatctacttatatataaattcacccgggacccagaatgagaagatggaaactgttggatcagaaacagaggcttatgccatagccgatactatttcttattgcaaatcagatgtatacactatcaattgtggcatggcttttggtcaagcagcaatgcttctttctctcgggaaaaaaggttatcgtgccgtacaaccacattcatcaacaaaattatatctgccaaaagtaaacagatcgagtggagctgccatagacatgtggataaaggccaaggaacttgatgcaaataccgagtactacatcgagctgttagctaagggaacagggaaatccaaagagcagatcaacgaggacatcaagcgacctaaatatctccaagctcaagcagccattgactatggaattgcagacaagatagctgactcgcaggacagttctttcgagaaacgggattacgatgggacccttgcccagagagctatgagacctggaggaggcagtccagcagctccagccggactaagatgatcaattcccaccagaaagaaagaggttgaatcctaatttcctagtcactctggaatatgtagctcttacaatctataagcaaacacatgtggtagtaacatacaaaaaagtgttggcaaaaagggaaataacatcaaaagttatctaggtggaaagttatttgtatt

SEQ ID NO: 103607 - protein, 387 aa, Arabidopsis thaliana; identical to SEQ ID NO: 21252
  peptide (1)..(387): Ceres Seq. ID no. 13613154
  misc_feature (160)..(355): Pfam Name: Clp protease Pfam Description: Clp protease
  misc_feature (1)..(387): Homolog of NCBI NO: 18402863 NR Description: ATP-dependent Clp protease proteolytic subunit [Arabidopsis thaliana] >gi|25453549|pir||T52451 endopeptidase Clp
  misc_feature (169)..(364): Homolog of NCBI NO: 13812146 NR Description: ATP-dependent Clp protease proteolytic subunit
  misc_feature (166)..(355): Homolog of NCBI NO: 22299302 NR Description: ATP-dependent Clp protease proteolytic subunit 3
  misc_feature (164)..(351): Homolog of NCBI NO: 18390982 NR Description: ATP-dependent Clp protease proteolytic subunit
  misc_feature (160)..(355): Homolog of NCBI NO: 33240836 NR Description: Protease subunit of ATP-dependent Clp protease
  misc_feature (161)..(356): Homolog of NCBI NO: 17231850 NR Description: ATP-dependent Clp protease proteolytic subunit
  misc_feature (160)..(355): Homolog of NCBI NO: 33861869 NR Description: Clp protease proteolytic subunit [Prochlorococcus subsp. pastoris str. CCMP1378] >gi|33640237|emb|CAE19772.1| Clp proteolytic subunit [Prochlorococcus marinus subsp. pastoris str.
  misc_feature (161)..(356): Homolog of NCBI NO: 23126723 NR Description: hypothetical protein [Nostoc punctiforme]
  misc_feature (160)..(355): Homolog of NCBI NO: 33862588 NR Description: Clp protease proteolytic subunit [Prochlorococcus str. MIT 9313] >gi|33634504|emb|CAE20490.1| Clp protease
  misc_feature (160)..(355): Homolog of NCBI NO: 33866182 NR Description: ATP-dependent Clp protease proteolytic subunit 4

SEQ ID NO: 103608 - protein, 358 aa, Arabidopsis thaliana; identical to SEQ ID NO: 21253
  peptide (1)..(358): Ceres Seq. ID no. 13613155
  misc_feature (131)..(326): Pfam Name: Clp protease Pfam Description: Clp protease
  misc_feature (1)..(358): Homolog of NCBI NO: 18402863 NR Description: ATP-dependent Clp protease proteolytic subunit [Arabidopsis thaliana] >gi|25453549|pir||T52451 endopeptidase Clp
  misc_feature (140)..(335): Homolog of NCBI NO: 13812146 NR Description: ATP-dependent Clp protease proteolytic subunit
  misc_feature (137)..(326): Homolog of NCBI NO: 22299302 NR Description: ATP-dependent Clp protease proteolytic subunit 3
  misc_feature (135)..(322): Homolog of NCBI NO: 18390982 NR Description: ATP-dependent Clp protease proteolytic subunit
  misc_feature (131)..(326): Homolog of NCBI NO: 33240836 NR Description: Protease subunit of ATP-dependent Clp protease
  misc_feature (132)..(327): Homolog of NCBI NO: 17231850 NR Description: ATP-dependent Clp protease proteolytic subunit
  misc_feature (131)..(326): Homolog of NCBI NO: 33861869 NR Description: Clp protease proteolytic subunit [Prochlorococcus subsp. pastoris str. CCMP1378] >gi|33640237|emb|CAE19772.1| Clp proteolytic subunit [Prochlorococcus marinus subsp. pastoris str.
  misc_feature (132)..(327): Homolog of NCBI NO: 23126723 NR Description: hypothetical protein [Nostoc punctiforme]
  misc_feature (131)..(326): Homolog of NCBI NO: 33862588 NR Description: Clp protease proteolytic subunit [Prochlorococcus str. MIT 9313] >gi|33634504|emb|CAE20490.1| Clp protease
  misc_feature (131)..(326): Homolog of NCBI NO: 33866182 NR Description: ATP-dependent Clp protease proteolytic subunit 4

SEQ ID NO: 103609 - protein, 348 aa, Arabidopsis thaliana; identical to SEQ ID NO: 21254
  peptide (1)..(348): Ceres Seq. ID no. 13613156
  misc_feature (121)..(316): Pfam Name: Clp protease Pfam Description: Clp protease
  misc_feature (1)..(348): Homolog of NCBI NO: 18402863 NR Description: ATP-dependent Clp protease proteolytic subunit [Arabidopsis thaliana] >gi|25453549|pir||T52451 endopeptidase Clp
  misc_feature (130)..(325): Homolog of NCBI NO: 13812146 NR Description: ATP-dependent Clp protease proteolytic subunit
  misc_feature (127)..(316): Homolog of NCBI NO: 22299302 NR Description: ATP-dependent Clp protease proteolytic subunit 3
  misc_feature (125)..(312): Homolog of NCBI NO: 18390982 NR Description: ATP-dependent Clp protease proteolytic subunit
  misc_feature (121)..(316): Homolog of NCBI NO: 33240836 NR Description: Protease subunit of ATP-dependent Clp protease
  misc_feature (122)..(317): Homolog of NCBI NO: 17231850 NR Description: ATP-dependent Clp protease proteolytic subunit
  misc_feature (121)..(316): Homolog of NCBI NO: 33861869 NR Description: Clp protease proteolytic subunit [Prochlorococcus subsp. pastoris str. CCMP1378] >gi|33640237|emb|CAE19772.1| Clp proteolytic subunit [Prochlorococcus marinus subsp. pastoris str.
  misc_feature (122)..(317): Homolog of NCBI NO: 23126723 NR Description: hypothetical protein [Nostoc punctiforme]
  misc_feature (121)..(316): Homolog of NCBI NO: 33862588 NR Description: Clp protease proteolytic subunit [Prochlorococcus str. MIT 9313] >gi|33634504|emb|CAE20490.1| Clp protease
  misc_feature (121)..(316): Homolog of NCBI NO: 33866182 NR Description: ATP-dependent Clp protease proteolytic subunit 4

SEQ ID NO: 103610 - DNA, 1277 bp, Arabidopsis thaliana
  misc_feature (1)..(1277): Ceres Seq. ID no. 13613165
  misc_feature: MA Experiment ID: 108433 Result: Down-regulated in Transcription
  misc_feature: MA Experiment 108433 PARAMETER Experiment Name: At_rhl_Mutant2_cDNA_P Parameter: Age (day) Value: 7
  misc_feature: MA Experiment 108433 PARAMETER Experiment Name: At_rhl_Mutant2_cDNA_P Parameter: Organism Value: A. thaliana
  misc_feature: MA Experiment 108433 PARAMETER Experiment Name: At_rhl_Mutant2_cDNA_P Parameter: Plant Line Value: rhl Mutant vs. wt landsburg
  misc_feature: MA Experiment 108433 PARAMETER Experiment Name: At_rhl_Mutant2_cDNA_P Parameter: Tissue Value: Roots
  misc_feature: MA Experiment ID: 108434 Result: Up-regulated in Transcription
  misc_feature: MA Experiment 108434 PARAMETER Experiment Name: At_Root_Tips_cDNA_P Parameter: Tissue Value: Root Tips
  misc_feature: MA Experiment ID: 108464 Result: Down-regulated in Transcription
  misc_feature: MA Experiment 108464 PARAMETER Experiment Name: At_Germinating_Seeds_cDNA_P Parameter: Age (day) Value: 4 vs. 0
  misc_feature: MA Experiment 108464 PARAMETER Experiment Name: At_Germinating_Seeds_cDNA_P Parameter: Tissue Value: Germinating Seeds
  misc_feature: MA Experiment ID: 108576 Result: Up-regulated in Transcription
  misc_feature: MA Experiment 108576 PARAMETER Experiment Name: At_42deg_Heat_cDNA_P Parameter: Temperature (deg C) Value: 42 vs. 22
  misc_feature: MA Experiment 108576 PARAMETER Experiment Name: At_42deg_Heat_cDNA_P Parameter: Timepoint (hr) Value: 1
  misc_feature: MA Experiment 108576 PARAMETER Experiment Name: At_42deg_Heat_cDNA_P Parameter: Tissue Value: Aerial
  misc_feature: MA Experiment ID: 108577 Result: Up-regulated in Transcription
  misc_feature: MA Experiment 108577 PARAMETER Experiment Name: At_42deg_Heat_cDNA_P Parameter: Temperature (deg C) Value: 42 vs. 22
  misc_feature: MA Experiment 108577 PARAMETER Experiment Name: At_42deg_Heat_cDNA_P Parameter: Timepoint (hr) Value: 6
  misc_feature: MA Experiment 108577 PARAMETER Experiment Name: At_42deg_Heat_cDNA_P Parameter: Tissue Value: Aerial
  misc_feature: MA Experiment ID: 108579 Result: Up-regulated in Transcription
  misc_feature: MA Experiment 108579 PARAMETER Experiment Name: At_4deg_Cold_cDNA_P Parameter: Temperature (deg C) Value: 4 vs. 22
  misc_feature: MA Experiment 108579 PARAMETER Experiment Name: At_4deg_Cold_cDNA_P Parameter: Timepoint (hr) Value: 6
  misc_feature: MA Experiment 108579 PARAMETER Experiment Name: At_4deg_Cold_cDNA_P Parameter: Tissue Value: Aerial
  misc_feature: MA Experiment ID: 108595 Result: Up-regulated in Transcription
  misc_feature: MA Experiment 108595 PARAMETER Experiment Name: At_Ler-pi_Ovule_cDNA_P Parameter: Plant Line Value: null
  misc_feature: MA Experiment ID: 108607 Result: Down-regulated in Transcription
  misc_feature: MA Experiment 108607 PARAMETER Experiment Name: At_100uM_ABA_cDNA_P Parameter: Timepoint (hr) Value: 4
  misc_feature: MA Experiment 108607 PARAMETER Experiment Name: At_100uM_ABA_cDNA_P Parameter: Tissue Value: Aerial
  misc_feature: MA Experiment 108607 PARAMETER Experiment Name: At_100uM_ABA_cDNA_P Parameter: Treatment Value: 100uM ABA vs. No Treatment
  misc_feature: MA Experiment ID: 108668 Result: Down-regulated in Transcription
  misc_feature: MA Experiment 108668 PARAMETER Experiment Name: At_2mM_SA_cDNA_P Parameter: Plant Line Value: WS
  misc_feature: MA Experiment 108668 PARAMETER Experiment Name: At_2mM_SA_cDNA_P Parameter: Timepoint (hr) Value: 6
  misc_feature: MA Experiment 108668 PARAMETER Experiment Name: At_2mM_SA_cDNA_P Parameter: Treatment Value: 2mM SA vs. No Treatment
  misc_feature: MA Experiment ID: 20000070 Result: Down-regulated in Transcription
  misc_feature: MA Experiment 20000070 PARAMETER Experiment Name: At_100uM_ABA_Mutants_cDNA_P Parameter: Plant Line Value: CS24
  misc_feature: MA Experiment 20000070 PARAMETER Experiment Name: At_100uM_ABA_Mutants_cDNA_P Parameter: Timepoint (hr) Value: 6
  misc_feature: MA Experiment 20000070 PARAMETER Experiment Name: At_100uM_ABA_Mutants_cDNA_P Parameter: Tissue Value: Aerial
  misc_feature: MA Experiment 20000070 PARAMETER Experiment Name: At_100uM_ABA_Mutants_cDNA_P Parameter: Treatment Value: 100uM ABA vs. No Treatment
  misc_feature: MA Experiment ID: 20000093 Result: Up-regulated in Transcription
  misc_feature: MA Experiment 20000093 PARAMETER Experiment Name: At_42deg_Heat_cDNA_P Parameter: Temperature (deg C) Value: 42 vs. 22
  misc_feature: MA Experiment 20000093 PARAMETER Experiment Name: At_42deg_Heat_cDNA_P Parameter: Timepoint (hr) Value: 0.5
  misc_feature: MA Experiment 20000093 PARAMETER Experiment Name: At_42deg_Heat_cDNA_P Parameter: Tissue Value: Aerial
  misc_feature: MA Experiment ID: 20000111 Result: Up-regulated in Transcription
  misc_feature: MA Experiment 20000111 PARAMETER Experiment Name: At_42deg_Heat_cDNA_P Parameter: Temperature (deg C) Value: 42 vs. 22
  misc_feature: MA Experiment 20000111 PARAMETER Experiment Name: At_42deg_Heat_cDNA_P Parameter: Timepoint (hr) Value: 6
  misc_feature: MA Experiment 20000111 PARAMETER Experiment Name: At_42deg_Heat_cDNA_P Parameter: Tissue Value: Aerial
  misc_feature: MA Experiment ID: 20000112 Result: Up-regulated in Transcription
  misc_feature: MA Experiment 20000112 PARAMETER Experiment Name: At_42deg_Heat_cDNA_P Parameter: Temperature (deg C) Value: 42 vs. 22
  misc_feature: MA Experiment 20000112 PARAMETER Experiment Name: At_42deg_Heat_cDNA_P Parameter: Timepoint (hr) Value: 2
  misc_feature: MA Experiment 20000112 PARAMETER Experiment Name: At_42deg_Heat_cDNA_P Parameter: Tissue Value: Aerial
  misc_feature: MA Experiment ID: 20000113 Result: Up-regulated in Transcription
  misc_feature: MA Experiment 20000113 PARAMETER Experiment Name: At_42deg_Heat_cDNA_P Parameter: Temperature (deg C) Value: 42 vs. 22
  misc_feature: MA Experiment 20000113 PARAMETER Experiment Name: At_42deg_Heat_cDNA_P Parameter: Timepoint (hr) Value: 8
  misc_feature: MA Experiment 20000113 PARAMETER Experiment Name: At_42deg_Heat_cDNA_P Parameter: Tissue Value: Aerial
  misc_feature: MA Experiment ID: 20000144 Result: Up-regulated in Transcription
  misc_feature: MA Experiment 20000144 PARAMETER Experiment Name: At_42deg_Heat_cDNA_P Parameter: Temperature (deg C) Value: 42 vs. 22
  misc_feature: MA Experiment 20000144 PARAMETER Experiment Name: At_42deg_Heat_cDNA_P Parameter: Timepoint (hr) Value: 1
  misc_feature: MA Experiment 20000144 PARAMETER Experiment Name: At_42deg_Heat_cDNA_P Parameter: Tissue Value: Aerial
  misc_feature: MA Experiment ID: 20000171 Result: Up-regulated in Transcription
  misc_feature: MA Experiment 20000171 PARAMETER Experiment Name: At_42deg_Heat_P Parameter: Age (day) Value: 14
  misc_feature: MA Experiment 20000171 PARAMETER Experiment Name: At_42deg_Heat_P Parameter: Organism Value: A. thaliana
  misc_feature: MA Experiment 20000171 PARAMETER Experiment Name: At_42deg_Heat_P Parameter: Plant Line Value: WS
  misc_feature: MA Experiment 20000171 PARAMETER Experiment Name: At_42deg_Heat_P Parameter: Temperature (deg C) Value: 42 vs. 22
  misc_feature: MA Experiment 20000171 PARAMETER Experiment Name: At_42deg_Heat_P Parameter: Timepoint (hr) Value: 1
  misc_feature: MA Experiment 20000171 PARAMETER Experiment Name: At_42deg_Heat_P Parameter: Tissue Value: Aerial
  misc_feature: MA Experiment ID: 20000173 Result: Up-regulated in Transcription
  misc_feature: MA Experiment 20000173 PARAMETER Experiment Name: At_42deg_Heat_P Parameter: Age (day) Value: 14
  misc_feature: MA Experiment 20000173 PARAMETER Experiment Name: At_42deg_Heat_P Parameter: Organism Value: A. thaliana
  misc_feature: MA Experiment 20000173 PARAMETER Experiment Name: At_42deg_Heat_P Parameter: Plant Line Value: WS
  misc_feature: MA Experiment 20000173 PARAMETER Experiment Name: At_42deg_Heat_P Parameter: Temperature (deg C) Value: 42 vs. 22
  misc_feature: MA Experiment 20000173 PARAMETER Experiment Name: At_42deg_Heat_P Parameter: Timepoint (hr) Value: 6
  misc_feature: MA Experiment 20000173 PARAMETER Experiment Name: At_42deg_Heat_P Parameter: Tissue Value: Aerial
  misc_feature: MA Experiment ID: 20000179 Result: Up-regulated in Transcription
  misc_feature: MA Experiment 20000179 PARAMETER Experiment Name: At_Germinating_Seeds_P Parameter: Age (hr) Value: 6 vs. 0
  misc_feature: MA Experiment 20000179 PARAMETER Experiment Name: At_Germinating_Seeds_P Parameter: Tissue Value: Germinating Seeds
  misc_feature: MA Experiment ID: 20000180 Result: Up-regulated in Transcription
  misc_feature: MA Experiment 20000180 PARAMETER Experiment Name: At_Germinating_Seeds_P Parameter: Age (hr) Value: 24 vs. 0
  misc_feature: MA Experiment 20000180 PARAMETER Experiment Name: At_Germinating_Seeds_P Parameter: Tissue Value: Germinating Seeds
  misc_feature: MA Experiment ID: 20000182 Result: Down-regulated in Transcription
  misc_feature: MA Experiment 20000182 PARAMETER Experiment Name: At_2mM_SA_P Parameter: Age (day) Value: 14
  misc_feature: MA Experiment 20000182 PARAMETER Experiment Name: At_2mM_SA_P Parameter: Organism Value: A. thaliana
  misc_feature: MA Experiment 20000182 PARAMETER Experiment Name: At_2mM_SA_P Parameter: Plant Line Value: WS
  misc_feature: MA Experiment 20000182 PARAMETER Experiment Name: At_2mM_SA_P Parameter: Timepoint (hr) Value: 6
  misc_feature: MA Experiment 20000182 PARAMETER Experiment Name: At_2mM_SA_P Parameter: Tissue Value: Aerial
  misc_feature: MA Experiment 20000182 PARAMETER Experiment Name: At_2mM_SA_P Parameter: Treatment Value: 2mM SA vs. No Treatment
  misc_feature: MA Experiment ID: 20000185 Result: Up-regulated in Transcription
  misc_feature: MA Experiment 20000185 PARAMETER Experiment Name: At_Roots__P Parameter: Age (day) Value: 7 vs. 21
  misc_feature: MA Experiment 20000185 PARAMETER Experiment Name: At_Roots__P Parameter: Organism Value: A. thaliana
  misc_feature: MA Experiment 20000185 PARAMETER Experiment Name: At_Roots__P Parameter: Tissue Value: Roots vs. Whole Plant
  misc_feature: MA Experiment ID: 20000227 Result: Up-regulated in Transcription
  misc_feature: MA Experiment 20000227 PARAMETER Experiment Name: At_Root-Tips-vs-Tops_P Parameter: Tissue Value: Root Tips vs. Root Tops
  misc_feature: MA Experiment ID: 20000234 Result: Up-regulated in Transcription
  misc_feature: MA Experiment 20000234 PARAMETER Experiment Name: At_Siliques_P Parameter: Age (day) Value: 21
  misc_feature: MA Experiment 20000234 PARAMETER Experiment Name: At_Siliques_P Parameter: Organism Value: A. thaliana
  misc_feature: MA Experiment 20000234 PARAMETER Experiment Name: At_Siliques_P Parameter: Plant Line Value: WS
  misc_feature: MA Experiment 20000234 PARAMETER Experiment Name: At_Siliques_P Parameter: Tissue Value: Less Than 5mm Siliques vs. Whole Plant
  misc_feature: MA Experiment ID: 20000235 Result: Up-regulated in Transcription
  misc_feature: MA Experiment 20000235 PARAMETER Experiment Name: At_Siliques_P Parameter: Age (day) Value: 21
  misc_feature: MA Experiment 20000235 PARAMETER Experiment Name: At_Siliques_P Parameter: Organism Value: A. thaliana
  misc_feature: MA Experiment 20000235 PARAMETER Experiment Name: At_Siliques_P Parameter: Plant Line Value: WS
  misc_feature: MA Experiment 20000235 PARAMETER Experiment Name: At_Siliques_P Parameter: Tissue Value: 5-10mm Siliques vs. Whole Plant
  misc_feature: MA Experiment ID: 20000264 Result: Up-regulated in Transcription
  misc_feature: MA Experiment 20000264 PARAMETER Experiment Name: At_Open_Flower_P Parameter: Age (day) Value: 21
  misc_feature: MA Experiment 20000264 PARAMETER Experiment Name: At_Open_Flower_P Parameter: Plant Line Value: WS
  misc_feature: MA Experiment 20000264 PARAMETER Experiment Name: At_Open_Flower_P Parameter: Tissue Value: Open Flower vs. Whole Plant
  misc_feature: MA Experiment ID: 20000265 Result: Up-regulated in Transcription
  misc_feature: MA Experiment 20000265 PARAMETER Experiment Name: At_Open_Flower_P Parameter: Age (day) Value: 21
  misc_feature: MA Experiment 20000265 PARAMETER Experiment Name: At_Open_Flower_P Parameter: Plant Line Value: WS
  misc_feature: MA Experiment 20000265 PARAMETER Experiment Name: At_Open_Flower_P Parameter: Tissue Value: Closed Flower vs. Whole Plant
  misc_feature: MA Experiment ID: 20000286 Result: Up-regulated in Transcription
  misc_feature: MA Experiment 20000286 PARAMETER Experiment Name: At_Open_Flower_P Parameter: Age (day) Value: 21
  misc_feature: MA Experiment 20000286 PARAMETER Experiment Name: At_Open_Flower_P Parameter: Plant Line Value: WS
  misc_feature: MA Experiment 20000286 PARAMETER Experiment Name: At_Open_Flower_P Parameter: Tissue Value: Half Open vs. Whole Plant
  misc_feature: MA Experiment ID: 20000451 Result: Up-regulated in Transcription
  misc_feature: MA Experiment 20000451 PARAMETER Experiment Name: At_CS6879_Shoots-Roots_P Parameter: Age (day) Value: 14
  misc_feature: MA Experiment 20000451 PARAMETER Experiment Name: At_CS6879_Shoots-Roots_P Parameter: Organism Value: A. thaliana
  misc_feature: MA Experiment 20000451 PARAMETER Experiment Name: At_CS6879_Shoots-Roots_P Parameter: Plant Line Value: CS6879 vs. WS
  misc_feature: MA Experiment 20000451 PARAMETER Experiment Name: At_CS6879_Shoots-Roots_P Parameter: Tissue Value: Roots
  misc_feature: MA Experiment ID: 20001557 Result: Up-regulated in Transcription
  misc_feature: MA Experiment 20001557 PARAMETER Experiment Name: At_Drought_Soil_Dry_P Parameter: Age (day) Value: 27
  misc_feature: MA Experiment 20001557 PARAMETER Experiment Name: At_Drought_Soil_Dry_P Parameter: Organism Value: A. thaliana
  misc_feature: MA Experiment 20001557 PARAMETER Experiment Name: At_Drought_Soil_Dry_P Parameter: Plant Line Value: WS
  misc_feature: MA Experiment 20001557 PARAMETER Experiment Name: At_Drought_Soil_Dry_P Parameter: Post Timepoint (hr) Value: 3
  misc_feature: MA Experiment 20001557 PARAMETER Experiment Name: At_Drought_Soil_Dry_P Parameter: Post-Treatment Value: Re-Water vs. No Drought
  misc_feature: MA Experiment 20001557 PARAMETER Experiment Name: At_Drought_Soil_Dry_P Parameter: Timepoint (day) Value: 13
  misc_feature: MA Experiment 20001557 PARAMETER Experiment Name: At_Drought_Soil_Dry_P Parameter: Treatment Value: Drought vs. No Drought
  misc_feature: MA Experiment ID: 20001558 Result: Up-regulated in Transcription
  misc_feature: MA Experiment 20001558 PARAMETER Experiment Name: At_Drought_Soil_Dry_P Parameter: Age (day) Value: 27
  misc_feature: MA Experiment 20001558 PARAMETER Experiment Name: At_Drought_Soil_Dry_P Parameter: Organism Value: A. thaliana
  misc_feature: MA Experiment 20001558 PARAMETER Experiment Name: At_Drought_Soil_Dry_P Parameter: Plant Line Value: WS
  misc_feature: MA Experiment 20001558 PARAMETER Experiment Name: At_Drought_Soil_Dry_P Parameter: Post Timepoint (hr) Value: 6
  misc_feature: MA Experiment 20001558 PARAMETER Experiment Name: At_Drought_Soil_Dry_P Parameter: Post-Treatment Value: Re-Water vs. No Drought
  misc_feature: MA Experiment 20001558 PARAMETER Experiment Name: At_Drought_Soil_Dry_P Parameter: Timepoint (day) Value: 13
  misc_feature: MA Experiment 20001558 PARAMETER Experiment Name: At_Drought_Soil_Dry_P Parameter: Treatment Value: Drought vs. No Drought
  misc_feature: MA Experiment ID: 20001560 Result: Up-regulated in Transcription
  misc_feature: MA Experiment 20001560 PARAMETER Experiment Name: At_Drought_Soil_Dry_P Parameter: Age (day) Value: 28
  misc_feature: MA Experiment 20001560 PARAMETER Experiment Name: At_Drought_Soil_Dry_P Parameter: Organism Value: A. thaliana
  misc_feature: MA Experiment 20001560 PARAMETER Experiment Name: At_Drought_Soil_Dry_P Parameter: Plant Line Value: WS
  misc_feature: MA Experiment 20001560 PARAMETER Experiment Name: At_Drought_Soil_Dry_P Parameter: Post Timepoint (hr) Value: None
  misc_feature: MA Experiment 20001560 PARAMETER Experiment Name: At_Drought_Soil_Dry_P Parameter: Post-Treatment Value: None
  misc_feature: MA Experiment 20001560 PARAMETER Experiment Name: At_Drought_Soil_Dry_P Parameter: Timepoint (day) Value: 14
  misc_feature: MA Experiment 20001560 PARAMETER Experiment Name: At_Drought_Soil_Dry_P Parameter: Treatment Value: Drought vs. No Drought
  misc_feature: MA Experiment ID: 20001911 Result: Down-regulated in Transcription
  misc_feature: MA Experiment 20001911 PARAMETER Experiment Name: At_Drought_Reproduction_P Parameter: Age (day) Value: 40
  misc_feature: MA Experiment 20001911 PARAMETER Experiment Name: At_Drought_Reproduction_P Parameter: Organism Value: A. thaliana
  misc_feature: MA Experiment 20001911 PARAMETER Experiment Name: At_Drought_Reproduction_P Parameter: Plant Line Value: WS
  misc_feature: MA Experiment 20001911 PARAMETER Experiment Name: At_Drought_Reproduction_P Parameter: Timepoint (day) Value: 10
  misc_feature: MA Experiment 20001911 PARAMETER Experiment Name: At_Drought_Reproduction_P Parameter: Tissue Value: Flowers
  misc_feature: MA Experiment 20001911 PARAMETER Experiment Name: At_Drought_Reproduction_P Parameter: Treatment Value: Drought vs. No Drought
acgcctctcttcttctgcttcacttcactactgctttctctatttctccatagatggctccttcttcatcacctcttcgtactacaagtgaaacagatgaaaaatatgcgaatgtcaaatgggaagagcttggattcgctctgactccaatagattatatgtatgtagccaaatgcagacaaggagagagctttacacaagggaagattgttccttatggcgacatttcaattagcccttgttctccgattctcaattacggccagggactatttgaaggtctcaaagcttacagaacagaagacgaccggattaggattttccggcctgaccaaaacgctcttcgcatgcaaactggtgcggagaggctttgtatgacacctcctactctagaacaatttgtcgaggcagttaagcaaactgtgcttgccaacaagaaatgggttcctcctccgggtaaaggaactctgtatataaggcctctgctactagggagtggtgctacccttggagtagctccagcacctgaatacacttttctcatatatgcatctcccgtaggagattaccataaggtaagctcaggcttgaacctcaaagttgatcataagtatcaccgagcccattcaggtggaacggggggtgtcaagagctgcacaaactattctccagttgtgaaatcgttactcgaagcaaagtcagcgggtttctctgatgtcctgttcctggatgcagcaactggtagaaacatcgaagagcttactgcttgtaacatcttcattgtcaagggaaacattgtatccaccccaccaacttcaggaaccattttacctggagtcacgaggaaaagcataagtgagctggctcatgatattggctaccaggtcgaagaacgcgatgtatctgtggatgagctactagaggcagaagaagttttctgcacagggactgcagtggtcgttaaagctgttgaaactgtgaccttccatgacaaaaaggtaaaatacaggacaggagaagcagcattgtctacgaagcttcactcgatgttgaccaatattcagatgggagttgttgaagataagaaaggttggatggtggacattgatccttgtcaaggttgaaagaagaagtttagaaagctgatgattctatgtactcaaacgtgtatcttttcttctcatgtgttggtttttattaggattcttctttttttatcatgggacttgtaataaataatgggtaactcttaagatacaagaggcggcagtatgttc

SEQ ID NO: 103611 - protein, 356 aa, Arabidopsis thaliana; identical to SEQ ID NO: 28085
  peptide (1)..(356): Ceres Seq. ID no. 13613166
  misc_feature (49)..(334): Pfam Name: Aminotransferase class IV Pfam Description: Aminotransferase class IV
  misc_feature (1)..(356): Homolog of NCBI NO: 15222882 NR Description: branched-chain amino acid aminotransferase
  misc_feature (1)..(356): Homolog of NCBI NO: 21617893 NR Description: branched-chain amino acid aminotransferase,
  misc_feature (1)..(356): Homolog of NCBI NO: 15222881 NR Description: branched-chain amino acid aminotransferase
  misc_feature (1)..(352): Homolog of NCBI NO: 15230923 NR Description: branched-chain amino acid aminotransferase
  misc_feature (1)..(352): Homolog of NCBI NO: 15218409 NR Description: tat-binding protein -related [Arabidopsis
  misc_feature (4)..(352): Homolog of NCBI NO: 27311239 NR Description: Unknown protein [Oryza sativa (japonica
  misc_feature (1)..(351): Homolog of NCBI NO: 6319167 NR Description: branched-chain amino acid aminotransferase
  misc_feature (19)..(352): Homolog of NCBI NO: 34902362 NR Description: Putative aminotransferase [Oryza sativa (japonica group)] >gi|24418036|gb|AAN60486.1| Putative aminotransferase
  misc_feature (10)..(351): Homolog of NCBI NO: 26391655 NR Description: Branched-chain amino acid aminotransferase 5,
  misc_feature (19)..(351): Homolog of NCBI NO: 18408919 NR Description: branched-chain-amino-acid transaminase -related

SEQ ID NO: 103612 - protein, 321 aa, Arabidopsis thaliana; identical to SEQ ID NO: 28086
  peptide (1)..(321): Ceres Seq. ID no. 13613167
  misc_feature (14)..(299): Pfam Name: Aminotransferase class IV Pfam Description: Aminotransferase class IV
  misc_feature (1)..(321): Homolog of NCBI NO: 15222882 NR Description: branched-chain amino acid aminotransferase
  misc_feature (1)..(321): Homolog of NCBI NO: 21617893 NR Description: branched-chain amino acid aminotransferase,
  misc_feature (1)..(321): Homolog of NCBI NO: 15222881 NR Description: branched-chain amino acid aminotransferase
  misc_feature (1)..(317): Homolog of NCBI NO: 15230923 NR Description: branched-chain amino acid aminotransferase
  misc_feature (1)..(317): Homolog of NCBI NO: 15218409 NR Description: tat-binding protein -related [Arabidopsis
  misc_feature (1)..(317): Homolog of NCBI NO: 27311239 NR Description: Unknown protein [Oryza sativa (japonica
  misc_feature (1)..(316): Homolog of NCBI NO: 6319167 NR Description: branched-chain amino acid aminotransferase
  misc_feature (1)..(317): Homolog of NCBI NO: 34902362 NR Description: Putative aminotransferase [Oryza sativa (japonica group)] >gi|24418036|gb|AAN60486.1| Putative aminotransferase
  misc_feature (1)..(316): Homolog of NCBI NO: 26391655 NR Description: Branched-chain amino acid aminotransferase 5,
  misc_feature (1)..(316): Homolog of NCBI NO: 18408919 NR Description: branched-chain-amino-acid transaminase -related

SEQ ID NO: 103613 - protein, 258 aa, Arabidopsis thaliana; identical to SEQ ID NO: 28087
  peptide (1)..(258): Ceres Seq. ID no. 13613168
  misc_feature (1)..(236): Pfam Name: Aminotransferase class IV Pfam Description: Aminotransferase class IV
  misc_feature (1)..(258): Homolog of NCBI NO: 15222882 NR Description: branched-chain amino acid aminotransferase
  misc_feature (1)..(258): Homolog of NCBI NO: 21617893 NR Description: branched-chain amino acid aminotransferase,
  misc_feature (1)..(258): Homolog of NCBI NO: 15222881 NR Description: branched-chain amino acid aminotransferase
  misc_feature (1)..(254): Homolog of NCBI NO: 15230923 NR Description: branched-chain amino acid aminotransferase
  misc_feature (1)..(254): Homolog of NCBI NO: 15218409 NR Description: tat-binding protein -related [Arabidopsis
  misc_feature (1)..(254): Homolog of NCBI NO: 27311239 NR Description: Unknown protein [Oryza sativa (japonica
  misc_feature (1)..(253): Homolog of NCBI NO: 6319167 NR Description: branched-chain amino acid aminotransferase
  misc_feature (1)..(254): Homolog of NCBI NO: 34902362 NR Description: Putative aminotransferase [Oryza sativa (japonica group)] >gi|24418036|gb|AAN60486.1| Putative aminotransferase
  misc_feature (1)..(253): Homolog of NCBI NO: 26391655 NR Description: Branched-chain amino acid aminotransferase 5,
  misc_feature (1)..(253): Homolog of NCBI NO: 18408919 NR Description: branched-chain-amino-acid transaminase -related

SEQ ID NO: 103614 - DNA, 904 bp, Arabidopsis thaliana
  misc_feature (1)..(904): Ceres Seq. ID no. 13613169
  misc_feature: MA Experiment ID: 108595 Result: Down-regulated in Transcription
  misc_feature: MA Experiment 108595 PARAMETER Experiment Name: At_Ler-pi_Ovule_cDNA_P Parameter: Plant Line Value: null
  misc_feature: MA Experiment ID: 108607 Result: Down-regulated in Transcription
  misc_feature: MA Experiment 108607 PARAMETER Experiment Name: At_100uM_ABA_cDNA_P Parameter: Timepoint (hr) Value: 4
  misc_feature: MA Experiment 108607 PARAMETER Experiment Name: At_100uM_ABA_cDNA_P Parameter: Tissue Value: Aerial
  misc_feature: MA Experiment 108607 PARAMETER Experiment Name: At_100uM_ABA_cDNA_P Parameter: Treatment Value: 100uM ABA vs. No Treatment
aacagtcaattggcggcgaagatgacgactcagtcgcagttcttagtgaacctctcttacggaggcctcgcctcccaaagtaatctcagagcgaataatcgtgtttcaccttcttcttgtcaaattacacgaacaaatcgctcatgggcattaccagtttcctttaaagttgagaaatttcaactccaacgaggaaggaggagaagaggatcaccatgttttggggagagcgaagggttggtcaaaaatgggattggtgatgctgatgggattataattgttgatcacggttctcgtcgccgtgaatccaatcttatgcttgaggagtttgtgaaaatgttcaaagaaaaaactggttacccaattgtagagcctgctcatatggaattggctgagccatctataaaagatgcattcagtttgtgtgtacaacaaggggcgaaacgtgtagttgtgagcccgttttttctatttcctggaagacattggcatacggacattccctcgttgacggctgatgctgcaaaggagttctctggcatctcatacctcataactgcacctctcggcccccataatctcctcctggacgttgtaaatgacagaatccaacattgcttgagccatgttgaaggtgatgctgacgagtgtcttgtttgtgctggaacaaataagtgcaagctctacaatagttcttaggtgtacatgtaagaacgtttttgtatatctgctcatcttctctaaccttcggatgcgggaaaaaaaggaggcatagtatattgttcatactcatcatttagtacgcgtcctatgtttcaacaagggagttttgagatttatgttcttttcttcttattgcagaccaatttgaaagactacgataatataataaaagctgtctgtt

SEQ ID NO: 103615 - protein, 232 aa, Arabidopsis thaliana; identical to SEQ ID NO: 38345
  peptide (1)..(232): Ceres Seq. ID no. 13613170
  misc_feature (127)..(206): Pfam Name: CbiX Pfam Description: CbiX
  misc_feature (8)..(232): Homolog of NCBI NO: 18402963 NR Description: expressed protein [Arabidopsis thaliana] unknown protein [Arabidopsis thaliana]
  misc_feature (8)..(128): Homolog of NCBI NO: 25405354 NR Description: hypothetical protein F14I3.20 [imported] - thaliana >gi|5734782|gb|AAD50047.1|AC007980_12 Hypothetical
  misc_feature (127)..(232): Homolog of NCBI NO: 25405354 NR Description: hypothetical protein F14I3.20 [imported] - thaliana >gi|5734782|gb|AAD50047.1|AC007980_12 Hypothetical
  misc_feature (8)..(232): Homolog of NCBI NO: 21618095 NR Description: unknown [Arabidopsis thaliana]
  misc_feature (80)..(208): Homolog of NCBI NO: 23054392 NR Description: hypothetical protein [Geobacter metallireducens]
  misc_feature (91)..(208): Homolog of NCBI NO: 39998091 NR Description: cbiX protein [Geobacter sulfurreducens PCA]
  misc_feature (90)..(212): Homolog of NCBI NO: 15614059 NR Description: BH1496~unknown conserved protein [Bacillus
  misc_feature (89)..(222): Homolog of NCBI NO: 40642725 NR Description: ferrochelatase [Bacillus megaterium]
  misc_feature (89)..(170): Homolog of NCBI NO: 15669160 NR Description: conserved hypothetical protein [Methanococcus
  misc_feature (90)..(207): Homolog of NCBI NO: 21400014 NR Description: CbiX, CbiX [Bacillus anthracis A2012] cbiX domain protein [Bacillus anthracis str. Ames]

SEQ ID NO: 103616 - protein, 225 aa, Arabidopsis thaliana; identical to SEQ ID NO: 38346
  peptide (1)..(225): Ceres Seq. ID no. 13613171
  misc_feature (120)..(199): Pfam Name: CbiX Pfam Description: CbiX
  misc_feature (1)..(225): Homolog of NCBI NO: 18402963 NR Description: expressed protein [Arabidopsis thaliana] unknown protein [Arabidopsis thaliana]
  misc_feature (1)..(121): Homolog of NCBI NO: 25405354 NR Description: hypothetical protein F14I3.20 [imported] - thaliana >gi|5734782|gb|AAD50047.1|AC007980_12 Hypothetical
  misc_feature (120)..(225): Homolog of NCBI NO: 25405354 NR Description: hypothetical protein F14I3.20 [imported] - thaliana >gi|5734782|gb|AAD50047.1|AC007980_12 Hypothetical
  misc_feature (1)..(225): Homolog of NCBI NO: 21618095 NR Description: unknown [Arabidopsis thaliana]
  misc_feature (73)..(201): Homolog of NCBI NO: 23054392 NR Description: hypothetical protein [Geobacter metallireducens]
  misc_feature (84)..(201): Homolog of NCBI NO: 39998091 NR Description: cbiX protein [Geobacter sulfurreducens PCA]
  misc_feature (83)..(205): Homolog of NCBI NO: 15614059 NR Description: BH1496~unknown conserved protein [Bacillus
  misc_feature (82)..(215): Homolog of NCBI NO: 40642725 NR Description: ferrochelatase [Bacillus megaterium]
  misc_feature (82)..(163): Homolog of NCBI NO: 15669160 NR Description: conserved hypothetical protein [Methanococcus
  misc_feature (83)..(200): Homolog of NCBI NO: 21400014 NR Description: CbiX, CbiX [Bacillus anthracis A2012] cbiX domain protein [Bacillus anthracis str. Ames]

SEQ ID NO: 103617 - protein, 127 aa, Arabidopsis thaliana; identical to SEQ ID NO: 38347
  peptide (1)..(127): Ceres Seq. ID no. 13613172
  misc_feature (22)..(101): Pfam Name: CbiX Pfam Description: CbiX
  misc_feature (1)..(127): Homolog of NCBI NO: 18402963 NR Description: expressed protein [Arabidopsis thaliana] unknown protein [Arabidopsis thaliana]
  misc_feature (1)..(23): Homolog of NCBI NO: 25405354 NR Description: hypothetical protein F14I3.20 [imported] - thaliana >gi|5734782|gb|AAD50047.1|AC007980_12 Hypothetical
  misc_feature (22)..(127): Homolog of NCBI NO: 25405354 NR Description: hypothetical protein F14I3.20 [imported] - thaliana >gi|5734782|gb|AAD50047.1|AC007980_12 Hypothetical
  misc_feature (1)..(127): Homolog of NCBI NO: 21618095 NR Description: unknown [Arabidopsis thaliana]
  misc_feature (1)..(103): Homolog of NCBI NO: 23054392 NR Description: hypothetical protein [Geobacter metallireducens]
  misc_feature (1)..(103): Homolog of NCBI NO: 39998091 NR Description: cbiX protein [Geobacter sulfurreducens PCA]
  misc_feature (1)..(107): Homolog of NCBI NO: 15614059 NR Description: BH1496~unknown conserved protein [Bacillus
  misc_feature (1)..(117): Homolog of NCBI NO: 40642725 NR Description: ferrochelatase [Bacillus megaterium]
  misc_feature (1)..(65): Homolog of NCBI NO: 15669160 NR Description: conserved hypothetical protein [Methanococcus
  misc_feature (1)..(102): Homolog of NCBI NO: 21400014 NR Description: CbiX, CbiX [Bacillus anthracis A2012] cbiX domain protein [Bacillus anthracis str. Ames]

SEQ ID NO: 103618 - DNA, 1195 bp, Arabidopsis thaliana
  misc_feature (1)..(1195): Ceres Seq. ID no. 13613183
  misc_feature: MA Experiment ID: 108434 Result: Down-regulated in Transcription
  misc_feature: MA Experiment 108434 PARAMETER Experiment Name: At_Root_Tips_cDNA_P Parameter: Tissue Value: Root Tips
  misc_feature: MA Experiment ID: 108461 Result: Up-regulated in Transcription
  misc_feature: MA Experiment 108461 PARAMETER Experiment Name: At_Germinating_Seeds_cDNA_P Parameter: Age (day) Value: 1 vs. 0
  misc_feature: MA Experiment 108461 PARAMETER Experiment Name: At_Germinating_Seeds_cDNA_P Parameter: Tissue Value: Germinating Seeds
  misc_feature: MA Experiment ID: 108462 Result: Up-regulated in Transcription
  misc_feature: MA Experiment 108462 PARAMETER Experiment Name: At_Germinating_Seeds_cDNA_P Parameter: Age (day) Value: 2 vs. 0
  misc_feature: MA Experiment 108462 PARAMETER Experiment Name: At_Germinating_Seeds_cDNA_P Parameter: Tissue Value: Germinating Seeds
  misc_feature: MA Experiment ID: 108463 Result: Up-regulated in Transcription
  misc_feature: MA Experiment 108463 PARAMETER Experiment Name: At_Germinating_Seeds_cDNA_P Parameter: Age (day) Value: 3 vs. 0
  misc_feature: MA Experiment 108463 PARAMETER Experiment Name: At_Germinating_Seeds_cDNA_P Parameter: Tissue Value: Germinating Seeds
  misc_feature: MA Experiment ID: 108464 Result: Up-regulated in Transcription
  misc_feature: MA Experiment 108464 PARAMETER Experiment Name: At_Germinating_Seeds_cDNA_P Parameter: Age (day) Value: 4 vs. 0
  misc_feature: MA Experiment 108464 PARAMETER Experiment Name: At_Germinating_Seeds_cDNA_P Parameter: Tissue Value: Germinating Seeds
  misc_feature: MA Experiment ID: 108594 Result: Down-regulated in Transcription
  misc_feature: MA Experiment 108594 PARAMETER Experiment Name: At_Ler-rhl_Root_cDNA_P Parameter: Plant Line Value: null
  misc_feature: MA Experiment ID: 108668 Result: Up-regulated in Transcription
  misc_feature: MA Experiment 108668 PARAMETER Experiment Name: At_2mM_SA_cDNA_P Parameter: Plant Line Value: WS
  misc_feature: MA Experiment 108668 PARAMETER Experiment Name: At_2mM_SA_cDNA_P Parameter: Timepoint (hr) Value: 6
  misc_feature: MA Experiment 108668 PARAMETER Experiment Name: At_2mM_SA_cDNA_P Parameter: Treatment Value: 2mM SA vs. No Treatment
  misc_feature: MA Experiment ID: 20000090 Result: Up-regulated in Transcription
  misc_feature: MA Experiment ID: 20000093 Result: Down-regulated in Transcription
  misc_feature: MA Experiment 20000093 PARAMETER Experiment Name: At_42deg_Heat_cDNA_P Parameter: Temperature (deg C) Value: 42 vs. 22
  misc_feature: MA Experiment 20000093 PARAMETER Experiment Name: At_42deg_Heat_cDNA_P Parameter: Timepoint (hr) Value: 0.5
  misc_feature: MA Experiment 20000093 PARAMETER Experiment Name: At_42deg_Heat_cDNA_P Parameter: Tissue Value: Aerial
  misc_feature: MA Experiment ID: 20000111 Result: Down-regulated in Transcription
  misc_feature: MA Experiment 20000111 PARAMETER Experiment Name: At_42deg_Heat_cDNA_P Parameter: Temperature (deg C) Value: 42 vs. 22
  misc_feature: MA Experiment 20000111 PARAMETER Experiment Name: At_42deg_Heat_cDNA_P Parameter: Timepoint (hr) Value: 6
  misc_feature: MA Experiment 20000111 PARAMETER Experiment Name: At_42deg_Heat_cDNA_P Parameter: Tissue Value: Aerial
  misc_feature: MA Experiment ID: 20000113 Result: Down-regulated in Transcription
  misc_feature: MA Experiment 20000113 PARAMETER Experiment Name: At_42deg_Heat_cDNA_P Parameter: Temperature (deg C) Value: 42 vs. 22
  misc_feature: MA Experiment 20000113 PARAMETER Experiment Name: At_42deg_Heat_cDNA_P Parameter: Timepoint (hr) Value: 8
  misc_feature: MA Experiment 20000113 PARAMETER Experiment Name: At_42deg_Heat_cDNA_P Parameter: Tissue Value: Aerial
  misc_feature: MA Experiment ID: 20000144 Result: Down-regulated in Transcription
  misc_feature: MA Experiment 20000144 PARAMETER Experiment Name: At_42deg_Heat_cDNA_P Parameter: Temperature (deg C) Value: 42 vs. 22
  misc_feature: MA Experiment 20000144 PARAMETER Experiment Name: At_42deg_Heat_cDNA_P Parameter: Timepoint (hr) Value: 1
  misc_feature: MA Experiment 20000144 PARAMETER Experiment Name: At_42deg_Heat_cDNA_P Parameter: Tissue Value: Aerial
  misc_feature: MA Experiment ID: 20000173 Result: Down-regulated in Transcription
  misc_feature: MA Experiment 20000173 PARAMETER Experiment Name: At_42deg_Heat_P Parameter: Age (day) Value: 14
  misc_feature: MA Experiment 20000173 PARAMETER Experiment Name: At_42deg_Heat_P Parameter: Organism Value: A. thaliana
  misc_feature: MA Experiment 20000173 PARAMETER Experiment Name: At_42deg_Heat_P Parameter: Plant Line Value: WS
  misc_feature: MA Experiment 20000173 PARAMETER Experiment Name: At_42deg_Heat_P Parameter: Temperature (deg C) Value: 42 vs. 22
  misc_feature: MA Experiment 20000173 PARAMETER Experiment Name: At_42deg_Heat_P Parameter: Timepoint (hr) Value: 6
  misc_feature: MA Experiment 20000173 PARAMETER Experiment Name: At_42deg_Heat_P Parameter: Tissue Value: Aerial
  misc_feature: MA Experiment ID: 20000182 Result: Up-regulated in Transcription
  misc_feature: MA Experiment 20000182 PARAMETER Experiment Name: At_2mM_SA_P Parameter: Age (day) Value: 14
  misc_feature: MA Experiment 20000182 PARAMETER Experiment Name: At_2mM_SA_P Parameter: Organism Value: A. thaliana
  misc_feature: MA Experiment 20000182 PARAMETER Experiment Name: At_2mM_SA_P Parameter: Plant Line Value: WS
  misc_feature: MA Experiment 20000182 PARAMETER Experiment Name: At_2mM_SA_P Parameter: Timepoint (hr) Value: 6
  misc_feature: MA Experiment 20000182 PARAMETER Experiment Name: At_2mM_SA_P Parameter: Tissue Value: Aerial
  misc_feature: MA Experiment 20000182 PARAMETER Experiment Name: At_2mM_SA_P Parameter: Treatment Value: 2mM SA vs. No Treatment
  misc_feature: MA Experiment ID: 20000184 Result: Down-regulated in Transcription
  misc_feature: MA Experiment 20000184 PARAMETER Experiment Name: At_Shoots__P Parameter: Age (day) Value: 7
  misc_feature: MA Experiment 20000184 PARAMETER Experiment Name: At_Shoots__P Parameter: Tissue Value: Shoots vs. Whole Plant
  misc_feature: MA Experiment ID: 20000264 Result: Down-regulated in Transcription
  misc_feature: MA Experiment 20000264 PARAMETER Experiment Name: At_Open_Flower_P Parameter: Age (day) Value: 21
  misc_feature: MA Experiment 20000264 PARAMETER Experiment Name: At_Open_Flower_P Parameter: Plant Line Value: WS
  misc_feature: MA Experiment 20000264 PARAMETER Experiment Name: At_Open_Flower_P Parameter: Tissue Value: Open Flower vs. Whole Plant
  misc_feature: MA Experiment ID: 20000265 Result: Down-regulated in Transcription
  misc_feature: MA Experiment 20000265 PARAMETER Experiment Name: At_Open_Flower_P Parameter: Age (day) Value: 21
  misc_feature: MA Experiment 20000265 PARAMETER Experiment Name: At_Open_Flower_P Parameter: Plant Line Value: WS
  misc_feature: MA Experiment 20000265 PARAMETER Experiment Name: At_Open_Flower_P Parameter: Tissue Value: Closed Flower vs. Whole Plant
  misc_feature: MA Experiment ID: 20000438 Result: Down-regulated in Transcription
  misc_feature: MA Experiment 20000438 PARAMETER Experiment Name: At_Shoots__P Parameter: Age (day) Value: 14
  misc_feature: MA Experiment 20000438 PARAMETER Experiment Name: At_Shoots__P Parameter: Tissue Value: Shoots vs. Whole Plant
  misc_feature: MA Experiment ID: 20000794 Result: Down-regulated in Transcription
  misc_feature: MA Experiment 20000794 PARAMETER Experiment Name: At_Petals_P Parameter: Age (day) Value: 23-25 days
  misc_feature: MA Experiment 20000794 PARAMETER Experiment Name: At_Petals_P Parameter: Plant Line Value: WS
  misc_feature: MA Experiment 20000794 PARAMETER Experiment Name: At_Petals_P Parameter: Tissue Value: Petals vs. Whole plant
  misc_feature: MA Experiment ID: 20001554 Result: Down-regulated in Transcription
  misc_feature: MA Experiment 20001554 PARAMETER Experiment Name: At_Drought_Soil_Dry_P Parameter: Age (day) Value: 21
  misc_feature: MA Experiment 20001554 PARAMETER Experiment Name: At_Drought_Soil_Dry_P Parameter: Organism Value: A. thaliana
  misc_feature: MA Experiment 20001554 PARAMETER Experiment Name: At_Drought_Soil_Dry_P Parameter: Plant Line Value: WS
  misc_feature: MA Experiment 20001554 PARAMETER Experiment Name: At_Drought_Soil_Dry_P Parameter: Post Timepoint (hr) Value: None
  misc_feature: MA Experiment 20001554 PARAMETER Experiment Name: At_Drought_Soil_Dry_P Parameter: Post-Treatment Value: None
  misc_feature: MA Experiment 20001554 PARAMETER Experiment Name: At_Drought_Soil_Dry_P Parameter: Timepoint (day) Value: 7
  misc_feature: MA Experiment 20001554 PARAMETER Experiment Name: At_Drought_Soil_Dry_P Parameter: Treatment Value: Drought vs. No Drought
gaagaaaaaacacttccaaacaaaataatgagttcttcgtcttcctcatcctcttcttcttcttcttctcgcagtaaatttatggattcaggatttataatcgggcgaaaagaactaacaagaattttgatactgtttcttggtttaaccgcttcatgtctggttttatacaaaacagcttatcctctgcaacgacttaatgtcagcaatctaacctctctccaagcttctccatctccactattaccaaacctcaactcatcagagatttctccagaaacgacaaaaccaaagttgagtttcaaggagattttggagaacgcatcaacgaagaacaatacagtgattataacgacattgaatcaagcttgggcagaaccaaactctttgtttgatctcttcttagagagttttcgtattggacaaggaacacaacaacttctgaaacatgtagtagtggtttgcttggatatcaaggcgtttgaacgatgctcacaacttcatactaactgttaccacattgaaacatcagaaactgatttctctggcgagaaagtttacaacactcctgattatcttaagatgatgtgggccagaatcgaccttcttactcaagtacttgagatgggttttaacttcatcttcacggacgcagatataatgtggcttagagatccatttcctcggttatatccagatggagacttccaaatggcgtgtgacagattctttggaaatccttatgattcagacaattgggtcaatggtggtttcacatacgtgagatcaaacaatcgaagcattgagttttacaaattttggcacaaatctcgtctagattatccagacttgcatgatcaagatgtgttcaacagaatcaagcatgagccttttatctcagagattggaatccaaatgagattctttgatacagtttactttggtgggttttgtcaaacgagcagagacataaacttggtttgcacaatgcatgctaattgttgtattggtttggacaagaagcttcatgatctgaatcttgtccttgatgattggagaaagtacctgtctttgtcagaaccagtgcagaacacgacgtggagtgttcctatgaagtgtttggaagattgagatttccttctttctttgttttgttgagatttggatgaaaagtatatttaaaaatgaagagttt

SEQ ID NO: 103619 - protein, 376 aa, Arabidopsis thaliana
  peptide (1)..(376): Ceres Seq. ID no. 13613184
  misc_feature (10)..(376): Homolog of NCBI NO: 21536907 NR Description: regulatory protein [Arabidopsis thaliana]
  misc_feature (8)..(373): Homolog of NCBI NO: 15235236 NR Description: hypothetical protein common family [Arabidopsis
  misc_feature (10)..(216): Homolog of NCBI NO: 15241588 NR Description: expressed protein [Arabidopsis thaliana] gene_id:K23L20.17~pir||T04881~similar to unknown protein
  misc_feature (33)..(375): Homolog of NCBI NO: 15235236 NR Description: hypothetical protein common family [Arabidopsis
  misc_feature (12)..(376): Homolog of NCBI NO: 18395292 NR Description: hypothetical protein [Arabidopsis thaliana]
  misc_feature (82)..(373): Homolog of NCBI NO: 38344278 NR Description: OSJNBa0013K16.10 [Oryza sativa (japonica
  misc_feature (221)..(376): Homolog of NCBI NO: 15241586 NR Description: expressed protein [Arabidopsis thaliana] unknown protein [Arabidopsis thaliana] gb|AAC79139.1~gene_id:K23L20.16~similar to unknown protein
  misc_feature (73)..(376): Homolog of NCBI NO: 15223826 NR Description: expressed protein [Arabidopsis thaliana]
  misc_feature (82)..(375): Homolog of NCBI NO: 18414558 NR Description: hypothetical protein common family [Arabidopsis
  misc_feature (102)..(373): Homolog of NCBI NO: 23306127 NR Description: Putataive InsB from Escherichia coli [Oryza
EEKTLPNKIMSSSSSSSSSSSSSRSKFMDSGFIIGRKELTRILILFLGLTASCLVLYKTAYPLQRLNVSNLTSLQASPSPLLPNLNSSEISPETTKPKLSFKEILENASTKNNTVIITTLNQAWAEPNSLFDLFLESFRIGQGTQQLLKHVVVVCLDIKAFERCSQLHTNCYHIETSETDFSGEKVYNTPDYLKMMWARIDLLTQVLEMGFNFIFTDADIMWLRDPFPRLYPDGDFQMACDRFFGNPYDSDNWVNGGFTYVRSNNRSIEFYKFWHKSRLDYPDLHDQDVFNRIKHEPFISEIGIQMRFFDTVYFGGFCQTSRDINLVCTMHANCCIGLDKKLHDLNLVLDDWRKYLSLSEPVQNTTWSVPMKCLED

SEQ ID NO: 103620 - protein, 367 aa, Arabidopsis thaliana
  peptide (1)..(367): Ceres Seq. ID no. 13613185
  misc_feature (1)..(367): Homolog of NCBI NO: 21536907 NR Description: regulatory protein [Arabidopsis thaliana]
  misc_feature (1)..(364): Homolog of NCBI NO: 15235236 NR Description: hypothetical protein common family [Arabidopsis
  misc_feature (1)..(207): Homolog of NCBI NO: 15241588 NR Description: expressed protein [Arabidopsis thaliana] gene_id:K23L20.17~pir||T04881~similar to unknown protein
  misc_feature (24)..(366): Homolog of NCBI NO: 15235236 NR Description: hypothetical protein common family [Arabidopsis
  misc_feature (3)..(367): Homolog of NCBI NO: 18395292 NR Description: hypothetical protein [Arabidopsis thaliana]
  misc_feature (73)..(364): Homolog of NCBI NO: 38344278 NR Description: OSJNBa0013K16.10 [Oryza sativa (japonica
  misc_feature (212)..(367): Homolog of NCBI NO: 15241586 NR Description: expressed protein [Arabidopsis thaliana] unknown protein [Arabidopsis thaliana] gb|AAC79139.1~gene_id:K23L20.16~similar to unknown protein
  misc_feature (64)..(367): Homolog of NCBI NO: 15223826 NR Description: expressed protein [Arabidopsis thaliana]
  misc_feature (73)..(366): Homolog of NCBI NO: 18414558 NR Description: hypothetical protein common family [Arabidopsis
  misc_feature (93)..(364): Homolog of NCBI NO: 23306127 NR Description: Putataive InsB from Escherichia coli [Oryza
MSSSSSSSSSSSSSRSKFMDSGFIIGRKELTRILILFLGLTASCLVLYKTAYPLQRLNVSNLTSLQASPSPLLPNLNSSEISPETTKPKLSFKEILENASTKNNTVIITTLNQAWAEPNSLFDLFLESFRIGQGTQQLLKHVVVVCLDIKAFERCSQLHTNCYHIETSETDFSGEKVYNTPDYLKMMWARIDLLTQVLEMGFNFIFTDADIMWLRDPFPRLYPDGDFQMACDRFFGNPYDSDNWVNGGFTYVRSNNRSIEFYKFWHKSRLDYPDLHDQDVFNRIKHEPFISEIGIQMRFFDTVYFGGFCQTSRDINLVCTMHANCCIGLDKKLHDLNLVLDDWRKYLSLSEPVQNTTWSVPMKCLED

SEQ ID NO: 103621 - protein, 349 aa, Arabidopsis thaliana
  peptide (1)..(349): Ceres Seq. ID no. 13613186
  misc_feature (1)..(349): Homolog of NCBI NO: 21536907 NR Description: regulatory protein [Arabidopsis thaliana]
  misc_feature (1)..(346): Homolog of NCBI NO: 15235236 NR Description: hypothetical protein common family [Arabidopsis
  misc_feature (1)..(189): Homolog of NCBI NO: 15241588 NR Description: expressed protein [Arabidopsis thaliana] gene_id:K23L20.17~pir||T04881~similar to unknown protein
  misc_feature (6)..(348): Homolog of NCBI NO: 15235236 NR Description: hypothetical protein common family [Arabidopsis
  misc_feature (1)..(349): Homolog of NCBI NO: 18395292 NR Description: hypothetical protein [Arabidopsis thaliana]
  misc_feature (55)..(346): Homolog of NCBI NO: 38344278 NR Description: OSJNBa0013K16.10 [Oryza sativa (japonica
  misc_feature (194)..(349): Homolog of NCBI NO: 15241586 NR Description: expressed protein [Arabidopsis thaliana] unknown protein [Arabidopsis thaliana] gb|AAC79139.1~gene_id:K23L20.16~similar to unknown protein
  misc_feature (46)..(349): Homolog of NCBI NO: 15223826 NR Description: expressed protein [Arabidopsis thaliana]
  misc_feature (55)..(348): Homolog of NCBI NO: 18414558 NR Description: hypothetical protein common family [Arabidopsis
  misc_feature (75)..(346): Homolog of NCBI NO: 23306127 NR Description: Putataive InsB from Escherichia coli [Oryza
MDSGFIIGRKELTRILILFLGLTASCLVLYKTAYPLQRLNVSNLTSLQASPSPLLPNLNSSEISPETTKPKLSFKEILENASTKNNTVIITTLNQAWAEPNSLFDLFLESFRIGQGTQQLLKHVVVVCLDIKAFERCSQLHTNCYHIETSETDFSGEKVYNTPDYLKMMWARIDLLTQVLEMGFNFIFTDADIMWLRDPFPRLYPDGDFQMACDRFFGNPYDSDNWVNGGFTYVRSNNRSIEFYKFWHKSRLDYPDLHDQDVFNRIKHEPFISEIGIQMRFFDTVYFGGFCQTSRDINLVCTMHANCCIGLDKKLHDLNLVLDDWRKYLSLSEPVQNTTWSVPMKCLED

SEQ ID NO: 103622 - DNA, 1326 bp, Arabidopsis thaliana
  misc_feature (1)..(1326): Ceres Seq. ID no. 13613187
  misc_feature: MA Experiment ID: 108573 Result: Up-regulated in Transcription
  misc_feature: MA Experiment 108573 PARAMETER Experiment Name: At_Drought_cDNA_P Parameter: Timepoint (hr) Value: 6
  misc_feature: MA Experiment 108573 PARAMETER Experiment Name: At_Drought_cDNA_P Parameter: Tissue Value: Aerial
  misc_feature: MA Experiment 108573 PARAMETER Experiment Name: At_Drought_cDNA_P Parameter: Treatment Value: Drought vs. No Drought
  misc_feature: MA Experiment ID: 108579 Result: Down-regulated in Transcription
  misc_feature: MA Experiment 108579 PARAMETER Experiment Name: At_4deg_Cold_cDNA_P Parameter: Temperature (deg C) Value: 4 vs. 22
  misc_feature: MA Experiment 108579 PARAMETER Experiment Name: At_4deg_Cold_cDNA_P Parameter: Timepoint (hr) Value: 6
  misc_feature: MA Experiment 108579 PARAMETER Experiment Name: At_4deg_Cold_cDNA_P Parameter: Tissue Value: Aerial
  misc_feature: MA Experiment ID: 20000173 Result: Down-regulated in Transcription
  misc_feature: MA Experiment 20000173 PARAMETER Experiment Name: At_42deg_Heat_P Parameter: Age (day) Value: 14
  misc_feature: MA Experiment 20000173 PARAMETER Experiment Name: At_42deg_Heat_P Parameter: Organism Value: A. thaliana
  misc_feature: MA Experiment 20000173 PARAMETER Experiment Name: At_42deg_Heat_P Parameter: Plant Line Value: WS
  misc_feature: MA Experiment 20000173 PARAMETER Experiment Name: At_42deg_Heat_P Parameter: Temperature (deg C) Value: 42 vs. 22
  misc_feature: MA Experiment 20000173 PARAMETER Experiment Name: At_42deg_Heat_P Parameter: Timepoint (hr) Value: 6
  misc_feature: MA Experiment 20000173 PARAMETER Experiment Name: At_42deg_Heat_P Parameter: Tissue Value: Aerial
  misc_feature: MA Experiment ID: 20000224 Result: Down-regulated in Transcription
  misc_feature: MA Experiment ID: 20000227 Result: Down-regulated in Transcription
  misc_feature: MA Experiment 20000227 PARAMETER Experiment Name: At_Root-Tips-vs-Tops_P Parameter: Tissue Value: Root Tips vs. Root Tops
  misc_feature: MA Experiment ID: 20001905 Result: Up-regulated in Transcription
  misc_feature: MA Experiment 20001905 PARAMETER Experiment Name: At_Drought_Reproduction_P Parameter: Age (day) Value: 40
  misc_feature: MA Experiment 20001905 PARAMETER Experiment Name: At_Drought_Reproduction_P Parameter: Organism Value: A. thaliana
  misc_feature: MA Experiment 20001905 PARAMETER Experiment Name: At_Drought_Reproduction_P Parameter: Plant Line Value: WS
  misc_feature: MA Experiment 20001905 PARAMETER Experiment Name: At_Drought_Reproduction_P Parameter: Timepoint (day) Value: 10
  misc_feature: MA Experiment 20001905 PARAMETER Experiment Name: At_Drought_Reproduction_P Parameter: Tissue Value: Rosettes
  misc_feature: MA Experiment 20001905 PARAMETER Experiment Name: At_Drought_Reproduction_P Parameter: Treatment Value: Drought vs. No Drought
gaagtgaccgtcttccttgtcttttttctctccctgttgagatctctgagaaaaaaaaaatccatccgatcttcaaaaaaagtcaccccctttaacattcttctccaatctctctacaaaccctaatctcagccatggatctcgctgcagaagagcttcaatttctcaacattcaaggcatattacgtgaatccacaacaatccccaaattttccccaaaaaccttctacctcataaccctaaccctaattttccctctctccttcgcaatcctcgctcattccctctttacccaaccaatcttagctcagctagatgcaactcctccttcagatcaatctaaaaccaatcacgaatggacccttcttctcatttatcaattcatctacgtcatcttcctcttcgccttctctcttctctcaacagccgccgtcgtcttcaccgtcgcttcgctttacacgggaaagccagtttctttctcttcaacaatgtcagcgattcctctggttttgaagcgtttgttcattaccttcctttgggtttctttaatgatgcttgtgtacaactctgtcttcttgttgtttctcgttgttttgatcgtagctatcgatttacaaagcgtgattctcgctgtcttctcgatggttgtgattttcgttctgtttttgggtgttcatgtttacatgactgcttggtggcatttagctagtgtagtctctgttcttgaaccgatttacggtatcgccgcgatgaagaagagttacgagttgcttaatggaagaactaatatggcgtgttcgatggtttttatgtatcttgctctttgtggaatcactgctggtgttttcggtggtgttgtggttcatggaggtgatgatttcgggttgtttacgaagattgttgttggtggtttcttggttgggattctagtgattgtgaatctagttgggctgcttgtgcagagtgtgttttactatgtttgtaagagttttcatcatcagccgattgataaatctgcgttgcacgatcatcttggtggatatcttggtgactatgtgccgttaaagagcagtattcagatggagaactttgatatttaatcgttaaatggattggatgatgatgatgaagaagaaacggtttttgcggtttgtcattgtaagttgtaatgtttgtaattttctatagtgtttgtattagcttttgcataatctgaattaatttgggggatagacttatattgcagatgttctgttcctttgtaatttcatagtgttgtttttttcttcccaaaattggaagattaatgaaataaatttgtttatt

SEQ ID NO: 103623 - protein, 321 aa, Arabidopsis thaliana; identical to SEQ ID NO: 21682
  peptide (1)..(321): Ceres Seq. ID no. 13613188
  misc_feature (1)..(321): Homolog of NCBI NO: 15241607 NR Description: expressed protein [Arabidopsis thaliana] unknown protein [Arabidopsis thaliana] gb|AAC79135.1~gene_id:K21C13.3~strong similarity to unknown
  misc_feature (1)..(321): Homolog of NCBI NO: 30684945 NR Description: expressed protein [Arabidopsis thaliana]
  misc_feature (1)..(321): Homolog of NCBI NO: 7485737 NR Description: hypothetical protein F18F4.50 - Arabidopsis >gi|2827649|emb|CAA16603.1| putative protein [Arabidopsis >gi|7268790|emb|CAB78995.1| putative protein [Arabidopsis
  misc_feature (1)..(321): Homolog of NCBI NO: 18397813 NR Description: expressed protein [Arabidopsis thaliana]
  misc_feature (1)..(320): Homolog of NCBI NO: 34908936 NR Description: P0691E06.20 [Oryza sativa (japonica
  misc_feature (11)..(292): Homolog of NCBI NO: 15222319 NR Description: hypothetical protein [Arabidopsis thaliana]
  misc_feature (12)..(287): Homolog of NCBI NO: 9295718 NR Description: T24P13.3 [Arabidopsis thaliana]
  misc_feature (26)..(298): Homolog of NCBI NO: 18398818 NR Description: expressed protein [Arabidopsis thaliana]
  misc_feature (11)..(287): Homolog of NCBI NO: 15229864 NR Description: expressed protein [Arabidopsis thaliana]
  misc_feature (26)..(289): Homolog of NCBI NO: 25370705 NR Description: hypothetical protein At2g18680 [imported] -

SEQ ID NO: 103624 - protein, 203 aa, Arabidopsis thaliana; identical to SEQ ID NO: 21683
  peptide (1)..(203): Ceres Seq. ID no. 13613189
  misc_feature (1)..(203): Homolog of NCBI NO: 15241607 NR Description: expressed protein [Arabidopsis thaliana] unknown protein [Arabidopsis thaliana] gb|AAC79135.1~gene_id:K21C13.3~strong similarity to unknown
  misc_feature (1)..(203): Homolog of NCBI NO: 30684945 NR Description: expressed protein [Arabidopsis thaliana]
  misc_feature (1)..(203): Homolog of NCBI NO: 7485737 NR Description: hypothetical protein F18F4.50 - Arabidopsis >gi|2827649|emb|CAA16603.1| putative protein [Arabidopsis >gi|7268790|emb|CAB78995.1| putative protein [Arabidopsis
  misc_feature (1)..(203): Homolog of NCBI NO: 18397813 NR Description: expressed protein [Arabidopsis thaliana]
  misc_feature (1)..(202): Homolog of NCBI NO: 34908936 NR Description: P0691E06.20 [Oryza sativa (japonica
  misc_feature (1)..(174): Homolog of NCBI NO: 15222319 NR Description: hypothetical protein [Arabidopsis thaliana]
  misc_feature (1)..(169): Homolog of NCBI NO: 9295718 NR Description: T24P13.3 [Arabidopsis thaliana]
  misc_feature (1)..(180): Homolog of NCBI NO: 18398818 NR Description: expressed protein [Arabidopsis thaliana]
  misc_feature (1)..(169): Homolog of NCBI NO: 15229864 NR Description: expressed protein [Arabidopsis thaliana]
  misc_feature (1)..(171): Homolog of NCBI NO: 25370705 NR Description: hypothetical protein At2g18680 [imported] -

SEQ ID NO: 103625 - protein, 183 aa, Arabidopsis thaliana; identical to SEQ ID NO: 21684
  peptide (1)..(183): Ceres Seq. ID no. 13613190
  misc_feature (1)..(183): Homolog of NCBI NO: 15241607 NR Description: expressed protein [Arabidopsis thaliana] unknown protein [Arabidopsis thaliana] gb|AAC79135.1~gene_id:K21C13.3~strong similarity to unknown
  misc_feature (1)..(183): Homolog of NCBI NO: 30684945 NR Description: expressed protein [Arabidopsis thaliana]
  misc_feature (1)..(183): Homolog of NCBI NO: 7485737 NR Description: hypothetical protein F18F4.50 - Arabidopsis >gi|2827649|emb|CAA16603.1| putative protein [Arabidopsis >gi|7268790|emb|CAB78995.1| putative protein [Arabidopsis
  misc_feature (1)..(183): Homolog of NCBI NO: 18397813 NR Description: expressed protein [Arabidopsis thaliana]
  misc_feature (1)..(182): Homolog of NCBI NO: 34908936 NR Description: P0691E06.20 [Oryza sativa (japonica
  misc_feature (1)..(154): Homolog of NCBI NO: 15222319 NR Description: hypothetical protein [Arabidopsis thaliana]
  misc_feature (1)..(149): Homolog of NCBI NO: 9295718 NR Description: T24P13.3 [Arabidopsis thaliana]
  misc_feature (1)..(160): Homolog of NCBI NO: 18398818 NR Description: expressed protein [Arabidopsis thaliana]
  misc_feature (1)..(149): Homolog of NCBI NO: 15229864 NR Description: expressed protein [Arabidopsis thaliana]
  misc_feature (1)..(151): Homolog of NCBI NO: 25370705 NR Description: hypothetical protein At2g18680 [imported] -

SEQ ID NO: 103626 - DNA, 1280 bp, Arabidopsis thaliana
  misc_feature (1)..(1280): Ceres Seq. ID no. 13613215
  misc_feature: MA Experiment ID: 20000234 Result: Up-regulated in Transcription
  misc_feature: MA Experiment 20000234 PARAMETER Experiment Name: At_Siliques_P Parameter: Age (day) Value: 21
  misc_feature: MA Experiment 20000234 PARAMETER Experiment Name: At_Siliques_P Parameter: Organism Value: A. thaliana
  misc_feature: MA Experiment 20000234 PARAMETER Experiment Name: At_Siliques_P Parameter: Plant Line Value: WS
  misc_feature: MA Experiment 20000234 PARAMETER Experiment Name: At_Siliques_P Parameter: Tissue Value: Less Than 5mm Siliques vs. Whole Plant
  misc_feature: MA Experiment ID: 20000527 Result: Down-regulated in Transcription
  misc_feature: MA Experiment 20000527 PARAMETER Experiment Name: At_10percent_PEG_P Parameter: Age (day) Value: 20
  misc_feature: MA Experiment 20000527 PARAMETER Experiment Name: At_10percent_PEG_P Parameter: Organism Value: A. thaliana
  misc_feature: MA Experiment 20000527 PARAMETER Experiment Name: At_10percent_PEG_P Parameter: Plant Line Value: WS
  misc_feature: MA Experiment 20000527 PARAMETER Experiment Name: At_10percent_PEG_P Parameter: Timepoint (day) Value: 20
  misc_feature: MA Experiment 20000527 PARAMETER Experiment Name: At_10percent_PEG_P Parameter: Tissue Value: Whole Plant
  misc_feature: MA Experiment 20000527 PARAMETER Experiment Name: At_10percent_PEG_P Parameter: Treatment Value: 10percent PEG vs. No Treatment
  misc_feature: MA Experiment ID: 20001458 Result: Up-regulated in Transcription
  misc_feature: MA Experiment 20001458 PARAMETER Experiment Name: At_50mM_NH4NO3_L-to-H_P Parameter: Age (day) Value: Undefined
  misc_feature: MA Experiment 20001458 PARAMETER Experiment Name: At_50mM_NH4NO3_L-to-H_P Parameter: Organism Value: Undefined
  misc_feature: MA Experiment 20001458 PARAMETER Experiment Name: At_50mM_NH4NO3_L-to-H_P Parameter: Plant Line Value: Undefined
  misc_feature: MA Experiment 20001458 PARAMETER Experiment Name: At_50mM_NH4NO3_L-to-H_P Parameter: Timepoint (hr) Value: 2
  misc_feature: MA Experiment 20001458 PARAMETER Experiment Name: At_50mM_NH4NO3_L-to-H_P Parameter: Tissue Value: Siliques
  misc_feature: MA Experiment 20001458 PARAMETER Experiment Name: At_50mM_NH4NO3_L-to-H_P Parameter: Treatment Value: 50mM NH4NO3 vs. 100mM Manitol
  misc_feature: MA Experiment ID: 20001556 Result: Up-regulated in Transcription
  misc_feature: MA Experiment 20001556 PARAMETER Experiment Name: At_Drought_Soil_Dry_P Parameter: Age (day) Value: 26
  misc_feature: MA Experiment 20001556 PARAMETER Experiment Name: At_Drought_Soil_Dry_P Parameter: Organism Value: A. thaliana
  misc_feature: MA Experiment 20001556 PARAMETER Experiment Name: At_Drought_Soil_Dry_P Parameter: Plant Line Value: WS
  misc_feature: MA Experiment 20001556 PARAMETER Experiment Name: At_Drought_Soil_Dry_P Parameter: Post Timepoint (hr) Value: None
  misc_feature: MA Experiment 20001556 PARAMETER Experiment Name: At_Drought_Soil_Dry_P Parameter: Post-Treatment Value: None
  misc_feature: MA Experiment 20001556 PARAMETER Experiment Name: At_Drought_Soil_Dry_P Parameter: Timepoint (day) Value: 12
  misc_feature: MA Experiment 20001556 PARAMETER Experiment Name: At_Drought_Soil_Dry_P Parameter: Treatment Value: Drought vs. No Drought
ttttttttatcatcttctctacactcttcaccaatagcttcactctttttggtcatggcttgtataaacggcgagaatcgtgatttttcttcctcgtcatctttgtcttctcttccaatgattgtctcccggaacttttctgccagagacgatggagagaccggtgacgagtttcctttcgagaggattttcccggtttacgctagaggaacccttaatcccgtggccgacccggttttgctggattttaccaattctagttatgacccaatttgggattctataagagaagaagctaagcttgaggcagaagaggagccggttttgagtagcttcttgtatgctagtatcttgtcgcatgactgtttagagcaagcattgagttttgttctagctaaccgtctccaaaaccctaccttgttggcaactcagcttatggatatattttgcaacgttatggtacatgacagaggtattcaaagctcgattcgtcttgatgttcaggcattcaaagacagagatcctgcttgtctatcgtatagttcggctattttacatctgaagggctatcttgcactgcaggcgtatagagtagcacataagttgtggaagcaaggaagaaaactattagcattggcactgcaaagccgagtaagcgaggtttttggaatcgatattcatcccgctgcaagaattgggaaaggaatattgttggatcatggaactggtgtggtcataggtgagactgctgtgataggcgaccgtgtctcaattttgcatggtgtgacattaggaggaactgggaaagaaaccggtgaccgccatccaaatataggcgacggtgctcttcttggagcatgtgtgactatacttggtaacattaagataggcgctggagcaatggtagctgctggttcgcttgtgttaaaggatgttccttcgcatagcatggtggctggaaatccagcaaaactcatcgggtttgttgatgagcaagatccatctatgacaatggagcatgatgctaccagagagttctttcaaaatgtagctgttgcttatagagagacaataccaaatggatcttcagtttcagggagttgcagggaaaggagacattaaaaagagaacatgagatcacctgcagcttctttaaggcggttttcatcatcaatcataatcacttcaaacaaataacaaagctctttgtttgttaacaaacttgtttttccaattgatggagaaagattttgatacattgttaaacattattcattctg

SEQ ID NO: 103627 - protein, 373 aa, Arabidopsis thaliana
  peptide (1)..(373): Ceres Seq. ID no. 13613216
  misc_feature (19)..(373): Homolog of NCBI NO: 17225592 NR Description: serine acetyltransferase [Arabidopsis thaliana] unknown protein [Arabidopsis thaliana]
  misc_feature (29)..(373): Homolog of NCBI NO: 5597011 NR Description: serine acetyltranferase 2 [Arabidopsis thaliana]
  misc_feature (55)..(373): Homolog of NCBI NO: 18398491 NR Description: acetyltransferase, putative [Arabidopsis >gi|4406384|gb|AAD19963.1| serine acetyltransferase [Arabidopsis
  misc_feature (55)..(340): Homolog of NCBI NO: 20198259 NR Description: serine acetyltransferase (GB:AF112303)
  misc_feature (55)..(340): Homolog of NCBI NO: 25286519 NR Description: probable serine acetyltransferase [imported] -
  misc_feature (55)..(340): Homolog of NCBI NO: 7433701 NR Description: serine O-acetyltransferase (EC 2.3.1.30)
  misc_feature (61)..(365): Homolog of NCBI NO: 22758278 NR Description: Putative serine acetyltransferase [Oryza sativa
  misc_feature (19)..(303): Homolog of NCBI NO: 7433700 NR Description: serine O-acetyltransferase (EC 2.3.1.30) - Arabidopsis thaliana >gi|3367582|emb|CAA20034.1| putative [Arabidopsis thaliana] >gi|7270515|emb|CAB80280.1| putative
  misc_feature (19)..(303): Homolog of NCBI NO: 30690434 NR Description: acetyltransferase family [Arabidopsis thaliana]
  misc_feature (84)..(340): Homolog of NCBI NO: 1361979 NR Description: serine O-acetyltransferase (EC 2.3.1.30) - >gi|1350550|dbj|BAA12843.1| serine acetyltransferase [Citrullus >gi|1841312|dbj|BAA08479.1| serine acetyltransferase. [Citrullus
FFLSSSLHSSPIASLFLVMACINGENRDFSSSSSLSSLPMIVSRNFSARDDGETGDEFPFERIFPVYARGTLNPVADPVLLDFTNSSYDPIWDSIREEAKLEAEEEPVLSSFLYASILSHDCLEQALSFVLANRLQNPTLLATQLMDIFCNVMVHDRGIQSSIRLDVQAFKDRDPACLSYSSAILHLKGYLALQAYRVAHKLWKQGRKLLALALQSRVSEVFGIDIHPAARIGKGILLDHGTGVVIGETAVIGDRVSILHGVTLGGTGKETGDRHPNIGDGALLGACVTILGNIKIGAGAMVAAGSLVLKDVPSHSMVAGNPAKLIGFVDEQDPSMTMEHDATREFFQNVAVAYRETIPNGSSVSGSCRERRH

SEQ ID NO: 103628 - protein, 355 aa, Arabidopsis thaliana
  peptide (1)..(355): Ceres Seq. ID no. 13613217
  misc_feature (1)..(355): Homolog of NCBI NO: 17225592 NR Description: serine acetyltransferase [Arabidopsis thaliana] unknown protein [Arabidopsis thaliana]
  misc_feature (11)..(355): Homolog of NCBI NO: 5597011 NR Description: serine acetyltranferase 2 [Arabidopsis thaliana]
  misc_feature (37)..(355): Homolog of NCBI NO: 18398491 NR Description: acetyltransferase, putative [Arabidopsis >gi|4406384|gb|AAD19963.1| serine acetyltransferase [Arabidopsis
  misc_feature (37)..(322): Homolog of NCBI NO: 20198259 NR Description: serine acetyltransferase (GB:AF112303)
  misc_feature (37)..(322): Homolog of NCBI NO: 25286519 NR Description: probable serine acetyltransferase [imported] -
  misc_feature (37)..(322): Homolog of NCBI NO: 7433701 NR Description: serine O-acetyltransferase (EC 2.3.1.30)
  misc_feature (43)..(347): Homolog of NCBI NO: 22758278 NR Description: Putative serine acetyltransferase [Oryza sativa
  misc_feature (1)..(285): Homolog of NCBI NO: 7433700 NR Description: serine O-acetyltransferase (EC 2.3.1.30) - Arabidopsis thaliana >gi|3367582|emb|CAA20034.1| putative [Arabidopsis thaliana] >gi|7270515|emb|CAB80280.1| putative
  misc_feature (1)..(285): Homolog of NCBI NO: 30690434 NR Description: acetyltransferase family [Arabidopsis thaliana]
  misc_feature (66)..(322): Homolog of NCBI NO: 1361979 NR Description: serine O-acetyltransferase (EC 2.3.1.30) - >gi|1350550|dbj|BAA12843.1| serine acetyltransferase [Citrullus >gi|1841312|dbj|BAA08479.1| serine acetyltransferase. [Citrullus
MACINGENRDFSSSSSLSSLPMIVSRNFSARDDGETGDEFPFERIFPVYARGTLNPVADPVLLDFTNSSYDPIWDSIREEAKLEAEEEPVLSSFLYASILSHDCLEQALSFVLANRLQNPTLLATQLMDIFCNVMVHDRGIQSSIRLDVQAFKDRDPACLSYSSAILHLKGYLALQAYRVAHKLWKQGRKLLALALQSRVSEVFGIDIHPAARIGKGILLDHGTGVVIGETAVIGDRVSILHGVTLGGTGKETGDRHPNIGDGALLGACVTILGNIKIGAGAMVAAGSLVLKDVPSHSMVAGNPAKLIGFVDEQDPSMTMEHDATREFFQNVAVAYRETIPNGSSVSGSCRERRH

SEQ ID NO: 103629 - protein, 334 aa, Arabidopsis thaliana
  peptide (1)..(334): Ceres Seq. ID no. 13613218
  misc_feature (1)..(334): Homolog of NCBI NO: 17225592 NR Description: serine acetyltransferase [Arabidopsis thaliana] unknown protein [Arabidopsis thaliana]
  misc_feature (1)..(334): Homolog of NCBI NO: 5597011 NR Description: serine acetyltranferase 2 [Arabidopsis thaliana]
  misc_feature (16)..(334): Homolog of NCBI NO: 18398491 NR Description: acetyltransferase, putative [Arabidopsis >gi|4406384|gb|AAD19963.1| serine acetyltransferase [Arabidopsis
  misc_feature (16)..(301): Homolog of NCBI NO: 20198259 NR Description: serine acetyltransferase (GB:AF112303)
  misc_feature (16)..(301): Homolog of NCBI NO: 25286519 NR Description: probable serine acetyltransferase [imported] -
  misc_feature (16)..(301): Homolog of NCBI NO: 7433701 NR Description: serine O-acetyltransferase (EC 2.3.1.30)
  misc_feature (22)..(326): Homolog of NCBI NO: 22758278 NR Description: Putative serine acetyltransferase [Oryza sativa
  misc_feature (1)..(264): Homolog of NCBI NO: 7433700 NR Description: serine O-acetyltransferase (EC 2.3.1.30) - Arabidopsis thaliana >gi|3367582|emb|CAA20034.1| putative [Arabidopsis thaliana] >gi|7270515|emb|CAB80280.1| putative
  misc_feature (1)..(264): Homolog of NCBI NO: 30690434 NR Description: acetyltransferase family [Arabidopsis thaliana]
  misc_feature (45)..(301): Homolog of NCBI NO: 1361979 NR Description: serine O-acetyltransferase (EC 2.3.1.30) - >gi|1350550|dbj|BAA12843.1| serine acetyltransferase [Citrullus >gi|1841312|dbj|BAA08479.1| serine acetyltransferase. [Citrullus
MIVSRNFSARDDGETGDEFPFERIFPVYARGTLNPVADPVLLDFTNSSYDPIWDSIREEAKLEAEEEPVLSSFLYASILSHDCLEQALSFVLANRLQNPTLLATQLMDIFCNVMVHDRGIQSSIRLDVQAFKDRDPACLSYSSAILHLKGYLALQAYRVAHKLWKQGRKLLALALQSRVSEVFGIDIHPAARIGKGILLDHGTGVVIGETAVIGDRVSILHGVTLGGTGKETGDRHPNIGDGALLGACVTILGNIKIGAGAMVAAGSLVLKDVPSHSMVAGNPAKLIGFVDEQDPSMTMEHDATREFFQNVAVAYRETIPNGSSVSGSCRERRH

SEQ ID NO: 103630 - DNA, 1121 bp, Arabidopsis thaliana
  misc_feature (1)..(1121): Ceres Seq. ID no. 13613219
  misc_feature: MA Experiment ID: 108434 Result: Down-regulated in Transcription
  misc_feature: MA Experiment 108434 PARAMETER Experiment Name: At_Root_Tips_cDNA_P Parameter: Tissue Value: Root Tips
  misc_feature: MA Experiment ID: 108461 Result: Up-regulated in Transcription
  misc_feature: MA Experiment 108461 PARAMETER Experiment Name: At_Germinating_Seeds_cDNA_P Parameter: Age (day) Value: 1 vs. 0
  misc_feature: MA Experiment 108461 PARAMETER Experiment Name: At_Germinating_Seeds_cDNA_P Parameter: Tissue Value: Germinating Seeds
  misc_feature: MA Experiment ID: 108462 Result: Up-regulated in Transcription
  misc_feature: MA Experiment 108462 PARAMETER Experiment Name: At_Germinating_Seeds_cDNA_P Parameter: Age (day) Value: 2 vs. 0
  misc_feature: MA Experiment 108462 PARAMETER Experiment Name: At_Germinating_Seeds_cDNA_P Parameter: Tissue Value: Germinating Seeds
  misc_feature: MA Experiment ID: 108464 Result: Up-regulated in Transcription
  misc_feature: MA Experiment 108464 PARAMETER Experiment Name: At_Germinating_Seeds_cDNA_P Parameter: Age (day) Value: 4 vs. 0
  misc_feature: MA Experiment 108464 PARAMETER Experiment Name: At_Germinating_Seeds_cDNA_P Parameter: Tissue Value: Germinating Seeds
  misc_feature: MA Experiment ID: 108488 Result: Down-regulated in Transcription
  misc_feature: MA Experiment ID: 108574 Result: Down-regulated in Transcription
  misc_feature: MA Experiment 108574 PARAMETER Experiment Name: At_Wounding__cDNA_P Parameter: Timepoint (hr) Value: 1
  misc_feature: MA Experiment 108574 PARAMETER Experiment Name: At_Wounding__cDNA_P Parameter: Tissue Value: Aerial
  misc_feature: MA Experiment 108574 PARAMETER Experiment Name: At_Wounding__cDNA_P Parameter: Treatment Value: Wounding vs. No Wounding
  misc_feature: MA Experiment ID: 108577 Result: Down-regulated in Transcription
  misc_feature: MA Experiment 108577 PARAMETER Experiment Name: At_42deg_Heat_cDNA_P Parameter: Temperature (deg C) Value: 42 vs. 22
  misc_feature: MA Experiment 108577 PARAMETER Experiment Name: At_42deg_Heat_cDNA_P Parameter: Timepoint (hr) Value: 6
  misc_feature: MA Experiment 108577 PARAMETER Experiment Name: At_42deg_Heat_cDNA_P Parameter: Tissue Value: Aerial
  misc_feature: MA Experiment ID: 108579 Result: Down-regulated in Transcription
  misc_feature: MA Experiment 108579 PARAMETER Experiment Name: At_4deg_Cold_cDNA_P Parameter: Temperature (deg C) Value: 4 vs. 22
  misc_feature: MA Experiment 108579 PARAMETER Experiment Name: At_4deg_Cold_cDNA_P Parameter: Timepoint (hr) Value: 6
  misc_feature: MA Experiment 108579 PARAMETER Experiment Name: At_4deg_Cold_cDNA_P Parameter: Tissue Value: Aerial
  misc_feature: MA Experiment ID: 108608 Result: Down-regulated in Transcription
  misc_feature: MA Experiment 108608 PARAMETER Experiment Name: At_100uM_ABA_cDNA_P Parameter: Timepoint (hr) Value: 1
  misc_feature: MA Experiment 108608 PARAMETER Experiment Name: At_100uM_ABA_cDNA_P Parameter: Tissue Value: Aerial
  misc_feature: MA Experiment 108608 PARAMETER Experiment Name: At_100uM_ABA_cDNA_P Parameter: Treatment Value: 100uM ABA vs. No Treatment
  misc_feature: MA Experiment ID: 108667 Result: Down-regulated in Transcription
  misc_feature: MA Experiment 108667 PARAMETER Experiment Name: At_2mM_SA_cDNA_P Parameter: Plant Line Value: WS
  misc_feature: MA Experiment 108667 PARAMETER Experiment Name: At_2mM_SA_cDNA_P Parameter: Timepoint (hr) Value: 1
  misc_feature: MA Experiment 108667 PARAMETER Experiment Name: At_2mM_SA_cDNA_P Parameter: Treatment Value: 2mM SA vs. No Treatment
  misc_feature: MA Experiment ID: 20000069 Result: Up-regulated in Transcription
  misc_feature: MA Experiment 20000069 PARAMETER Experiment Name: At_100uM_ABA_Mutants_cDNA_P Parameter: Plant Line Value: CS23
  misc_feature: MA Experiment 20000069 PARAMETER Experiment Name: At_100uM_ABA_Mutants_cDNA_P Parameter: Timepoint (hr) Value: 6
  misc_feature: MA Experiment 20000069 PARAMETER Experiment Name: At_100uM_ABA_Mutants_cDNA_P Parameter: Tissue Value: Aerial
  misc_feature: MA Experiment 20000069 PARAMETER Experiment Name: At_100uM_ABA_Mutants_cDNA_P Parameter: Treatment Value: 100uM ABA vs. No Treatment
  misc_feature: MA Experiment ID: 20000070 Result: Up-regulated in Transcription
  misc_feature: MA Experiment 20000070 PARAMETER Experiment Name: At_100uM_ABA_Mutants_cDNA_P Parameter: Plant Line Value: CS24
  misc_feature: MA Experiment 20000070 PARAMETER Experiment Name: At_100uM_ABA_Mutants_cDNA_P Parameter: Timepoint (hr) Value: 6
  misc_feature: MA Experiment 20000070 PARAMETER Experiment Name: At_100uM_ABA_Mutants_cDNA_P Parameter: Tissue Value: Aerial
  misc_feature: MA Experiment 20000070 PARAMETER Experiment Name: At_100uM_ABA_Mutants_cDNA_P Parameter: Treatment Value: 100uM ABA vs. No Treatment
  misc_feature: MA Experiment ID: 20000071 Result: Up-regulated in Transcription
  misc_feature: MA Experiment 20000071 PARAMETER Experiment Name: At_100uM_ABA_Mutants_cDNA_P Parameter: Plant Line Value: CS8104
  misc_feature: MA Experiment 20000071 PARAMETER Experiment Name: At_100uM_ABA_Mutants_cDNA_P Parameter: Timepoint (hr) Value: 6
  misc_feature: MA Experiment 20000071 PARAMETER Experiment Name: At_100uM_ABA_Mutants_cDNA_P Parameter: Tissue Value: Aerial
  misc_feature: MA Experiment 20000071 PARAMETER Experiment Name: At_100uM_ABA_Mutants_cDNA_P Parameter: Treatment Value: 100uM ABA vs. No Treatment
  misc_feature: MA Experiment ID: 20000088 Result: Up-regulated in Transcription
  misc_feature: MA Experiment 20000088 PARAMETER Experiment Name: At_100uM_ABA_Mutants_cDNA_P Parameter: Plant Line Value: Landsberg
  misc_feature: MA Experiment 20000088 PARAMETER Experiment Name: At_100uM_ABA_Mutants_cDNA_P Parameter: Timepoint (hr) Value: 6
  misc_feature: MA Experiment 20000088 PARAMETER Experiment Name: At_100uM_ABA_Mutants_cDNA_P Parameter: Tissue Value: Aerial
  misc_feature: MA Experiment 20000088 PARAMETER Experiment Name: At_100uM_ABA_Mutants_cDNA_P Parameter: Treatment Value: 100uM ABA vs. No Treatment
  misc_feature: MA Experiment ID: 20000089 Result: Up-regulated in Transcription
  misc_feature: MA Experiment ID: 20000117 Result: Up-regulated in Transcription
  misc_feature: MA Experiment 20000117 PARAMETER Experiment Name: At_100uM_ABA_Mutants_cDNA_P Parameter: Plant Line Value: Columbia
  misc_feature: MA Experiment 20000117 PARAMETER Experiment Name: At_100uM_ABA_Mutants_cDNA_P Parameter: Timepoint (hr) Value: 6
  misc_feature: MA Experiment 20000117 PARAMETER Experiment Name: At_100uM_ABA_Mutants_cDNA_P Parameter: Tissue Value: Aerial
  misc_feature: MA Experiment 20000117 PARAMETER Experiment Name: At_100uM_ABA_Mutants_cDNA_P Parameter: Treatment Value: 100uM ABA vs. No Treatment
  misc_feature: MA Experiment ID: 20000213 Result: Down-regulated in Transcription
  misc_feature: MA Experiment 20000213 PARAMETER Experiment Name: At_4deg_Cold_P Parameter: Timepoint (hr) Value: 2
  misc_feature: MA Experiment ID: 20000224 Result: Down-regulated in Transcription
  misc_feature: MA Experiment ID: 20000227 Result: Down-regulated in Transcription
  misc_feature: MA Experiment 20000227 PARAMETER Experiment Name: At_Root-Tips-vs-Tops_P Parameter: Tissue Value: Root Tips vs. Root Tops
  misc_feature: MA Experiment ID: 20000234 Result: Down-regulated in Transcription
  misc_feature: MA Experiment 20000234 PARAMETER Experiment Name: At_Siliques_P Parameter: Age (day) Value: 21
  misc_feature: MA Experiment 20000234 PARAMETER Experiment Name: At_Siliques_P Parameter: Organism Value: A. thaliana
  misc_feature: MA Experiment 20000234 PARAMETER Experiment Name: At_Siliques_P Parameter: Plant Line Value: WS
  misc_feature: MA Experiment 20000234 PARAMETER Experiment Name: At_Siliques_P Parameter: Tissue Value: Less Than 5mm Siliques vs. Whole Plant
  misc_feature: MA Experiment ID: 20000235 Result: Down-regulated in Transcription
  misc_feature: MA Experiment 20000235 PARAMETER Experiment Name: At_Siliques_P Parameter: Age (day) Value: 21
  misc_feature: MA Experiment 20000235 PARAMETER Experiment Name: At_Siliques_P Parameter: Organism Value: A. thaliana
  misc_feature: MA Experiment 20000235 PARAMETER Experiment Name: At_Siliques_P Parameter: Plant Line Value: WS
  misc_feature: MA Experiment 20000235 PARAMETER Experiment Name: At_Siliques_P Parameter: Tissue Value: 5-10mm Siliques vs. Whole Plant
  misc_feature: MA Experiment ID: 20000264 Result: Down-regulated in Transcription
  misc_feature: MA Experiment 20000264 PARAMETER Experiment Name: At_Open_Flower_P Parameter: Age (day) Value: 21
  misc_feature: MA Experiment 20000264 PARAMETER Experiment Name: At_Open_Flower_P Parameter: Plant Line Value: WS
  misc_feature: MA Experiment 20000264 PARAMETER Experiment Name: At_Open_Flower_P Parameter: Tissue Value: Open Flower vs. Whole Plant
  misc_feature: MA Experiment ID: 20000265 Result: Down-regulated in Transcription
  misc_feature: MA Experiment 20000265 PARAMETER Experiment Name: At_Open_Flower_P Parameter: Age (day) Value: 21
  misc_feature: MA Experiment 20000265 PARAMETER Experiment Name: At_Open_Flower_P Parameter: Plant Line Value: WS
  misc_feature: MA Experiment 20000265 PARAMETER Experiment Name: At_Open_Flower_P Parameter: Tissue Value: Closed Flower vs. Whole Plant
  misc_feature: MA Experiment ID: 20000286 Result: Down-regulated in Transcription
  misc_feature: MA Experiment 20000286 PARAMETER Experiment Name: At_Open_Flower_P Parameter: Age (day) Value: 21
  misc_feature: MA Experiment 20000286 PARAMETER Experiment Name: At_Open_Flower_P Parameter: Plant Line Value: WS
  misc_feature: MA Experiment 20000286 PARAMETER Experiment Name: At_Open_Flower_P Parameter: Tissue Value: Half Open vs. Whole Plant
  misc_feature: MA Experiment ID: 20000438 Result: Down-regulated in Transcription
  misc_feature: MA Experiment 20000438 PARAMETER Experiment Name: At_Shoots__P Parameter: Age (day) Value: 14
  misc_feature: MA Experiment 20000438 PARAMETER Experiment Name: At_Shoots__P Parameter: Tissue Value: Shoots vs. Whole Plant
  misc_feature: MA Experiment ID: 20000527 Result: Down-regulated in Transcription
  misc_feature: MA Experiment 20000527 PARAMETER Experiment Name: At_10percent_PEG_P Parameter: Age (day) Value: 20
  misc_feature: MA Experiment 20000527 PARAMETER Experiment Name: At_10percent_PEG_P Parameter: Organism Value: A. thaliana
  misc_feature: MA Experiment 20000527 PARAMETER Experiment Name: At_10percent_PEG_P Parameter: Plant Line Value: WS
  misc_feature: MA Experiment 20000527 PARAMETER Experiment Name: At_10percent_PEG_P Parameter: Timepoint (day) Value: 20
  misc_feature: MA Experiment 20000527 PARAMETER Experiment Name: At_10percent_PEG_P Parameter: Tissue Value: Whole Plant
  misc_feature: MA Experiment 20000527 PARAMETER Experiment Name: At_10percent_PEG_P Parameter: Treatment Value: 10percent PEG vs. No Treatment
  misc_feature: MA Experiment ID: 20001248 Result: Up-regulated in Transcription
  misc_feature: MA Experiment 20001248 PARAMETER Experiment Name: At_Far-red-induction_P Parameter: Age (day) Value: 7
  misc_feature: MA Experiment 20001248 PARAMETER Experiment Name: At_Far-red-induction_P Parameter: Light Value: Far-red vs. White
  misc_feature: MA Experiment 20001248 PARAMETER Experiment Name: At_Far-red-induction_P Parameter: Organism Value: A. thaliana
  misc_feature: MA Experiment 20001248 PARAMETER Experiment Name: At_Far-red-induction_P Parameter: Plant Line Value: Columbia
  misc_feature: MA Experiment 20001248 PARAMETER Experiment Name: At_Far-red-induction_P Parameter: Timepoint (hr) Value: 4
  misc_feature: MA Experiment 20001248 PARAMETER Experiment Name: At_Far-red-induction_P Parameter: Tissue Value: Whole Plant
  misc_feature: MA Experiment ID: 20001560 Result: Down-regulated in Transcription
  misc_feature: MA Experiment 20001560 PARAMETER Experiment Name: At_Drought_Soil_Dry_P Parameter: Age (day) Value: 28
  misc_feature: MA Experiment 20001560 PARAMETER Experiment Name: At_Drought_Soil_Dry_P Parameter: Organism Value: A. thaliana
  misc_feature: MA Experiment 20001560 PARAMETER Experiment Name: At_Drought_Soil_Dry_P Parameter: Plant Line Value: WS
  misc_feature: MA Experiment 20001560 PARAMETER Experiment Name: At_Drought_Soil_Dry_P Parameter: Post Timepoint (hr) Value: None
  misc_feature: MA Experiment 20001560 PARAMETER Experiment Name: At_Drought_Soil_Dry_P Parameter: Post-Treatment Value: None
  misc_feature: MA Experiment 20001560 PARAMETER Experiment Name: At_Drought_Soil_Dry_P Parameter: Timepoint (day) Value: 14
  misc_feature: MA Experiment 20001560 PARAMETER Experiment Name: At_Drought_Soil_Dry_P Parameter: Treatment Value: Drought vs. No Drought
aagagcccgtcgtttctcccattaccctccaattaatacactattttttttatttttttgtctttccctttttaaaatgatcatcatcttcttcttcactcgcctcaatttttgttcccttcttcttctataattcaactgtgaatttcaccgacgaaacaaaaaagagagagagagagagagaaacgatgagttctcagatttcggagattgaacaagagcagctgatcgagaagcttgagatcttcaagatccatggcagagacaaacgtggccgtaagatccttcgtattatcggaaaattcttcccagctcgatttctgtcactggatgtgttgaagaagtatctagaggagaagatatttcctcgattaggtagaaaaccattcgccgtactctacgtccacaccggcgtacagagaagcgagaacttcccaggtatctcagctctacgagcgatctacgacgcaattccggtaaacgtcagagacaatcttcaggaggtttacttcctccatccaggtcttcaatcacgtctcttcctcgccacctgcggccgatttctattttccggcgggttgtacgggaagctgaggtacataagcagagttgattatctgtgggaacatgtgaggaggaatgagatagagatgccggagtttgtatacgatcacgatgatgatctggagtatcgtccgatgatggattacggtcaagaaagcgatcacgcgagggttttcgccggagccgccgtggattcatcagtctcaagtttctccatgaggtgtatctcatagcgtaaaaggctaaaactccacccactagatatcggatcgtatcttataaaccatataatatacgaatacgattaataatatatcaaaaagattggaaataggtgtgctttttgaaattagtgagcgttttttatggaaaagaaaagaaaagaaagcagttggcgtctggataaagggaaggaggagaatctttagattttttctttaatctgtttttcttttgtcttgattagttttttctttagtggtggtggttgtgagttagtgtgtaaaatgtatattgtcatatgtgaatttaataataagtccttttgtaagatgatc

SEQ ID NO: 103631 - protein, 202 aa, Arabidopsis thaliana; identical to SEQ ID NO: 30212
  peptide (1)..(202): Ceres Seq. ID no. 13613220
  misc_feature (1)..(202): Homolog of NCBI NO: 15237117 NR Description: expressed protein [Arabidopsis thaliana]
  misc_feature (1)..(202): Homolog of NCBI NO: 21553817 NR Description: unknown [Arabidopsis thaliana]
  misc_feature (9)..(202): Homolog of NCBI NO: 38345848 NR Description: OSJNBa0084K11.12 [Oryza sativa (japonica
  misc_feature (14)..(202): Homolog of NCBI NO: 18398797 NR Description: expressed protein [Arabidopsis thaliana] hypothetical protein [Arabidopsis thaliana]
  misc_feature (14)..(202): Homolog of NCBI NO: 21593697 NR Description: unknown [Arabidopsis thaliana]
  misc_feature (41)..(196): Homolog of NCBI NO: 22830926 NR Description: P0466H10.24 [Oryza sativa (japonica
  misc_feature (14)..(49): Homolog of NCBI NO: 22830926 NR Description: P0466H10.24 [Oryza sativa (japonica
  misc_feature (1)..(163): Homolog of NCBI NO: 24586357 NR Description: CG18812-PA [Drosophila melanogaster]
  misc_feature (1)..(163): Homolog of NCBI NO: 24586355 NR Description: CG18812-PB [Drosophila melanogaster]
  misc_feature (1)..(163): Homolog of NCBI NO: 24586353 NR Description: CG18812-PC [Drosophila melanogaster]

SEQ ID NO: 103632 - DNA, 1134 bp, Arabidopsis thaliana
  misc_feature (1)..(1134): Ceres Seq. ID no. 13613221
  misc_feature: MA Experiment ID: 108488 Result: Down-regulated in Transcription
  misc_feature: MA Experiment ID: 20000087 Result: Up-regulated in Transcription
  misc_feature: MA Experiment 20000087 PARAMETER Experiment Name: At_100uM_ABA_Mutants_cDNA_P Parameter: Plant Line Value: WS
  misc_feature: MA Experiment 20000087 PARAMETER Experiment Name: At_100uM_ABA_Mutants_cDNA_P Parameter: Timepoint (hr) Value: 6
  misc_feature: MA Experiment 20000087 PARAMETER Experiment Name: At_100uM_ABA_Mutants_cDNA_P Parameter: Tissue Value: Aerial
  misc_feature: MA Experiment 20000087 PARAMETER Experiment Name: At_100uM_ABA_Mutants_cDNA_P Parameter: Treatment Value: 100uM ABA vs. No Treatment
  misc_feature: MA Experiment ID: 20000224 Result: Down-regulated in Transcription
  misc_feature: MA Experiment ID: 20000307 Result: Up-regulated in Transcription
  misc_feature: MA Experiment 20000307 PARAMETER Experiment Name: At_Germinating_Seeds_Sub_P Parameter: Age (hr) Value: 24 vs. 0
  misc_feature: MA Experiment 20000307 PARAMETER Experiment Name: At_Germinating_Seeds_Sub_P Parameter: Organism Value: A. thaliana
  misc_feature: MA Experiment 20000307 PARAMETER Experiment Name: At_Germinating_Seeds_Sub_P Parameter: Plant Line Value: WS
  misc_feature: MA Experiment 20000307 PARAMETER Experiment Name: At_Germinating_Seeds_Sub_P Parameter: Tissue Value: Germinating Seeds
  misc_feature: MA Experiment ID: 20000355 Result: Up-regulated in Transcription
  misc_feature: MA Experiment 20000355 PARAMETER Experiment Name: At_Siliques_Sub_P Parameter: Age (day) Value: 21
  misc_feature: MA Experiment 20000355 PARAMETER Experiment Name: At_Siliques_Sub_P Parameter: Organism Value: A. thaliana
  misc_feature: MA Experiment 20000355 PARAMETER Experiment Name: At_Siliques_Sub_P Parameter: Plant Line Value: WS
  misc_feature: MA Experiment 20000355 PARAMETER Experiment Name: At_Siliques_Sub_P Parameter: Tissue Value: Less Than 5mm Siliques vs. Whole Plant
ctatctttcgagcattgaaatgattaaaaaaaaattagtggtgttttcaacatagatcatgacaggcaaaccctagattttacttcacctacttgaggttaaaaaacttaattgcaagtaggccagacatcggatcttctctcttaagggctaagcaaaacccatctctcctctttcttctatcttctttctcttccttctctcttctcttgtataaactccactgagctctgtttttgtttttaccgtagatcgtttcgagtctctttaatctttggcgggttccgtaaaaaaaaaaatggcctcttctagattccaatctgggttttgtcctatctcttcgtgtccctctcttgagaatttcatcgaaaggattaaagacgcatgtcgtttcaccctctccgctgttctagggacaattctctcggcggtcttgactttcttcttcgctttagtgggcacattgcttggagcacttactggagctttgataggccaagaaaccgaaagtgggtttatccgaggagcggcggttggagccatttcgggagctgttttctctatcgaagtctttgagtcatctcttgttctttggaaatctaatgagtcacgttttggatgtctcctctacttgattgatgtcattgttagtctgataagtggtagacttgtgcgggaacgaataggtccagcaatgctaagtgcggttcaaagtcagatgggagctgtggattcaactttcgaagagctctcgagtattttcgataccggtggctcaaaggggttaacaggagatttggttgataaaatacctaaaatcaaaatcactggcaaaaacaacttagatgcttctggcaacaaagactcatgttctgtttgtcttcaggattttcaacttggtgaaacggtgagaagcttgccacattgtcatcacatgtttcacttgccttgcatagacaattggctcttcaggcacggatcttgtccaatgtgtagacgcgatctgtaatctcttttcttaccatttgcacagcctcttccctctctctccttcttcttgtatggtcgtaaattcgtaatcatgtggttagagtctctatatatgtacaaagaaatgaaaaaaaaaaagttttg

SEQ ID NO: 103633 - protein, 236 aa, Arabidopsis thaliana; identical to SEQ ID NO: 41212
  peptide (1)..(236): Ceres Seq. ID no. 13613222
  misc_feature (191)..(232): Pfam Name: Zinc finger, C3HC4 type (RING finger) Pfam Description: Zinc finger, C3HC4 type (RING finger)
  misc_feature (1)..(236): Homolog of NCBI NO: 26451101 NR Description: unknown protein [Arabidopsis thaliana]
  misc_feature (1)..(236): Homolog of NCBI NO: 27524902 NR Description: NEP1-interacting protein [Arabidopsis thaliana]
  misc_feature (2)..(236): Homolog of NCBI NO: 30680091 NR Description: expressed protein [Arabidopsis thaliana]
  misc_feature (2)..(236): Homolog of NCBI NO: 26452210 NR Description: unknown protein [Arabidopsis thaliana]
  misc_feature (2)..(236): Homolog of NCBI NO: 25411815 NR Description: hypothetical protein At2g17730 [imported] -
  misc_feature (2)..(236): Homolog of NCBI NO: 7485279 NR Description: hypothetical protein A_TM017A05.9 - Arabidopsis
  misc_feature (1)..(206): Homolog of NCBI NO: 15233363 NR Description: expressed protein [Arabidopsis thaliana]
  misc_feature (195)..(236): Homolog of NCBI NO: 15233363 NR Description: expressed protein [Arabidopsis thaliana]
  misc_feature (23)..(236): Homolog of NCBI NO: 15239242 NR Description: zinc finger (C3HC4-type RING finger) protein [Arabidopsis thaliana] >gi|10177122|dbj|BAB10412.1| contains to unknown protein~gb|AAF18680.1~gene_id:K2A18.15 [Arabidopsis
  misc_feature (14)..(236): Homolog of NCBI NO: 37536572 NR Description: hypothetical protein [Oryza sativa (japonica group)] >gi|13357247|gb|AAK20044.1| hypothetical protein [Oryza

SEQ ID NO: 103634 - DNA, 1070 bp, Arabidopsis thaliana
  misc_feature (1)..(1070): Ceres Seq. ID no. 13613227
  misc_feature: MA Experiment ID: 108433 Result: Down-regulated in Transcription
  misc_feature: MA Experiment 108433 PARAMETER Experiment Name: At_rhl_Mutant2_cDNA_P Parameter: Age (day) Value: 7
  misc_feature: MA Experiment 108433 PARAMETER Experiment Name: At_rhl_Mutant2_cDNA_P Parameter: Organism Value: A. thaliana
  misc_feature: MA Experiment 108433 PARAMETER Experiment Name: At_rhl_Mutant2_cDNA_P Parameter: Plant Line Value: rhl Mutant vs. wt landsburg
  misc_feature: MA Experiment 108433 PARAMETER Experiment Name: At_rhl_Mutant2_cDNA_P Parameter: Tissue Value: Roots
  misc_feature: MA Experiment ID: 20000069 Result: Down-regulated in Transcription
  misc_feature: MA Experiment 20000069 PARAMETER Experiment Name: At_100uM_ABA_Mutants_cDNA_P Parameter: Plant Line Value: CS23
  misc_feature: MA Experiment 20000069 PARAMETER Experiment Name: At_100uM_ABA_Mutants_cDNA_P Parameter: Timepoint (hr) Value: 6
  misc_feature: MA Experiment 20000069 PARAMETER Experiment Name: At_100uM_ABA_Mutants_cDNA_P Parameter: Tissue Value: Aerial
  misc_feature: MA Experiment 20000069 PARAMETER Experiment Name: At_100uM_ABA_Mutants_cDNA_P Parameter: Treatment Value: 100uM ABA vs. No Treatment
  misc_feature: MA Experiment ID: 20000180 Result: Up-regulated in Transcription
  misc_feature: MA Experiment 20000180 PARAMETER Experiment Name: At_Germinating_Seeds_P Parameter: Age (hr) Value: 24 vs. 0
  misc_feature: MA Experiment 20000180 PARAMETER Experiment Name: At_Germinating_Seeds_P Parameter: Tissue Value: Germinating Seeds
tttctctctctagttgttgttctctctctctctcgcatcctccaattcatcgtcctcacgttcccttttgtttattcatcttccttccttcttcacatttctgattttctctatttggggggtttgtttccacattatacatatctagggttttgagatggttaattgaaagataatggtcgaagtttcggaggaattggcttcacattgtgggtgtttctggcttcctcaggtttaaatctgaggttgatctcttttgttttttggtaaattgtgacatattttggctcgaagaagaagaagaagaggcaatgagcgcatcaaggttcataaagtgcgtcaccgttggtgatggagctgttggtaaaacctgtttgctgatttcttataccagcaacacctttcccacggattatgttccgactgttttcgataactttagtgcaaatgtggttgttaatggagccacggtgaatcttggattgtgggatactgcagggcaagaggactataacagattaagacctttgagttaccgtggtgctgatgttttcattcttgccttctctctcattagtaaggctagttatgagaatgtttccaagaagtggattcctgagttgaagcactatgctcctggtgtcccaattgtccttgttggaaccaaactagatcttcgagatgacaaacagtttttcatcgaccatcctggtgctgtccctattaccactgttcagggagaggagctgaagaagctaattggagcgccagcttacatcgagtgcagttcaaaatcacaagagaacgtgaagggcgtgtttgatgcagcgatcagagtggtccttcaacctccaaagcagaagaaaaagaagaacaaagcacaaaaggcctgctccatcttgtaatagcactcatggaagtcaagaagctctttgagatgaggatgacagggtggtttaaaaaagtatcgctttttcatttttgttgttgttttccgttttcatttgtgatctcttagttccgtacaaaacgaattgtgaggttaattcaacttctattttaactgatag

SEQ ID NO: 103635 - protein, 197 aa, Arabidopsis thaliana; identical to SEQ ID NO: 22729
  peptide (1)..(197): Ceres Seq. ID no. 13613228
  misc_feature (8)..(179): Pfam Name: Ras family Pfam Description: Ras family
  misc_feature (1)..(197): Homolog of NCBI NO: 15233418 NR Description: GTP-binding protein, putative [Arabidopsis
  misc_feature (1)..(197): Homolog of NCBI NO: 15227902 NR Description: Rac-like GTP-binding protein (ARAC1) [Arabidopsis
  misc_feature (1)..(197): Homolog of NCBI NO: 27413417 NR Description: putative ROP family GTPase [Brassica napus]
  misc_feature (1)..(197): Homolog of NCBI NO: 2500199 NR Description: RAC-LIKE GTP BINDING PROTEIN RHO1
  misc_feature (1)..(197): Homolog of NCBI NO: 2500195 NR Description: RAC-LIKE GTP BINDING PROTEIN RHO1
  misc_feature (1)..(197): Homolog of NCBI NO: 15230443 NR Description: GTP binding protein, putative [Arabidopsis
  misc_feature (1)..(197): Homolog of NCBI NO: 14278856 NR Description: Rac-like GTPase 1 [Nicotiana tabacum]
  misc_feature (1)..(197): Homolog of NCBI NO: 20269987 NR Description: small G-protein ROP9 [Medicago truncatula]
  misc_feature (1)..(197): Homolog of NCBI NO: 20269985 NR Description: small G-protein ROP6 [Medicago truncatula]
  misc_feature (1)..(196): Homolog of NCBI NO: 27413411 NR Description: putative ROP family GTPase [Brassica napus]

SEQ ID NO: 103636 - DNA, 1188 bp, Arabidopsis thaliana
  misc_feature (1)..(1188): Ceres Seq. ID no. 13613231
  misc_feature: MA Experiment ID: 108433 Result: Down-regulated in Transcription
  misc_feature: MA Experiment 108433 PARAMETER Experiment Name: At_rhl_Mutant2_cDNA_P Parameter: Age (day) Value: 7
  misc_feature: MA Experiment 108433 PARAMETER Experiment Name: At_rhl_Mutant2_cDNA_P Parameter: Organism Value: A. thaliana
  misc_feature: MA Experiment 108433 PARAMETER Experiment Name: At_rhl_Mutant2_cDNA_P Parameter: Plant Line Value: rhl Mutant vs. wt landsburg
  misc_feature: MA Experiment 108433 PARAMETER Experiment Name: At_rhl_Mutant2_cDNA_P Parameter: Tissue Value: Roots
  misc_feature: MA Experiment ID: 108461 Result: Down-regulated in Transcription
  misc_feature: MA Experiment 108461 PARAMETER Experiment Name: At_Germinating_Seeds_cDNA_P Parameter: Age (day) Value: 1 vs. 0
  misc_feature: MA Experiment 108461 PARAMETER Experiment Name: At_Germinating_Seeds_cDNA_P Parameter: Tissue Value: Germinating Seeds
  misc_feature: MA Experiment ID: 108462 Result: Down-regulated in Transcription
  misc_feature: MA Experiment 108462 PARAMETER Experiment Name: At_Germinating_Seeds_cDNA_P Parameter: Age (day) Value: 2 vs. 0
  misc_feature: MA Experiment 108462 PARAMETER Experiment Name: At_Germinating_Seeds_cDNA_P Parameter: Tissue Value: Germinating Seeds
  misc_feature: MA Experiment ID: 108463 Result: Down-regulated in Transcription
  misc_feature: MA Experiment 108463 PARAMETER Experiment Name: At_Germinating_Seeds_cDNA_P Parameter: Age (day) Value: 3 vs. 0
  misc_feature: MA Experiment 108463 PARAMETER Experiment Name: At_Germinating_Seeds_cDNA_P Parameter: Tissue Value: Germinating Seeds
  misc_feature: MA Experiment ID: 108464 Result: Down-regulated in Transcription
  misc_feature: MA Experiment 108464 PARAMETER Experiment Name: At_Germinating_Seeds_cDNA_P Parameter: Age (day) Value: 4 vs. 0
  misc_feature: MA Experiment 108464 PARAMETER Experiment Name: At_Germinating_Seeds_cDNA_P Parameter: Tissue Value: Germinating Seeds
  misc_feature: MA Experiment ID: 108579 Result: Up-regulated in Transcription
  misc_feature: MA Experiment 108579 PARAMETER Experiment Name: At_4deg_Cold_cDNA_P Parameter: Temperature (deg C) Value: 4 vs. 22
  misc_feature: MA Experiment 108579 PARAMETER Experiment Name: At_4deg_Cold_cDNA_P Parameter: Timepoint (hr) Value: 6
  misc_feature: MA Experiment 108579 PARAMETER Experiment Name: At_4deg_Cold_cDNA_P Parameter: Tissue Value: Aerial
  misc_feature: MA Experiment ID: 108585 Result: Up-regulated in Transcription
  misc_feature: MA Experiment 108585 PARAMETER Experiment Name: At_5mM_NaNP_cDNA_P Parameter: Timepoint (hr) Value: 6
  misc_feature: MA Experiment 108585 PARAMETER Experiment Name: At_5mM_NaNP_cDNA_P Parameter: Tissue Value: Aerial
  misc_feature: MA Experiment 108585 PARAMETER Experiment Name: At_5mM_NaNP_cDNA_P Parameter: Treatment Value: null
  misc_feature: MA Experiment ID: 20000113 Result: Up-regulated in Transcription
  misc_feature: MA Experiment 20000113 PARAMETER Experiment Name: At_42deg_Heat_cDNA_P Parameter: Temperature (deg C) Value: 42 vs. 22
  misc_feature: MA Experiment 20000113 PARAMETER Experiment Name: At_42deg_Heat_cDNA_P Parameter: Timepoint (hr) Value: 8
  misc_feature: MA Experiment 20000113 PARAMETER Experiment Name: At_42deg_Heat_cDNA_P Parameter: Tissue Value: Aerial
  misc_feature: MA Experiment ID: 20000173 Result: Up-regulated in Transcription
  misc_feature: MA Experiment 20000173 PARAMETER Experiment Name: At_42deg_Heat_P Parameter: Age (day) Value: 14
  misc_feature: MA Experiment 20000173 PARAMETER Experiment Name: At_42deg_Heat_P Parameter: Organism Value: A. thaliana
  misc_feature: MA Experiment 20000173 PARAMETER Experiment Name: At_42deg_Heat_P Parameter: Plant Line Value: WS
  misc_feature: MA Experiment 20000173 PARAMETER Experiment Name: At_42deg_Heat_P Parameter: Temperature (deg C) Value: 42 vs. 22
  misc_feature: MA Experiment 20000173 PARAMETER Experiment Name: At_42deg_Heat_P Parameter: Timepoint (hr) Value: 6
  misc_feature: MA Experiment 20000173 PARAMETER Experiment Name: At_42deg_Heat_P Parameter: Tissue Value: Aerial
  misc_feature: MA Experiment ID: 20000180 Result: Down-regulated in Transcription
  misc_feature: MA Experiment 20000180 PARAMETER Experiment Name: At_Germinating_Seeds_P Parameter: Age (hr) Value: 24 vs. 0
  misc_feature: MA Experiment 20000180 PARAMETER Experiment Name: At_Germinating_Seeds_P Parameter: Tissue Value: Germinating Seeds
  misc_feature: MA Experiment ID: 20000184 Result: Up-regulated in Transcription
  misc_feature: MA Experiment 20000184 PARAMETER Experiment Name: At_Shoots__P Parameter: Age (day) Value: 7
  misc_feature: MA Experiment 20000184 PARAMETER Experiment Name: At_Shoots__P Parameter: Tissue Value: Shoots vs. Whole Plant
  misc_feature: MA Experiment ID: 20000224 Result: Down-regulated in Transcription
  misc_feature: MA Experiment ID: 20000495 Result: Down-regulated in Transcription
  misc_feature: MA Experiment 20000495 PARAMETER Experiment Name: At_Guard_Cells_P Parameter: Harvest Date Value: 8/2/2002
  misc_feature: MA Experiment 20000495 PARAMETER Experiment Name: At_Guard_Cells_P Parameter: Organism Value: A. thaliana
  misc_feature: MA Experiment 20000495 PARAMETER Experiment Name: At_Guard_Cells_P Parameter: Tissue Value: Guard Cells vs. Leaves
  misc_feature: MA Experiment ID: 20001557 Result: Up-regulated in Transcription
  misc_feature: MA Experiment 20001557 PARAMETER Experiment Name: At_Drought_Soil_Dry_P Parameter: Age (day) Value: 27
  misc_feature: MA Experiment 20001557 PARAMETER Experiment Name: At_Drought_Soil_Dry_P Parameter: Organism Value: A. thaliana
  misc_feature: MA Experiment 20001557 PARAMETER Experiment Name: At_Drought_Soil_Dry_P Parameter: Plant Line Value: WS
  misc_feature: MA Experiment 20001557 PARAMETER Experiment Name: At_Drought_Soil_Dry_P Parameter: Post Timepoint (hr) Value: 3
  misc_feature: MA Experiment 20001557 PARAMETER Experiment Name: At_Drought_Soil_Dry_P Parameter: Post-Treatment Value: Re-Water vs. No Drought
  misc_feature: MA Experiment 20001557 PARAMETER Experiment Name: At_Drought_Soil_Dry_P Parameter: Timepoint (day) Value: 13
  misc_feature: MA Experiment 20001557 PARAMETER Experiment Name: At_Drought_Soil_Dry_P Parameter: Treatment Value: Drought vs. No Drought
  misc_feature: MA Experiment ID: 20001558 Result: Up-regulated in Transcription
  misc_feature: MA Experiment 20001558 PARAMETER Experiment Name: At_Drought_Soil_Dry_P Parameter: Age (day) Value: 27
  misc_feature: MA Experiment 20001558 PARAMETER Experiment Name: At_Drought_Soil_Dry_P Parameter: Organism Value: A. thaliana
  misc_feature: MA Experiment 20001558 PARAMETER Experiment Name: At_Drought_Soil_Dry_P Parameter: Plant Line Value: WS
  misc_feature: MA Experiment 20001558 PARAMETER Experiment Name: At_Drought_Soil_Dry_P Parameter: Post Timepoint (hr) Value: 6
  misc_feature: MA Experiment 20001558 PARAMETER Experiment Name: At_Drought_Soil_Dry_P Parameter: Post-Treatment Value: Re-Water vs. No Drought
  misc_feature: MA Experiment 20001558 PARAMETER Experiment Name: At_Drought_Soil_Dry_P Parameter: Timepoint (day) Value: 13
  misc_feature: MA Experiment 20001558 PARAMETER Experiment Name: At_Drought_Soil_Dry_P Parameter: Treatment Value: Drought vs. No Drought
  misc_feature: MA Experiment ID: 20001757 Result: Up-regulated in Transcription
  misc_feature: MA Experiment 20001757 PARAMETER Experiment Name: At_50mM_NH4NO3_L-to-H_P Parameter: Timepoint (hr) Value: 6
  misc_feature: MA Experiment 20001757 PARAMETER Experiment Name: At_50mM_NH4NO3_L-to-H_P Parameter: Tissue Value: Leaf
  misc_feature: MA Experiment 20001757 PARAMETER Experiment Name: At_50mM_NH4NO3_L-to-H_P Parameter: Treatment Value: 50mM NH4NO3 vs 100mM Mannitol
ccaacttaaaaaaccctaatttctcaatctcttcttcaacttttttttttaacgatggcttcagaggatcaatcggcggcgagatctaccgggaaggtgaactggttcaacgcttctaaaggctatggtttcattactcctgacgatggcagcgtagagcttttcgttcatcaatcttcaattgtctccgaaggttaccggagtttaaccgtcggcgatgcggttgagttcgctattactcagggaagcgacggtaagactaaagccgtcaatgttactgctcctggtggtggttctctcaagaaggagaataactctcgtggtaacggtgctaggcgcggcggcggtggaagcggttgctacaattgcggtgagttaggtcatatctctaaagattgtggtattggtggcggcggcggaggtggtgaacgtagatctagaggaggagaaggttgttacaattgtggtgatactggtcacttcgctagggattgtacttcagctggaaacggtgaccaacgtggagccaccaaaggtggaaacgatggttgctacacttgcggtgatgttggtcacgtggctagggattgtactcagaaatcagttggaaacggagaccaacgtggagcggtcaaaggtggaaacgatggttgctacacttgtggtgatgttggtcactttgctagggattgtactcagaaggttgctgccggaaacgtcagaagcggtggtggtggtagtggaacttgttattcatgcggtggagttggtcacattgcaagagattgtgcgactaagagacagccttctcgtgggtgttaccagtgtggtggttctggtcacttggctcgtgattgtgaccagagaggaagcggtggaggaggtaatgataatgcgtgctacaagtgtggtaaggaaggtcactttgcaagggaatgttcttctgtagcttaatcgatttcctaatcaacaaaacaaaaaaacaagaatgaaattgaatcgagttatatagtttggtatatattactcttcgttttcatttatctttttttttgttgttgatgggaatgaaattgcctggtccttttggtgtgtttttgagcttttattattatacagagtgatccctttttgttataactattacaagtttttagctttatttgatatggatgctctctccttttc

SEQ ID NO: 103637 - protein, 299 aa, Arabidopsis thaliana
  peptide (1)..(299): Ceres Seq. ID no. 13613232
  misc_feature (10)..(77): Pfam Name: 'Cold-shock' DNA-binding domain Pfam Description: 'Cold-shock' DNA-binding domain
  misc_feature (1)..(299): Homolog of NCBI NO: 15233440 NR Description: glycine-rich protein [Arabidopsis thaliana]
  misc_feature (1)..(299): Homolog of NCBI NO: 18398546 NR Description: glycine-rich, zinc-finger DNA-binding protein
  misc_feature (4)..(299): Homolog of NCBI NO: 7442089 NR Description: glycine-rich protein T13L16.11 - Arabidopsis
  misc_feature (10)..(248): Homolog of NCBI NO: 21322752 NR Description: cold shock protein-1 [Triticum aestivum]
  misc_feature (5)..(214): Homolog of NCBI NO: 121631 NR Description: Glycine-rich protein 2 >gi|72323|pir||KNNT2S
  misc_feature (10)..(216): Homolog of NCBI NO: 40363759 NR Description: putative glycine-rich protein [Triticum aestivum]
  misc_feature (7)..(216): Homolog of NCBI NO: 29467522 NR Description: P0582D05.12 [Oryza sativa (japonica
  misc_feature (91)..(297): Homolog of NCBI NO: 729704 NR Description: DNA-binding protein HEXBP (Hexamer-binding
  misc_feature (1)..(214): Homolog of NCBI NO: 15234010 NR Description: glycine-rich protein 2 (GRP2) [Arabidopsis
  misc_feature (95)..(295): Homolog of NCBI NO: 1841864 NR Description: nucleic acid binding protein [Trypanosoma
MASEDQSAARSTGKVNWFNASKGYGFITPDDGSVELFVHQSSIVSEGYRSLTVGDAVEFAITQGSDGKTKAVNVTAPGGGSLKKENNSRGNGARRGGGGSGCYNCGELGHISKDCGIGGGGGGGERRSRGGEGCYNCGDTGHFARDCTSAGNGDQRGATKGGNDGCYTCGDVGHVARDCTQKSVGNGDQRGAVKGGNDGCYTCGDVGHFARDCTQKVAAGNVRSGGGGSGTCYSCGGVGHIARDCATKRQPSRGCYQCGGSGHLARDCDQRGSGGGGNDNACYKCGKEGHFARECSSVA

SEQ ID NO: 103638 - DNA, 1696 bp, Arabidopsis thaliana
  misc_feature (1)..(1696): Ceres Seq. ID no. 13613239
  misc_feature: MA Experiment ID: 108569 Result: Up-regulated in Transcription
  misc_feature: MA Experiment 108569 PARAMETER Experiment Name: At_0.001%_MeJA__cDNA_P Parameter: Timepoint (hr) Value: 6
  misc_feature: MA Experiment 108569 PARAMETER Experiment Name: At_0.001%_MeJA__cDNA_P Parameter: Tissue Value: Aerial
  misc_feature: MA Experiment 108569 PARAMETER Experiment Name: At_0.001%_MeJA__cDNA_P Parameter: Treatment Value: 0.001% MeJA vs. No Treatment
  misc_feature: MA Experiment ID: 108573 Result: Up-regulated in Transcription
  misc_feature: MA Experiment 108573 PARAMETER Experiment Name: At_Drought_cDNA_P Parameter: Timepoint (hr) Value: 6
  misc_feature: MA Experiment 108573 PARAMETER Experiment Name: At_Drought_cDNA_P Parameter: Tissue Value: Aerial
  misc_feature: MA Experiment 108573 PARAMETER Experiment Name: At_Drought_cDNA_P Parameter: Treatment Value: Drought vs. No Drought
  misc_feature: MA Experiment ID: 20000087 Result: Down-regulated in Transcription
  misc_feature: MA Experiment 20000087 PARAMETER Experiment Name: At_100uM_ABA_Mutants_cDNA_P Parameter: Plant Line Value: WS
  misc_feature: MA Experiment 20000087 PARAMETER Experiment Name: At_100uM_ABA_Mutants_cDNA_P Parameter: Timepoint (hr) Value: 6
  misc_feature: MA Experiment 20000087 PARAMETER Experiment Name: At_100uM_ABA_Mutants_cDNA_P Parameter: Tissue Value: Aerial
  misc_feature: MA Experiment 20000087 PARAMETER Experiment Name: At_100uM_ABA_Mutants_cDNA_P Parameter: Treatment Value: 100uM ABA vs. No Treatment
  misc_feature: MA Experiment ID: 20000794 Result: Up-regulated in Transcription
  misc_feature: MA Experiment 20000794 PARAMETER Experiment Name: At_Petals_P Parameter: Age (day) Value: 23-25 days
  misc_feature: MA Experiment 20000794 PARAMETER Experiment Name: At_Petals_P Parameter: Plant Line Value: WS
  misc_feature: MA Experiment 20000794 PARAMETER Experiment Name: At_Petals_P Parameter: Tissue Value: Petals vs. Whole plant
attatattgtccttgcaatttataagtaaaaacatttcttttctggtccactcgttttaacttccggcgatcgattttcacggcgagaaatgttgtcggcgcttggctttgctttactcagcatcttcgcgatcctcttgtcgttatcaaccttgtctaatggattacttcaacctcgtaggatttctcatggcttgacggaaagtagcaagtacttgacgagggatgagctctggttcaatcaaaccctagatcattactctccttctgatcatcgcgaattcaaacagcgatactatgaatatctagaccatttacgagttcctgatggacctatctttatgatgatctgtggcgaaggaccttgcaatggaatccccaatgactatataactgtgttagcaaagaagtttgatgcaggcattgtttcacttgagcatcgttattacggaaagagctcaccgtttaagtcattagccactgagaatctcaagtatctttcttctaaacaggctcttttcgatttagctgctttccgccaatattaccaggactctttgaatgttaagtttaatagaagtggcgatgttgagaatccgtggtttttcttcggagcttcttattctggagctttaagtgcttggttccggcttaagttccctcatttgacctgtggaagccttgctagttctgcagttgttcgtgcagtctacgaattccctgaatttgatcaacagataggtgagtcggctggaccggaatgtaaagctgcactacaagagactaataagctcttggaactagggcttaaagtgaataacagggctgtgaaagctctcttcaatgccaccgagcttgacgttgatgctgatttcttatacttgatagcagatgcagaagttatggcgatccaatacggaaacccagataaactatgtgtaccactcgtggaagctcagaagaatcgtgatgatttagtggaagcatatgctaaatatgttagagagttttgtgtgggggttttcgggctaagctctaaaacatatagccggaaacatctgctagacactgcggtcaccccagaaagtgcagataggctttggtggttccaagtttgcactgaagtggcatatttccaagtggcacctgcaaacgatagcatccggtctcatcaaatcaatacagagtatcatttggatctatgcaagagtctgtttgggaaaggtgtttaccctgaagtcgatgcaacaaacctgtattatggaagtgacagaattgctgcgaccaagattatcttcacaaatgggtcacaggatccatggcgtcatgcatccaaacagacctcatctcctgaactgccttcttacattgtgacttgccacaactgtggccatggaagtgatctccgtggatgccctcaatctcccatggtcattggaggtgattccaagaattgcagttcacctgatgcagtgaacaaagtgaggcaacatatagtagatcatatggacttgtggctctctgagtgtcgtggagggattaggagttccatgtaaagagtcacacgaagtcagaaactgcggttatgcaaataaataaaacatcagatgtatgtttcaaacctgtatctgtgtaactgtaacctctgatgtatgtttcgaacttgtctctacggacctaatacagtagtttacac

SEQ ID NO: 103639 - protein, 488 aa, Arabidopsis thaliana; identical to SEQ ID NO: 23326
  peptide (1)..(488): Ceres Seq. ID no. 13613240
  misc_feature (52)..(469): Pfam Name: Serine carboxypeptidase S28 Pfam Description: Serine carboxypeptidase S28
  misc_feature (1)..(488): Homolog of NCBI NO: 18419800 NR Description: expressed protein [Arabidopsis thaliana] unknown protein [Arabidopsis thaliana]
  misc_feature (118)..(482): Homolog of NCBI NO: 18419798 NR Description: expressed protein [Arabidopsis thaliana]
  misc_feature (1)..(156): Homolog of NCBI NO: 18419798 NR Description: expressed protein [Arabidopsis thaliana]
  misc_feature (61)..(474): Homolog of NCBI NO: 7486037 NR Description: hypothetical protein F23E13.80 - Arabidopsis >gi|2961378|emb|CAA18125.1| putative protein [Arabidopsis >gi|7270572|emb|CAB80290.1| putative protein [Arabidopsis
  misc_feature (61)..(297): Homolog of NCBI NO: 7486037 NR Description: hypothetical protein F23E13.80 - Arabidopsis >gi|2961378|emb|CAA18125.1| putative protein [Arabidopsis >gi|7270572|emb|CAB80290.1| putative protein [Arabidopsis
  misc_feature (423)..(488): Homolog of NCBI NO: 7486037 NR Description: hypothetical protein F23E13.80 - Arabidopsis >gi|2961378|emb|CAA18125.1| putative protein [Arabidopsis >gi|7270572|emb|CAB80290.1| putative protein [Arabidopsis
  misc_feature (60)..(481): Homolog of NCBI NO: 37535976 NR Description: putative serine peptidase [Oryza sativa (japonica group)] >gi|10140733|gb|AAG13566.1| putative serine peptidase sativa] >gi|31433013|gb|AAP54577.1| putative serine peptidase
  misc_feature (3)..(60): Homolog of NCBI NO: 37535976 NR Description: putative serine peptidase [Oryza sativa (japonica group)] >gi|10140733|gb|AAG13566.1| putative serine peptidase sativa] >gi|31433013|gb|AAP54577.1| putative serine peptidase
  misc_feature (12)..(486): Homolog of NCBI NO: 37535980 NR Description: putative serine peptidase [Oryza sativa (japonica group)] >gi|10140734|gb|AAG13567.1| putative serine peptidase sativa] >gi|31433015|gb|AAP54579.1| putative serine peptidase
  misc_feature (152)..(488): Homolog of NCBI NO: 15227960 NR Description: hypothetical protein [Arabidopsis thaliana]

SEQ ID NO: 103640 - protein, 404 aa, Arabidopsis thaliana; identical to SEQ ID NO: 23327
  peptide (1)..(404): Ceres Seq. ID no. 13613241
  misc_feature (1)..(385): Pfam Name: Serine carboxypeptidase S28 Pfam Description: Serine carboxypeptidase S28
  misc_feature (1)..(404): Homolog of NCBI NO: 18419800 NR Description: expressed protein [Arabidopsis thaliana] unknown protein [Arabidopsis thaliana]
  misc_feature (34)..(398): Homolog of NCBI NO: 18419798 NR Description: expressed protein [Arabidopsis thaliana]
  misc_feature (1)..(72): Homolog of NCBI NO: 18419798 NR Description: expressed protein [Arabidopsis thaliana]
  misc_feature (1)..(390): Homolog of NCBI NO: 7486037 NR Description: hypothetical protein F23E13.80 - Arabidopsis >gi|2961378|emb|CAA18125.1| putative protein [Arabidopsis >gi|7270572|emb|CAB80290.1| putative protein [Arabidopsis
  misc_feature (1)..(213): Homolog of NCBI NO: 7486037 NR Description: hypothetical protein F23E13.80 - Arabidopsis >gi|2961378|emb|CAA18125.1| putative protein [Arabidopsis >gi|7270572|emb|CAB80290.1| putative protein [Arabidopsis
  misc_feature (339)..(404): Homolog of NCBI NO: 7486037 NR Description: hypothetical protein F23E13.80 - Arabidopsis >gi|2961378|emb|CAA18125.1| putative protein [Arabidopsis >gi|7270572|emb|CAB80290.1| putative protein [Arabidopsis
  misc_feature (1)..(397): Homolog of NCBI NO: 37535976 NR Description: putative serine peptidase [Oryza sativa (japonica group)] >gi|10140733|gb|AAG13566.1| putative serine peptidase sativa] >gi|31433013|gb|AAP54577.1| putative serine peptidase
  misc_feature (1)..(402): Homolog of NCBI NO: 37535980 NR Description: putative serine peptidase [Oryza sativa (japonica group)] >gi|10140734|gb|AAG13567.1| putative serine peptidase sativa] >gi|31433015|gb|AAP54579.1| putative serine peptidase
  misc_feature (68)..(404): Homolog of NCBI NO: 15227960 NR Description: hypothetical protein [Arabidopsis thaliana]
  misc_feature (1)..(25): Homolog of NCBI NO: 15227960 NR Description: hypothetical protein [Arabidopsis thaliana]

SEQ ID NO: 103641 - protein, 403 aa, Arabidopsis thaliana; identical to SEQ ID NO: 23328
  peptide (1)..(403): Ceres Seq. ID no. 13613242
  misc_feature (1)..(384): Pfam Name: Serine carboxypeptidase S28 Pfam Description: Serine carboxypeptidase S28
  misc_feature (1)..(403): Homolog of NCBI NO: 18419800 NR Description: expressed protein [Arabidopsis thaliana] unknown protein [Arabidopsis thaliana]
  misc_feature (33)..(397): Homolog of NCBI NO: 18419798 NR Description: expressed protein [Arabidopsis thaliana]
  misc_feature (1)..(71): Homolog of NCBI NO: 18419798 NR Description: expressed protein [Arabidopsis thaliana]
  misc_feature (1)..(389): Homolog of NCBI NO: 7486037 NR Description: hypothetical protein F23E13.80 - Arabidopsis >gi|2961378|emb|CAA18125.1| putative protein [Arabidopsis >gi|7270572|emb|CAB80290.1| putative protein [Arabidopsis
  misc_feature (1)..(212): Homolog of NCBI NO: 7486037 NR Description: hypothetical protein F23E13.80 - Arabidopsis >gi|2961378|emb|CAA18125.1| putative protein [Arabidopsis >gi|7270572|emb|CAB80290.1| putative protein [Arabidopsis
  misc_feature (338)..(403): Homolog of NCBI NO: 7486037 NR Description: hypothetical protein F23E13.80 - Arabidopsis >gi|2961378|emb|CAA18125.1| putative protein [Arabidopsis >gi|7270572|emb|CAB80290.1| putative protein [Arabidopsis
  misc_feature (1)..(396): Homolog of NCBI NO: 37535976 NR Description: putative serine peptidase [Oryza sativa (japonica group)] >gi|10140733|gb|AAG13566.1| putative serine peptidase sativa] >gi|31433013|gb|AAP54577.1| putative serine peptidase
  misc_feature (1)..(401): Homolog of NCBI NO: 37535980 NR Description: putative serine peptidase [Oryza sativa (japonica group)] >gi|10140734|gb|AAG13567.1| putative serine peptidase sativa] >gi|31433015|gb|AAP54579.1| putative serine peptidase
  misc_feature (67)..(403): Homolog of NCBI NO: 15227960 NR Description: hypothetical protein [Arabidopsis thaliana]
  misc_feature (1)..(24): Homolog of NCBI NO: 15227960 NR Description: hypothetical protein [Arabidopsis thaliana]

SEQ ID NO: 103642 - DNA, 1263 bp, Arabidopsis thaliana
  misc_feature (1)..(1263): Ceres Seq. ID no. 13613246
  misc_feature: MA Experiment ID: 108435 Result: Down-regulated in Transcription
  misc_feature: MA Experiment 108435 PARAMETER Experiment Name: At_stm_Mutants_cDNA_P Parameter: Plant Line Value: wt Landsburg vs stm
  misc_feature: MA Experiment 108435 PARAMETER Experiment Name: At_stm_Mutants_cDNA_P Parameter: Tissue Value: Shoot Apical Meristem Region
  misc_feature: MA Experiment ID: 108462 Result: Up-regulated in Transcription
  misc_feature: MA Experiment 108462 PARAMETER Experiment Name: At_Germinating_Seeds_cDNA_P Parameter: Age (day) Value: 2 vs. 0
  misc_feature: MA Experiment 108462 PARAMETER Experiment Name: At_Germinating_Seeds_cDNA_P Parameter: Tissue Value: Germinating Seeds
  misc_feature: MA Experiment ID: 108463 Result: Up-regulated in Transcription
  misc_feature: MA Experiment 108463 PARAMETER Experiment Name: At_Germinating_Seeds_cDNA_P Parameter: Age (day) Value: 3 vs. 0
  misc_feature: MA Experiment 108463 PARAMETER Experiment Name: At_Germinating_Seeds_cDNA_P Parameter: Tissue Value: Germinating Seeds
  misc_feature: MA Experiment ID: 108464 Result: Up-regulated in Transcription
  misc_feature: MA Experiment 108464 PARAMETER Experiment Name: At_Germinating_Seeds_cDNA_P Parameter: Age (day) Value: 4 vs. 0
  misc_feature: MA Experiment 108464 PARAMETER Experiment Name: At_Germinating_Seeds_cDNA_P Parameter: Tissue Value: Germinating Seeds
  misc_feature: MA Experiment ID: 108561 Result: Down-regulated in Transcription
  misc_feature: MA Experiment 108561 PARAMETER Experiment Name: At_100uM_ABA_cDNA_P Parameter: Timepoint (hr) Value: 6
  misc_feature: MA Experiment 108561 PARAMETER Experiment Name: At_100uM_ABA_cDNA_P Parameter: Tissue Value: Aerial
  misc_feature: MA Experiment 108561 PARAMETER Experiment Name: At_100uM_ABA_cDNA_P Parameter: Treatment Value: 100uM ABA vs. No Treatment
  misc_feature: MA Experiment ID: 108573 Result: Down-regulated in Transcription
  misc_feature: MA Experiment 108573 PARAMETER Experiment Name: At_Drought_cDNA_P Parameter: Timepoint (hr) Value: 6
  misc_feature: MA Experiment 108573 PARAMETER Experiment Name: At_Drought_cDNA_P Parameter: Tissue Value: Aerial
  misc_feature: MA Experiment 108573 PARAMETER Experiment Name: At_Drought_cDNA_P Parameter: Treatment Value: Drought vs. No Drought
  misc_feature: MA Experiment ID: 108576 Result: Down-regulated in Transcription
  misc_feature: MA Experiment 108576 PARAMETER Experiment Name: At_42deg_Heat_cDNA_P Parameter: Temperature (deg C) Value: 42 vs. 22
  misc_feature: MA Experiment 108576 PARAMETER Experiment Name: At_42deg_Heat_cDNA_P Parameter: Timepoint (hr) Value: 1
  misc_feature: MA Experiment 108576 PARAMETER Experiment Name: At_42deg_Heat_cDNA_P Parameter: Tissue Value: Aerial
  misc_feature: MA Experiment ID: 108577 Result: Down-regulated in Transcription
  misc_feature: MA Experiment 108577 PARAMETER Experiment Name: At_42deg_Heat_cDNA_P Parameter: Temperature (deg C) Value: 42 vs. 22
  misc_feature: MA Experiment 108577 PARAMETER Experiment Name: At_42deg_Heat_cDNA_P Parameter: Timepoint (hr) Value: 6
  misc_feature: MA Experiment 108577 PARAMETER Experiment Name: At_42deg_Heat_cDNA_P Parameter: Tissue Value: Aerial
  misc_feature: MA Experiment ID: 108579 Result: Down-regulated in Transcription
  misc_feature: MA Experiment 108579 PARAMETER Experiment Name: At_4deg_Cold_cDNA_P Parameter: Temperature (deg C) Value: 4 vs. 22
  misc_feature: MA Experiment 108579 PARAMETER Experiment Name: At_4deg_Cold_cDNA_P Parameter: Timepoint (hr) Value: 6
  misc_feature: MA Experiment 108579 PARAMETER Experiment Name: At_4deg_Cold_cDNA_P Parameter: Tissue Value: Aerial
  misc_feature: MA Experiment ID: 108585 Result: Down-regulated in Transcription
  misc_feature: MA Experiment 108585 PARAMETER Experiment Name: At_5mM_NaNP_cDNA_P Parameter: Timepoint (hr) Value: 6
  misc_feature: MA Experiment 108585 PARAMETER Experiment Name: At_5mM_NaNP_cDNA_P Parameter: Tissue Value: Aerial
  misc_feature: MA Experiment 108585 PARAMETER Experiment Name: At_5mM_NaNP_cDNA_P Parameter: Treatment Value: null
  misc_feature: MA Experiment ID: 108595 Result: Down-regulated in Transcription
  misc_feature: MA Experiment 108595 PARAMETER Experiment Name: At_Ler-pi_Ovule_cDNA_P Parameter: Plant Line Value: null
  misc_feature: MA Experiment ID: 108605 Result: Down-regulated in Transcription
  misc_feature: MA Experiment 108605 PARAMETER Experiment Name: At_100uM_ABA_cDNA_P Parameter: Timepoint (hr) Value: 6
  misc_feature: MA Experiment 108605 PARAMETER Experiment Name: At_100uM_ABA_cDNA_P Parameter: Tissue Value: Aerial
  misc_feature: MA Experiment 108605 PARAMETER Experiment Name: At_100uM_ABA_cDNA_P Parameter: Treatment Value: 100uM ABA vs. No Treatment
  misc_feature: MA Experiment ID: 108607 Result: Down-regulated in Transcription
  misc_feature: MA Experiment 108607 PARAMETER Experiment Name: At_100uM_ABA_cDNA_P Parameter: Timepoint (hr) Value: 4
  misc_feature: MA Experiment 108607 PARAMETER Experiment Name: At_100uM_ABA_cDNA_P Parameter: Tissue Value: Aerial
  misc_feature: MA Experiment 108607 PARAMETER Experiment Name: At_100uM_ABA_cDNA_P Parameter: Treatment Value: 100uM ABA vs. No Treatment
  misc_feature: MA Experiment ID: 108608 Result: Down-regulated in Transcription
  misc_feature: MA Experiment 108608 PARAMETER Experiment Name: At_100uM_ABA_cDNA_P Parameter: Timepoint (hr) Value: 1
  misc_feature: MA Experiment 108608 PARAMETER Experiment Name: At_100uM_ABA_cDNA_P Parameter: Tissue Value: Aerial
  misc_feature: MA Experiment 108608 PARAMETER Experiment Name: At_100uM_ABA_cDNA_P Parameter: Treatment Value: 100uM ABA vs. No Treatment
  misc_feature: MA Experiment ID: 20000069 Result: Down-regulated in Transcription
  misc_feature: MA Experiment 20000069 PARAMETER Experiment Name: At_100uM_ABA_Mutants_cDNA_P Parameter: Plant Line Value: CS23
  misc_feature: MA Experiment 20000069 PARAMETER Experiment Name: At_100uM_ABA_Mutants_cDNA_P Parameter: Timepoint (hr) Value: 6
  misc_feature: MA Experiment 20000069 PARAMETER Experiment Name: At_100uM_ABA_Mutants_cDNA_P Parameter: Tissue Value: Aerial
  misc_feature: MA Experiment 20000069 PARAMETER Experiment Name: At_100uM_ABA_Mutants_cDNA_P Parameter: Treatment Value: 100uM ABA vs. No Treatment
  misc_feature: MA Experiment ID: 20000070 Result: Down-regulated in Transcription
  misc_feature: MA Experiment 20000070 PARAMETER Experiment Name: At_100uM_ABA_Mutants_cDNA_P Parameter: Plant Line Value: CS24
  misc_feature: MA Experiment 20000070 PARAMETER Experiment Name: At_100uM_ABA_Mutants_cDNA_P Parameter: Timepoint (hr) Value: 6
  misc_feature: MA Experiment 20000070 PARAMETER Experiment Name: At_100uM_ABA_Mutants_cDNA_P Parameter: Tissue Value: Aerial
  misc_feature: MA Experiment 20000070 PARAMETER Experiment Name: At_100uM_ABA_Mutants_cDNA_P Parameter: Treatment Value: 100uM ABA vs. No Treatment
  misc_feature: MA Experiment ID: 20000071 Result: Down-regulated in Transcription
  misc_feature: MA Experiment 20000071 PARAMETER Experiment Name: At_100uM_ABA_Mutants_cDNA_P Parameter: Plant Line Value: CS8104
  misc_feature: MA Experiment 20000071 PARAMETER Experiment Name: At_100uM_ABA_Mutants_cDNA_P Parameter: Timepoint (hr) Value: 6
  misc_feature: MA Experiment 20000071 PARAMETER Experiment Name: At_100uM_ABA_Mutants_cDNA_P Parameter: Tissue Value: Aerial
  misc_feature: MA Experiment 20000071 PARAMETER Experiment Name: At_100uM_ABA_Mutants_cDNA_P Parameter: Treatment Value: 100uM ABA vs. No Treatment
  misc_feature: MA Experiment ID: 20000072 Result: Down-regulated in Transcription
  misc_feature: MA Experiment 20000072 PARAMETER Experiment Name: At_100uM_ABA_Mutants_cDNA_P Parameter: Plant Line Value: CS8105
  misc_feature: MA Experiment 20000072 PARAMETER Experiment Name: At_100uM_ABA_Mutants_cDNA_P Parameter: Timepoint (hr) Value: 6
  misc_feature: MA Experiment 20000072 PARAMETER Experiment Name: At_100uM_ABA_Mutants_cDNA_P Parameter: Tissue Value: Aerial
  misc_feature: MA Experiment 20000072 PARAMETER Experiment Name: At_100uM_ABA_Mutants_cDNA_P Parameter: Treatment Value: 100uM ABA vs. No Treatment
  misc_feature: MA Experiment ID: 20000086 Result: Down-regulated in Transcription
  misc_feature: MA Experiment 20000086 PARAMETER Experiment Name: At_100uM_ABA_Mutants_cDNA_P Parameter: Plant Line Value: CS22
  misc_feature: MA Experiment 20000086 PARAMETER Experiment Name: At_100uM_ABA_Mutants_cDNA_P Parameter: Timepoint (hr) Value: 6
  misc_feature: MA Experiment 20000086 PARAMETER Experiment Name: At_100uM_ABA_Mutants_cDNA_P Parameter: Tissue Value: Aerial
  misc_feature: MA Experiment 20000086 PARAMETER Experiment Name: At_100uM_ABA_Mutants_cDNA_P Parameter: Treatment Value: 100uM ABA vs. No Treatment
  misc_feature: MA Experiment ID: 20000087 Result: Down-regulated in Transcription
  misc_feature: MA Experiment 20000087 PARAMETER Experiment Name: At_100uM_ABA_Mutants_cDNA_P Parameter: Plant Line Value: WS
  misc_feature: MA Experiment 20000087 PARAMETER Experiment Name: At_100uM_ABA_Mutants_cDNA_P Parameter: Timepoint (hr) Value: 6
  misc_feature: MA Experiment 20000087 PARAMETER Experiment Name: At_100uM_ABA_Mutants_cDNA_P Parameter: Tissue Value: Aerial
  misc_feature: MA Experiment 20000087 PARAMETER Experiment Name: At_100uM_ABA_Mutants_cDNA_P Parameter: Treatment Value: 100uM ABA vs. No Treatment
  misc_feature: MA Experiment ID: 20000088 Result: Down-regulated in Transcription
  misc_feature: MA Experiment 20000088 PARAMETER Experiment Name: At_100uM_ABA_Mutants_cDNA_P Parameter: Plant Line Value: Landsberg
  misc_feature: MA Experiment 20000088 PARAMETER Experiment Name: At_100uM_ABA_Mutants_cDNA_P Parameter: Timepoint (hr) Value: 6
  misc_feature: MA Experiment 20000088 PARAMETER Experiment Name: At_100uM_ABA_Mutants_cDNA_P Parameter: Tissue Value: Aerial
  misc_feature: MA Experiment 20000088 PARAMETER Experiment Name: At_100uM_ABA_Mutants_cDNA_P Parameter: Treatment Value: 100uM ABA vs. No Treatment
  misc_feature: MA Experiment ID: 20000112 Result: Down-regulated in Transcription
  misc_feature: MA Experiment 20000112 PARAMETER Experiment Name: At_42deg_Heat_cDNA_P Parameter: Temperature (deg C) Value: 42 vs. 22
  misc_feature: MA Experiment 20000112 PARAMETER Experiment Name: At_42deg_Heat_cDNA_P Parameter: Timepoint (hr) Value: 2
  misc_feature: MA Experiment 20000112 PARAMETER Experiment Name: At_42deg_Heat_cDNA_P Parameter: Tissue Value: Aerial
  misc_feature: MA Experiment ID: 20000113 Result: Down-regulated in Transcription
  misc_feature: MA Experiment 20000113 PARAMETER Experiment Name: At_42deg_Heat_cDNA_P Parameter: Temperature (deg C) Value: 42 vs. 22
  misc_feature: MA Experiment 20000113 PARAMETER Experiment Name: At_42deg_Heat_cDNA_P Parameter: Timepoint (hr) Value: 8
  misc_feature: MA Experiment 20000113 PARAMETER Experiment Name: At_42deg_Heat_cDNA_P Parameter: Tissue Value: Aerial
  misc_feature: MA Experiment ID: 20000117 Result: Down-regulated in Transcription
  misc_feature: MA Experiment 20000117 PARAMETER Experiment Name: At_100uM_ABA_Mutants_cDNA_P Parameter: Plant Line Value: Columbia
  misc_feature: MA Experiment 20000117 PARAMETER Experiment Name: At_100uM_ABA_Mutants_cDNA_P Parameter: Timepoint (hr) Value: 6
  misc_feature: MA Experiment 20000117 PARAMETER Experiment Name: At_100uM_ABA_Mutants_cDNA_P Parameter: Tissue Value: Aerial
  misc_feature: MA Experiment 20000117 PARAMETER Experiment Name: At_100uM_ABA_Mutants_cDNA_P Parameter: Treatment Value: 100uM ABA vs. No Treatment
  misc_feature: MA Experiment ID: 20000144 Result: Down-regulated in Transcription
  misc_feature: MA Experiment 20000144 PARAMETER Experiment Name: At_42deg_Heat_cDNA_P Parameter: Temperature (deg C) Value: 42 vs. 22
  misc_feature: MA Experiment 20000144 PARAMETER Experiment Name: At_42deg_Heat_cDNA_P Parameter: Timepoint (hr) Value: 1
  misc_feature: MA Experiment 20000144 PARAMETER Experiment Name: At_42deg_Heat_cDNA_P Parameter: Tissue Value: Aerial
  misc_feature: MA Experiment ID: 20000169 Result: Down-regulated in Transcription
  misc_feature: MA Experiment 20000169 PARAMETER Experiment Name: At_100uM_ABA_P Parameter: Age (day) Value: 14
  misc_feature: MA Experiment 20000169 PARAMETER Experiment Name: At_100uM_ABA_P Parameter: Organism Value: A. thaliana
  misc_feature: MA Experiment 20000169 PARAMETER Experiment Name: At_100uM_ABA_P Parameter: Plant Line Value: WS
  misc_feature: MA Experiment 20000169 PARAMETER Experiment Name: At_100uM_ABA_P Parameter: Timepoint (hr) Value: 6
  misc_feature: MA Experiment 20000169 PARAMETER Experiment Name: At_100uM_ABA_P Parameter: Tissue Value: Aerial
  misc_feature: MA Experiment 20000169 PARAMETER Experiment Name: At_100uM_ABA_P Parameter: Treatment Value: 100uM ABA vs. No Treatment
  misc_feature: MA Experiment ID: 20000171 Result: Down-regulated in Transcription
  misc_feature: MA Experiment 20000171 PARAMETER Experiment Name: At_42deg_Heat_P Parameter: Age (day) Value: 14
  misc_feature: MA Experiment 20000171 PARAMETER Experiment Name: At_42deg_Heat_P Parameter: Organism Value: A. thaliana
  misc_feature: MA Experiment 20000171 PARAMETER Experiment Name: At_42deg_Heat_P Parameter: Plant Line Value: WS
  misc_feature: MA Experiment 20000171 PARAMETER Experiment Name: At_42deg_Heat_P Parameter: Temperature (deg C) Value: 42 vs. 22
  misc_feature: MA Experiment 20000171 PARAMETER Experiment Name: At_42deg_Heat_P Parameter: Timepoint (hr) Value: 1
  misc_feature: MA Experiment 20000171 PARAMETER Experiment Name: At_42deg_Heat_P Parameter: Tissue Value: Aerial
  misc_feature: MA Experiment ID: 20000173 Result: Down-regulated in Transcription
  misc_feature: MA Experiment 20000173 PARAMETER Experiment Name: At_42deg_Heat_P Parameter: Age (day) Value: 14
  misc_feature: MA Experiment 20000173 PARAMETER Experiment Name: At_42deg_Heat_P Parameter: Organism Value: A. thaliana
  misc_feature: MA Experiment 20000173 PARAMETER Experiment Name: At_42deg_Heat_P Parameter: Plant Line Value: WS
  misc_feature: MA Experiment 20000173 PARAMETER Experiment Name: At_42deg_Heat_P Parameter: Temperature (deg C) Value: 42 vs. 22
  misc_feature: MA Experiment 20000173 PARAMETER Experiment Name: At_42deg_Heat_P Parameter: Timepoint (hr) Value: 6
  misc_feature: MA Experiment 20000173 PARAMETER Experiment Name: At_42deg_Heat_P Parameter: Tissue Value: Aerial
  misc_feature: MA Experiment ID: 20000179 Result: Up-regulated in Transcription
  misc_feature: MA Experiment 20000179 PARAMETER Experiment Name: At_Germinating_Seeds_P Parameter: Age (hr) Value: 6 vs. 0
  misc_feature: MA Experiment 20000179 PARAMETER Experiment Name: At_Germinating_Seeds_P Parameter: Tissue Value: Germinating Seeds
  misc_feature: MA Experiment ID: 20000182 Result: Down-regulated in Transcription
  misc_feature: MA Experiment 20000182 PARAMETER Experiment Name: At_2mM_SA_P Parameter: Age (day) Value: 14
  misc_feature: MA Experiment 20000182 PARAMETER Experiment Name: At_2mM_SA_P Parameter: Organism Value: A. thaliana
  misc_feature: MA Experiment 20000182 PARAMETER Experiment Name: At_2mM_SA_P Parameter: Plant Line Value: WS
  misc_feature: MA Experiment 20000182 PARAMETER Experiment Name: At_2mM_SA_P Parameter: Timepoint (hr) Value: 6
  misc_feature: MA Experiment 20000182 PARAMETER Experiment Name: At_2mM_SA_P Parameter: Tissue Value: Aerial
  misc_feature: MA Experiment 20000182 PARAMETER Experiment Name: At_2mM_SA_P Parameter: Treatment Value: 2mM SA vs. No Treatment
  misc_feature: MA Experiment ID: 20000185 Result: Down-regulated in Transcription
  misc_feature: MA Experiment 20000185 PARAMETER Experiment Name: At_Roots__P Parameter: Age (day) Value: 7 vs. 21
  misc_feature: MA Experiment 20000185 PARAMETER Experiment Name: At_Roots__P Parameter: Organism Value: A. thaliana
  misc_feature: MA Experiment 20000185 PARAMETER Experiment Name: At_Roots__P Parameter: Tissue Value: Roots vs. Whole Plant
  misc_feature: MA Experiment ID: 20000267 Result: Down-regulated in Transcription
  misc_feature: MA Experiment 20000267 PARAMETER Experiment Name: At_Drought_P Parameter: Age (day) Value: 7
  misc_feature: MA Experiment 20000267 PARAMETER Experiment Name: At_Drought_P Parameter: Organism Value: A. thaliana
  misc_feature: MA Experiment 20000267 PARAMETER Experiment Name: At_Drought_P Parameter: Plant Line Value: WS
  misc_feature: MA Experiment 20000267 PARAMETER Experiment Name: At_Drought_P Parameter: Timepoint (hr) Value: 6
  misc_feature: MA Experiment 20000267 PARAMETER Experiment Name: At_Drought_P Parameter: Tissue Value: Whole Plant
  misc_feature: MA Experiment 20000267 PARAMETER Experiment Name: At_Drought_P Parameter: Treatment Value: Drought vs. No Drought
  misc_feature: MA Experiment ID: 20000436 Result: Down-regulated in Transcription
  misc_feature: MA Experiment 20000436 PARAMETER Experiment Name: At_Drought_P Parameter: Age (day) Value: 7
  misc_feature: MA Experiment 20000436 PARAMETER Experiment Name: At_Drought_P Parameter: Organism Value: A. thaliana
  misc_feature: MA Experiment 20000436 PARAMETER Experiment Name: At_Drought_P Parameter: Plant Line Value: WS
  misc_feature: MA Experiment 20000436 PARAMETER Experiment Name: At_Drought_P Parameter: Timepoint (hr) Value: 12
  misc_feature: MA Experiment 20000436 PARAMETER Experiment Name: At_Drought_P Parameter: Tissue Value: Whole Plant
  misc_feature: MA Experiment 20000436 PARAMETER Experiment Name: At_Drought_P Parameter: Treatment Value: Drought vs. No Drought
  misc_feature: MA Experiment ID: 20000437 Result: Down-regulated in Transcription
  misc_feature: MA Experiment 20000437 PARAMETER Experiment Name: At_Drought_P Parameter: Age (day) Value: 8
  misc_feature: MA Experiment 20000437 PARAMETER Experiment Name: At_Drought_P Parameter: Organism Value: A. thaliana
  misc_feature: MA Experiment 20000437 PARAMETER Experiment Name: At_Drought_P Parameter: Plant Line Value: WS
  misc_feature: MA Experiment 20000437 PARAMETER Experiment Name: At_Drought_P Parameter: Timepoint (hr) Value: 24
  misc_feature: MA Experiment 20000437 PARAMETER Experiment Name: At_Drought_P Parameter: Tissue Value: Whole Plant
  misc_feature: MA Experiment 20000437 PARAMETER Experiment Name: At_Drought_P Parameter: Treatment Value: Drought vs. No Drought
  misc_feature: MA Experiment ID: 20000439 Result: Down-regulated in Transcription
  misc_feature: MA Experiment 20000439 PARAMETER Experiment Name: At_Roots__P Parameter: Age (day) Value: 14 vs. 21
  misc_feature: MA Experiment 20000439 PARAMETER Experiment Name: At_Roots__P Parameter: Organism Value: A. thaliana
  misc_feature: MA Experiment 20000439 PARAMETER Experiment Name: At_Roots__P Parameter: Tissue Value: Roots vs. Whole Plant
  misc_feature: MA Experiment ID: 20000573 Result: Down-regulated in Transcription
  misc_feature: MA Experiment 20000573 PARAMETER Experiment Name: At_100uM_ABA_Mutants__P Parameter: Organism Value: A. thaliana
  misc_feature: MA Experiment 20000573 PARAMETER Experiment Name: At_100uM_ABA_Mutants__P Parameter: Plant Line Value: CS22 vs. Ler wt
  misc_feature: MA Experiment 20000573 PARAMETER Experiment Name: At_100uM_ABA_Mutants__P Parameter: Timepoint (hr) Value: N/A
  misc_feature: MA Experiment 20000573 PARAMETER Experiment Name: At_100uM_ABA_Mutants__P Parameter: Tissue Value: Whole Plant
  misc_feature: MA Experiment 20000573 PARAMETER Experiment Name: At_100uM_ABA_Mutants__P Parameter: Treatment Value: None
  misc_feature: MA Experiment ID: 20000709 Result: Up-regulated in Transcription
  misc_feature: MA Experiment 20000709 PARAMETER Experiment Name: At_15mM_NH4NO3_L-to-H_P Parameter: Age (hr) Value: 14
  misc_feature: MA Experiment 20000709 PARAMETER Experiment Name: At_15mM_NH4NO3_L-to-H_P Parameter: Organism Value: A. thaliana
  misc_feature: MA Experiment 20000709 PARAMETER Experiment Name: At_15mM_NH4NO3_L-to-H_P Parameter: Plant Line Value: WS
  misc_feature: MA Experiment 20000709 PARAMETER Experiment Name: At_15mM_NH4NO3_L-to-H_P Parameter: Timepoint (hr) Value: 4
  misc_feature: MA Experiment 20000709 PARAMETER Experiment Name: At_15mM_NH4NO3_L-to-H_P Parameter: Tissue Value: Aerial
  misc_feature: MA Experiment 20000709 PARAMETER Experiment Name: At_15mM_NH4NO3_L-to-H_P Parameter: Treatment Value: 15mM NH4NO3 vs. 30mM Mannitol
  misc_feature: MA Experiment ID: 20001458 Result: Up-regulated in Transcription
  misc_feature: MA Experiment 20001458 PARAMETER Experiment Name: At_50mM_NH4NO3_L-to-H_P Parameter: Age (day) Value: Undefined
  misc_feature: MA Experiment 20001458 PARAMETER Experiment Name: At_50mM_NH4NO3_L-to-H_P Parameter: Organism Value: Undefined
  misc_feature: MA Experiment 20001458 PARAMETER Experiment Name: At_50mM_NH4NO3_L-to-H_P Parameter: Plant Line Value: Undefined
  misc_feature: MA Experiment 20001458 PARAMETER Experiment Name: At_50mM_NH4NO3_L-to-H_P Parameter: Timepoint (hr) Value: 2
  misc_feature: MA Experiment 20001458 PARAMETER Experiment Name: At_50mM_NH4NO3_L-to-H_P Parameter: Tissue Value: Siliques
  misc_feature: MA Experiment 20001458 PARAMETER Experiment Name: At_50mM_NH4NO3_L-to-H_P Parameter: Treatment Value: 50mM NH4NO3 vs. 100mM Manitol
  misc_feature: MA Experiment ID: 20001554 Result: Down-regulated in Transcription
  misc_feature: MA Experiment 20001554 PARAMETER Experiment Name: At_Drought_Soil_Dry_P Parameter: Age (day) Value: 21
  misc_feature: MA Experiment 20001554 PARAMETER Experiment Name: At_Drought_Soil_Dry_P Parameter: Organism Value: A. thaliana
  misc_feature: MA Experiment 20001554 PARAMETER Experiment Name: At_Drought_Soil_Dry_P Parameter: Plant Line Value: WS
  misc_feature: MA Experiment 20001554 PARAMETER Experiment Name: At_Drought_Soil_Dry_P Parameter: Post Timepoint (hr) Value: None
  misc_feature: MA Experiment 20001554 PARAMETER Experiment Name: At_Drought_Soil_Dry_P Parameter: Post-Treatment Value: None
  misc_feature: MA Experiment 20001554 PARAMETER Experiment Name: At_Drought_Soil_Dry_P Parameter: Timepoint (day) Value: 7
  misc_feature: MA Experiment 20001554 PARAMETER Experiment Name: At_Drought_Soil_Dry_P Parameter: Treatment Value: Drought vs. No Drought
  misc_feature: MA Experiment ID: 20001555 Result: Down-regulated in Transcription
  misc_feature: MA Experiment 20001555 PARAMETER Experiment Name: At_Drought_Soil_Dry_P Parameter: Age (day) Value: 24
  misc_feature: MA Experiment 20001555 PARAMETER Experiment Name: At_Drought_Soil_Dry_P Parameter: Organism Value: A. thaliana
  misc_feature: MA Experiment 20001555 PARAMETER Experiment Name: At_Drought_Soil_Dry_P Parameter: Plant Line Value: WS
  misc_feature: MA Experiment 20001555 PARAMETER Experiment Name: At_Drought_Soil_Dry_P Parameter: Post Timepoint (hr) Value: None
  misc_feature: MA Experiment 20001555 PARAMETER Experiment Name: At_Drought_Soil_Dry_P Parameter: Post-Treatment Value: None
  misc_feature: MA Experiment 20001555 PARAMETER Experiment Name: At_Drought_Soil_Dry_P Parameter: Timepoint (day) Value: 10
  misc_feature: MA Experiment 20001555 PARAMETER Experiment Name: At_Drought_Soil_Dry_P Parameter: Treatment Value: Drought vs. No Drought
  misc_feature: MA Experiment ID: 20001556 Result: Down-regulated in Transcription
  misc_feature: MA Experiment 20001556 PARAMETER Experiment Name: At_Drought_Soil_Dry_P Parameter: Age (day) Value: 26
  misc_feature: MA Experiment 20001556 PARAMETER Experiment Name: At_Drought_Soil_Dry_P Parameter: Organism Value: A. thaliana
  misc_feature: MA Experiment 20001556 PARAMETER Experiment Name: At_Drought_Soil_Dry_P Parameter: Plant Line Value: WS
  misc_feature: MA Experiment 20001556 PARAMETER Experiment Name: At_Drought_Soil_Dry_P Parameter: Post Timepoint (hr) Value: None
  misc_feature: MA Experiment 20001556 PARAMETER Experiment Name: At_Drought_Soil_Dry_P Parameter: Post-Treatment Value: None
  misc_feature: MA Experiment 20001556 PARAMETER Experiment Name: At_Drought_Soil_Dry_P Parameter: Timepoint (day) Value: 12
  misc_feature: MA Experiment 20001556 PARAMETER Experiment Name: At_Drought_Soil_Dry_P Parameter: Treatment Value: Drought vs. No Drought
  misc_feature: MA Experiment ID: 20001757 Result: Up-regulated in Transcription
  misc_feature: MA Experiment 20001757 PARAMETER Experiment Name: At_50mM_NH4NO3_L-to-H_P Parameter: Timepoint (hr) Value: 6
  misc_feature: MA Experiment 20001757 PARAMETER Experiment Name: At_50mM_NH4NO3_L-to-H_P Parameter: Tissue Value: Leaf
  misc_feature: MA Experiment 20001757 PARAMETER Experiment Name: At_50mM_NH4NO3_L-to-H_P Parameter: Treatment Value: 50mM NH4NO3 vs 100mM Mannitol
  misc_feature: MA Experiment ID: 20001904 Result: Down-regulated in Transcription
  misc_feature: MA Experiment 20001904 PARAMETER Experiment Name: At_Drought_Reproduction_P Parameter: Age (day) Value: 37
  misc_feature: MA Experiment 20001904 PARAMETER Experiment Name: At_Drought_Reproduction_P Parameter: Organism Value: A. thaliana
  misc_feature: MA Experiment 20001904 PARAMETER Experiment Name: At_Drought_Reproduction_P Parameter: Plant Line Value: WS
  misc_feature: MA Experiment 20001904 PARAMETER Experiment Name: At_Drought_Reproduction_P Parameter: Timepoint (day) Value: 7
  misc_feature: MA Experiment 20001904 PARAMETER Experiment Name: At_Drought_Reproduction_P Parameter: Tissue Value: Rosettes
  misc_feature: MA Experiment 20001904 PARAMETER Experiment Name: At_Drought_Reproduction_P Parameter: Treatment Value: Drought vs. No Drought
  misc_feature: MA Experiment ID: 20001906 Result: Down-regulated in Transcription
  misc_feature: MA Experiment 20001906 PARAMETER Experiment Name: At_Drought_Reproduction_P Parameter: Age (day) Value: 35
  misc_feature: MA Experiment 20001906 PARAMETER Experiment Name: At_Drought_Reproduction_P Parameter: Organism Value: A. thaliana
  misc_feature: MA Experiment 20001906 PARAMETER Experiment Name: At_Drought_Reproduction_P Parameter: Plant Line Value: WS
  misc_feature: MA Experiment 20001906 PARAMETER Experiment Name: At_Drought_Reproduction_P Parameter: Timepoint (day) Value: 5
  misc_feature: MA Experiment 20001906 PARAMETER Experiment Name: At_Drought_Reproduction_P Parameter: Tissue Value: Siliques
  misc_feature: MA Experiment 20001906 PARAMETER Experiment Name: At_Drought_Reproduction_P Parameter: Treatment Value: Drought vs. No Drought
aatggattacttttcttccacacatatataacttaactctctctttttctcttttgctttaaccccctcaaagaaaagataagagccttttaaagttttttttttaccttctcttcatggacttgtctgtacttgataggcttaagtggctgcaacagcaacaaatggtttcacctgagtttcttcagatacttggctcagatgggagagaagagctcaaaagagttgagagttacttgggaaacaacaatgatgagctgcagagtttcagacattttcccgaattcggaccggattatgatactactgatggctgcatttctaggacaagtagcttccatatggagccagtgaagaataatggacacagcagagccattaccttgcagaacaagagaaaaccagagggtaagacagaaaagagagagaagaagaagatcaaagcagaggatgaaacagagccaagcatgaaagggaaatcaaacatgagtaacacagagacatcttcagaaattcagaaaccagattacattcatgttagggctagacgaggtgaagccaccgacagacatagcttagcagagagggcaagaagagaaaagataagcaagaagatgaaatgtctacaagatattgttcctggatgcaacaaagttactggaaaagctggtatgcttgatgagatcatcaactatgtccaatctctgcaacaacaagtcgagttcttgtcgatgaaactctctgtcataaatccagaacttgagtgtcatatcgatgatttatccgcaaaacagtttcaggcttacttcacaggtcctccagaaggtgactcgaagcagtcaatcatggcggattttcggtcttttccattacatcagcaaggatctttagattactcagtcataaactcagaccacaccacatctctcggcgctaaagatcatacatcatcaagctgggaaactcactcacagtgtctttacaacagcttgagaaccgattctgtttccaatttcttcagcctcaagtaaaaaaattagggatagcctcattaaaaaaatcgcggttttttgttgttgtcttatccatttatctatcttatctgaaatttgaaccaaaagagacagaggaaaccaatccaaagatctttctcaatctattatcttcatacaaatatagtgatttacatatattccaggggatatgtatatgtgtagaagaaagagaaaaaactcttgtggtcatagcaattcctttttttgt

SEQ ID NO: 103643 - protein, 304 aa, Arabidopsis thaliana
  peptide (1)..(304): Ceres Seq. ID no. 13613247
  misc_feature (148)..(198): Pfam Name: Helix-loop-helix DNA-binding domain Pfam Description: Helix-loop-helix DNA-binding domain
  misc_feature (1)..(304): Homolog of NCBI NO: 15234436 NR Description: expressed protein [Arabidopsis thaliana] unknown protein [Arabidopsis thaliana]
  misc_feature (1)..(304): Homolog of NCBI NO: 15451016 NR Description: Unknown protein [Arabidopsis thaliana]
  misc_feature (1)..(304): Homolog of NCBI NO: 20127056 NR Description: putative bHLH transcription factor [Arabidopsis
  misc_feature (1)..(304): Homolog of NCBI NO: 30690689 NR Description: expressed protein [Arabidopsis thaliana]
  misc_feature (9)..(304): Homolog of NCBI NO: 25407737 NR Description: hypothetical protein AT4g36540 [imported] - thaliana >gi|4006909|emb|CAB16839.1| putative protein thaliana] >gi|7270602|emb|CAB80320.1| putative protein
  misc_feature (17)..(304): Homolog of NCBI NO: 34391435 NR Description: putative bHLH transcription factor [Arabidopsis
  misc_feature (17)..(304): Homolog of NCBI NO: 21537215 NR Description: unknown [Arabidopsis thaliana]
  misc_feature (57)..(291): Homolog of NCBI NO: 30680338 NR Description: bHLH064 putative bHLH transcription factor
  misc_feature (57)..(291): Homolog of NCBI NO: 20127068 NR Description: putative bHLH transcription factor [Arabidopsis
  misc_feature (57)..(291): Homolog of NCBI NO: 18398703 NR Description: bHLH064 putative bHLH transcription factor thaliana] >gi|15724318|gb|AAL06552.1|AF412099_1 [Arabidopsis thaliana] >gi|18700242|gb|AAL77731.1|
MDLSVLDRLKWLQQQQMVSPEFLQILGSDGREELKRVESYLGNNNDELQSFRHFPEFGPDYDTTDGCISRTSSFHMEPVKNNGHSRAITLQNKRKPEGKTEKREKKKIKAEDETEPSMKGKSNMSNTETSSEIQKPDYIHVRARRGEATDRHSLAERARREKISKKMKCLQDIVPGCNKVTGKAGMLDEIINYVQSLQQQVEFLSMKLSVINPELECHIDDLSAKQFQAYFTGPPEGDSKQSIMADFRSFPLHQQGSLDYSVINSDHTTSLGAKDHTSSSWETHSQCLYNSLRTDSVSNFFSLK

SEQ ID NO: 103644 - protein, 288 aa, Arabidopsis thaliana
  peptide (1)..(288): Ceres Seq. ID no. 13613248
  misc_feature (132)..(182): Pfam Name: Helix-loop-helix DNA-binding domain Pfam Description: Helix-loop-helix DNA-binding domain
  misc_feature (1)..(288): Homolog of NCBI NO: 15234436 NR Description: expressed protein [Arabidopsis thaliana] unknown protein [Arabidopsis thaliana]
  misc_feature (1)..(288): Homolog of NCBI NO: 15451016 NR Description: Unknown protein [Arabidopsis thaliana]
  misc_feature (1)..(288): Homolog of NCBI NO: 20127056 NR Description: putative bHLH transcription factor [Arabidopsis
  misc_feature (1)..(288): Homolog of NCBI NO: 30690689 NR Description: expressed protein [Arabidopsis thaliana]
  misc_feature (1)..(288): Homolog of NCBI NO: 25407737 NR Description: hypothetical protein AT4g36540 [imported] - thaliana >gi|4006909|emb|CAB16839.1| putative protein thaliana] >gi|7270602|emb|CAB80320.1| putative protein
  misc_feature (1)..(288): Homolog of NCBI NO: 34391435 NR Description: putative bHLH transcription factor [Arabidopsis
  misc_feature (1)..(288): Homolog of NCBI NO: 21537215 NR Description: unknown [Arabidopsis thaliana]
  misc_feature (41)..(275): Homolog of NCBI NO: 30680338 NR Description: bHLH064 putative bHLH transcription factor
  misc_feature (41)..(275): Homolog of NCBI NO: 20127068 NR Description: putative bHLH transcription factor [Arabidopsis
  misc_feature (41)..(275): Homolog of NCBI NO: 18398703 NR Description: bHLH064 putative bHLH transcription factor thaliana] >gi|15724318|gb|AAL06552.1|AF412099_1 [Arabidopsis thaliana] >gi|18700242|gb|AAL77731.1|
MVSPEFLQILGSDGREELKRVESYLGNNNDELQSFRHFPEFGPDYDTTDGCISRTSSFHMEPVKNNGHSRAITLQNKRKPEGKTEKREKKKIKAEDETEPSMKGKSNMSNTETSSEIQKPDYIHVRARRGEATDRHSLAERARREKISKKMKCLQDIVPGCNKVTGKAGMLDEIINYVQSLQQQVEFLSMKLSVINPELECHIDDLSAKQFQAYFTGPPEGDSKQSIMADFRSFPLHQQGSLDYSVINSDHTTSLGAKDHTSSSWETHSQCLYNSLRTDSVSNFFSLK

SEQ ID NO: 103645 - protein, 229 aa, Arabidopsis thaliana
  peptide (1)..(229): Ceres Seq. ID no. 13613249
  misc_feature (73)..(123): Pfam Name: Helix-loop-helix DNA-binding domain Pfam Description: Helix-loop-helix DNA-binding domain
  misc_feature (1)..(229): Homolog of NCBI NO: 15234436 NR Description: expressed protein [Arabidopsis thaliana] unknown protein [Arabidopsis thaliana]
  misc_feature (1)..(229): Homolog of NCBI NO: 15451016 NR Description: Unknown protein [Arabidopsis thaliana]
  misc_feature (1)..(229): Homolog of NCBI NO: 20127056 NR Description: putative bHLH transcription factor [Arabidopsis
  misc_feature (1)..(229): Homolog of NCBI NO: 30690689 NR Description: expressed protein [Arabidopsis thaliana]
  misc_feature (1)..(229): Homolog of NCBI NO: 25407737 NR Description: hypothetical protein AT4g36540 [imported] - thaliana >gi|4006909|emb|CAB16839.1| putative protein thaliana] >gi|7270602|emb|CAB80320.1| putative protein
  misc_feature (1)..(229): Homolog of NCBI NO: 34391435 NR Description: putative bHLH transcription factor [Arabidopsis
  misc_feature (1)..(229): Homolog of NCBI NO: 21537215 NR Description: unknown [Arabidopsis thaliana]
  misc_feature (1)..(216): Homolog of NCBI NO: 30680338 NR Description: bHLH064 putative bHLH transcription factor
  misc_feature (1)..(216): Homolog of NCBI NO: 20127068 NR Description: putative bHLH transcription factor [Arabidopsis
  misc_feature (1)..(216): Homolog of NCBI NO: 18398703 NR Description: bHLH064 putative bHLH transcription factor thaliana] >gi|15724318|gb|AAL06552.1|AF412099_1 [Arabidopsis thaliana] >gi|18700242|gb|AAL77731.1|
MEPVKNNGHSRAITLQNKRKPEGKTEKREKKKIKAEDETEPSMKGKSNMSNTETSSEIQKPDYIHVRARRGEATDRHSLAERARREKISKKMKCLQDIVPGCNKVTGKAGMLDEIINYVQSLQQQVEFLSMKLSVINPELECHIDDLSAKQFQAYFTGPPEGDSKQSIMADFRSFPLHQQGSLDYSVINSDHTTSLGAKDHTSSSWETHSQCLYNSLRTDSVSNFFSLK

SEQ ID NO: 103646 - DNA, 1136 bp, Arabidopsis thaliana
  misc_feature (1)..(1136): Ceres Seq. ID no. 13613258
  misc_feature: MA Experiment ID: 108434 Result: Down-regulated in Transcription
  misc_feature: MA Experiment 108434 PARAMETER Experiment Name: At_Root_Tips_cDNA_P Parameter: Tissue Value: Root Tips
  misc_feature: MA Experiment ID: 20000235 Result: Down-regulated in Transcription
  misc_feature: MA Experiment 20000235 PARAMETER Experiment Name: At_Siliques_P Parameter: Age (day) Value: 21
  misc_feature: MA Experiment 20000235 PARAMETER Experiment Name: At_Siliques_P Parameter: Organism Value: A. thaliana
  misc_feature: MA Experiment 20000235 PARAMETER Experiment Name: At_Siliques_P Parameter: Plant Line Value: WS
  misc_feature: MA Experiment 20000235 PARAMETER Experiment Name: At_Siliques_P Parameter: Tissue Value: 5-10mm Siliques vs. Whole Plant
  misc_feature: MA Experiment ID: 20000495 Result: Down-regulated in Transcription
  misc_feature: MA Experiment 20000495 PARAMETER Experiment Name: At_Guard_Cells_P Parameter: Harvest Date Value: 8/2/2002
  misc_feature: MA Experiment 20000495 PARAMETER Experiment Name: At_Guard_Cells_P Parameter: Organism Value: A. thaliana
  misc_feature: MA Experiment 20000495 PARAMETER Experiment Name: At_Guard_Cells_P Parameter: Tissue Value: Guard Cells vs. Leaves
  misc_feature: MA Experiment ID: 20000496 Result: Down-regulated in Transcription
  misc_feature: MA Experiment 20000496 PARAMETER Experiment Name: At_Guard_Cells_P Parameter: Harvest Date Value: 7/19/2002
  misc_feature: MA Experiment 20000496 PARAMETER Experiment Name: At_Guard_Cells_P Parameter: Organism Value: Canola
  misc_feature: MA Experiment 20000496 PARAMETER Experiment Name: At_Guard_Cells_P Parameter: Tissue Value: Guard Cells vs. Leaves
gttttcatttatttaaattttaaattaatccaactttatcgttgacggaaaatttgggagagaatattctcgatggggaaaggaggaggttgtgttccgagcaagaagaagaagccggccaccaccggcgatggtcccggaatcgatgatgataacgacgctactaatgctccgatccaaattgacgatgatcaaaccaccattgacggcgatcgaacaacggcgacgaatactggaggaacaacaacaccagcgattactactacggctgctaagatctcgtcaccgctcaagatcttcgtcgtgttctattcgatgtacggacatgtggagagcttagcgaagaggatgaaaaagggagtggatagcgtcgaaggagtggaggcgacgttgtacagagttccggagacgctttcgcaggaggttgttgagcagatgaaggcgccggttaaggatttggagattccggagattacggcggcggaattgacggcggctgatggatttctgtttggatttccgactaggtatggttgtatggctgcgcagatgaaggcgttttttgattcgacgggatcattgtggaaggagcagagtcttgctggtaagcctgctggattctttgtgagcactggcactcaaggaggtggccaagagaccactgcatggacagcaatcacacagcttgtgcaccatgggatgctatttgtaccaataggctacacatttggagctggaatgttcaagatggactcgatacgtggaggctctccttatggagcaggtgtgttcgctggtgatgggtcaagagaagcaacagaaacagaattggctcttgctgaacatcaaggaaactacatggctgcaatagtcaaaagacttgctcaaccttaaaacaaaaacaaaaattgcttcctctatttgtctcttttcattcaattcctcctcctgctaaataatcataaaaaaaaaaatcttcctttcttttctcaattccatcgaaatttctttcttttctttatgagtgttttcagtttcgccattaatggttagtgtgtacatgtttctttatattatttgtctcttatttattccttgttgtaaaataaaaacaaaatttcattacgtgttctttc

SEQ ID NO: 103647 - protein, 273 aa, Arabidopsis thaliana
  peptide (1)..(273): Ceres Seq. ID no. 13613259
  misc_feature (1)..(273): Homolog of NCBI NO: 15234512 NR Description: quinone reductase family [Arabidopsis thaliana]
  misc_feature (1)..(273): Homolog of NCBI NO: 21593010 NR Description: minor allergen [Arabidopsis thaliana]
  misc_feature (122)..(273): Homolog of NCBI NO: 15529268 NR Description: C7A10_610/C7A10_610 [Arabidopsis thaliana]
  misc_feature (74)..(273): Homolog of NCBI NO: 30687535 NR Description: quinone reductase family [Arabidopsis thaliana]
  misc_feature (74)..(270): Homolog of NCBI NO: 15239652 NR Description: quinone reductase, putative [Arabidopsis thaliana]
  misc_feature (73)..(270): Homolog of NCBI NO: 34910128 NR Description: putative 1,4-benzoquinone reductase [Oryza sativa
  misc_feature (74)..(270): Homolog of NCBI NO: 38636776 NR Description: putative quinone-oxidoreductase QR2 [Oryza sativa
  misc_feature (74)..(270): Homolog of NCBI NO: 5031275 NR Description: unknown [Prunus armeniaca]
  misc_feature (74)..(270): Homolog of NCBI NO: 21068664 NR Description: putative quinone oxidoreductase [Cicer arietinum]
  misc_feature (74)..(272): Homolog of NCBI NO: 12484052 NR Description: quinone-oxidoreductase QR2 [Triphysaria
MGKGGGCVPSKKKKPATTGDGPGIDDDNDATNAPIQIDDDQTTIDGDRTTATNTGGTTTPAITTTAAKISSPLKIFVVFYSMYGHVESLAKRMKKGVDSVEGVEATLYRVPETLSQEVVEQMKAPVKDLEIPEITAAELTAADGFLFGFPTRYGCMAAQMKAFFDSTGSLWKEQSLAGKPAGFFVSTGTQGGGQETTAWTAITQLVHHGMLFVPIGYTFGAGMFKMDSIRGGSPYGAGVFAGDGSREATETELALAEHQGNYMAAIVKRLAQP

SEQ ID NO: 103648 - protein, 192 aa, Arabidopsis thaliana
  peptide (1)..(192): Ceres Seq. ID no. 13613260
  misc_feature (1)..(192): Homolog of NCBI NO: 15234512 NR Description: quinone reductase family [Arabidopsis thaliana]
  misc_feature (1)..(192): Homolog of NCBI NO: 21593010 NR Description: minor allergen [Arabidopsis thaliana]
  misc_feature (41)..(192): Homolog of NCBI NO: 15529268 NR Description: C7A10_610/C7A10_610 [Arabidopsis thaliana]
  misc_feature (1)..(192): Homolog of NCBI NO: 30687535 NR Description: quinone reductase family [Arabidopsis thaliana]
  misc_feature (1)..(189): Homolog of NCBI NO: 15239652 NR Description: quinone reductase, putative [Arabidopsis thaliana]
  misc_feature (1)..(189): Homolog of NCBI NO: 34910128 NR Description: putative 1,4-benzoquinone reductase [Oryza sativa
  misc_feature (1)..(189): Homolog of NCBI NO: 38636776 NR Description: putative quinone-oxidoreductase QR2 [Oryza sativa
  misc_feature (1)..(189): Homolog of NCBI NO: 5031275 NR Description: unknown [Prunus armeniaca]
  misc_feature (1)..(189): Homolog of NCBI NO: 21068664 NR Description: putative quinone oxidoreductase [Cicer arietinum]
  misc_feature (1)..(191): Homolog of NCBI NO: 12484052 NR Description: quinone-oxidoreductase QR2 [Triphysaria
MYGHVESLAKRMKKGVDSVEGVEATLYRVPETLSQEVVEQMKAPVKDLEIPEITAAELTAADGFLFGFPTRYGCMAAQMKAFFDSTGSLWKEQSLAGKPAGFFVSTGTQGGGQETTAWTAITQLVHHGMLFVPIGYTFGAGMFKMDSIRGGSPYGAGVFAGDGSREATETELALAEHQGNYMAAIVKRLAQP

SEQ ID NO: 103649 - protein, 181 aa, Arabidopsis thaliana
  peptide (1)..(181): Ceres Seq. ID no. 13613261
  misc_feature (1)..(181): Homolog of NCBI NO: 15234512 NR Description: quinone reductase family [Arabidopsis thaliana]
  misc_feature (1)..(181): Homolog of NCBI NO: 21593010 NR Description: minor allergen [Arabidopsis thaliana]
  misc_feature (30)..(181): Homolog of NCBI NO: 15529268 NR Description: C7A10_610/C7A10_610 [Arabidopsis thaliana]
  misc_feature (1)..(181): Homolog of NCBI NO: 30687535 NR Description: quinone reductase family [Arabidopsis thaliana]
  misc_feature (1)..(178): Homolog of NCBI NO: 15239652 NR Description: quinone reductase, putative [Arabidopsis thaliana]
  misc_feature (1)..(178): Homolog of NCBI NO: 34910128 NR Description: putative 1,4-benzoquinone reductase [Oryza sativa
  misc_feature (1)..(178): Homolog of NCBI NO: 38636776 NR Description: putative quinone-oxidoreductase QR2 [Oryza sativa
  misc_feature (1)..(178): Homolog of NCBI NO: 5031275 NR Description: unknown [Prunus armeniaca]
  misc_feature (1)..(178): Homolog of NCBI NO: 21068664 NR Description: putative quinone oxidoreductase [Cicer arietinum]
  misc_feature (1)..(180): Homolog of NCBI NO: 12484052 NR Description: quinone-oxidoreductase QR2 [Triphysaria
MKKGVDSVEGVEATLYRVPETLSQEVVEQMKAPVKDLEIPEITAAELTAADGFLFGFPTRYGCMAAQMKAFFDSTGSLWKEQSLAGKPAGFFVSTGTQGGGQETTAWTAITQLVHHGMLFVPIGYTFGAGMFKMDSIRGGSPYGAGVFAGDGSREATETELALAEHQGNYMAAIVKRLAQP

SEQ ID NO: 103650 - DNA, 1260 bp, Arabidopsis thaliana
  misc_feature (1)..(1260): Ceres Seq. ID no. 13613274
  misc_feature: MA Experiment ID: 108434 Result: Down-regulated in Transcription
  misc_feature: MA Experiment 108434 PARAMETER Experiment Name: At_Root_Tips_cDNA_P Parameter: Tissue Value: Root Tips
  misc_feature: MA Experiment ID: 108462 Result: Down-regulated in Transcription
  misc_feature: MA Experiment 108462 PARAMETER Experiment Name: At_Germinating_Seeds_cDNA_P Parameter: Age (day) Value: 2 vs. 0
  misc_feature: MA Experiment 108462 PARAMETER Experiment Name: At_Germinating_Seeds_cDNA_P Parameter: Tissue Value: Germinating Seeds
  misc_feature: MA Experiment ID: 108463 Result: Down-regulated in Transcription
  misc_feature: MA Experiment 108463 PARAMETER Experiment Name: At_Germinating_Seeds_cDNA_P Parameter: Age (day) Value: 3 vs. 0
  misc_feature: MA Experiment 108463 PARAMETER Experiment Name: At_Germinating_Seeds_cDNA_P Parameter: Tissue Value: Germinating Seeds
  misc_feature: MA Experiment ID: 108464 Result: Down-regulated in Transcription
  misc_feature: MA Experiment 108464 PARAMETER Experiment Name: At_Germinating_Seeds_cDNA_P Parameter: Age (day) Value: 4 vs. 0
  misc_feature: MA Experiment 108464 PARAMETER Experiment Name: At_Germinating_Seeds_cDNA_P Parameter: Tissue Value: Germinating Seeds
  misc_feature: MA Experiment ID: 108573 Result: Up-regulated in Transcription
  misc_feature: MA Experiment 108573 PARAMETER Experiment Name: At_Drought_cDNA_P Parameter: Timepoint (hr) Value: 6
  misc_feature: MA Experiment 108573 PARAMETER Experiment Name: At_Drought_cDNA_P Parameter: Tissue Value: Aerial
  misc_feature: MA Experiment 108573 PARAMETER Experiment Name: At_Drought_cDNA_P Parameter: Treatment Value: Drought vs. No Drought
  misc_feature: MA Experiment ID: 20000144 Result: Down-regulated in Transcription
  misc_feature: MA Experiment 20000144 PARAMETER Experiment Name: At_42deg_Heat_cDNA_P Parameter: Temperature (deg C) Value: 42 vs. 22
  misc_feature: MA Experiment 20000144 PARAMETER Experiment Name: At_42deg_Heat_cDNA_P Parameter: Timepoint (hr) Value: 1
  misc_feature: MA Experiment 20000144 PARAMETER Experiment Name: At_42deg_Heat_cDNA_P Parameter: Tissue Value: Aerial
  misc_feature: MA Experiment ID: 20000180 Result: Down-regulated in Transcription
  misc_feature: MA Experiment 20000180 PARAMETER Experiment Name: At_Germinating_Seeds_P Parameter: Age (hr) Value: 24 vs. 0
  misc_feature: MA Experiment 20000180 PARAMETER Experiment Name: At_Germinating_Seeds_P Parameter: Tissue Value: Germinating Seeds
  misc_feature: MA Experiment ID: 20000437 Result: Up-regulated in Transcription
  misc_feature: MA Experiment 20000437 PARAMETER Experiment Name: At_Drought_P Parameter: Age (day) Value: 8
  misc_feature: MA Experiment 20000437 PARAMETER Experiment Name: At_Drought_P Parameter: Organism Value: A. thaliana
  misc_feature: MA Experiment 20000437 PARAMETER Experiment Name: At_Drought_P Parameter: Plant Line Value: WS
  misc_feature: MA Experiment 20000437 PARAMETER Experiment Name: At_Drought_P Parameter: Timepoint (hr) Value: 24
  misc_feature: MA Experiment 20000437 PARAMETER Experiment Name: At_Drought_P Parameter: Tissue Value: Whole Plant
  misc_feature: MA Experiment 20000437 PARAMETER Experiment Name: At_Drought_P Parameter: Treatment Value: Drought vs. No Drought
  misc_feature: MA Experiment ID: 20001905 Result: Up-regulated in Transcription
  misc_feature: MA Experiment 20001905 PARAMETER Experiment Name: At_Drought_Reproduction_P Parameter: Age (day) Value: 40
  misc_feature: MA Experiment 20001905 PARAMETER Experiment Name: At_Drought_Reproduction_P Parameter: Organism Value: A. thaliana
  misc_feature: MA Experiment 20001905 PARAMETER Experiment Name: At_Drought_Reproduction_P Parameter: Plant Line Value: WS
  misc_feature: MA Experiment 20001905 PARAMETER Experiment Name: At_Drought_Reproduction_P Parameter: Timepoint (day) Value: 10
  misc_feature: MA Experiment 20001905 PARAMETER Experiment Name: At_Drought_Reproduction_P Parameter: Tissue Value: Rosettes
  misc_feature: MA Experiment 20001905 PARAMETER Experiment Name: At_Drought_Reproduction_P Parameter: Treatment Value: Drought vs. No Drought
ataataaaattcaattccataaatatttttttttttgttctttcctctgactggaaaaagcttcctcagatcgtttcatcgtccaagcggaagaagcgtctccttcaatcaccgtggacacctccgagactgtctccgattgaatgggaattgaagacatgcattcaaaatctgacagtggtgggaacaaggttgattcagaggttcatggtacagtatcgtcgtcgataaatagtttaaacccttggcatcgtgctgctgctgcttgcaatgcaaattctagtgtggaagctggagataaatcttctaagtcaatagcattagcattggaatcaaacggttccaaatcaccatccaatagagataatactgttaacaaggaatcacaagtcacaacgtctccacaatcagctggagattatagtgataaaaaccaagaatctctgcatcatggcatcacacaacctcctcctcaccctcaacttgttggccacacagttggatgggcatcctcaaatccataccaggatccatattatgcaggagtgatgggagcctatggacatcatcccctggggtttgttccatatggtgggatgcctcattcaagaatgccactgccgcctgagatggcacaagaaccagttttcgtgaatgctaaacagtaccaggcgattctgaggcgaaggcaggcacgcgccaaggcagagctagagaagaagctaataaaatccagaaagccttatctacatgaatctcggcatcaacatgctatgaggaggccaaggggtactggaggacggtttgcaaagaaaaccaacaccgaagcttcaaagcgtaaagctgaagaaaagagcaatggtcatgttactcagtccccgtcatcatctaattctgatcaaggtgaagcttggaatggtgactatagaacacctcagggagatgagatgcagagctcagcttataagagaagggaagaaggagagtgttcagggcagcaatggaacagcctttcctcaaaccatccttctcaagctcgtctagccattaaatgacctcacaaggcggcaattcattcttggctttctctttgttggcttattcggtagcagccatgaaagagtattttctctcgtttttttttcttctgattttgtacaaatactttttgtagctttttgtgactttttccctttcagtttggaatacttcagatgttgccacttttctttttcaattctatcttaactaaacatttct

SEQ ID NO: 103651 - protein, 303 aa, Arabidopsis thaliana [sequence omitted]

SEQ ID NO: 103652 - protein, 298 aa, Arabidopsis thaliana; identical to SEQ ID NO: 24145
  peptide (1)..(298): Ceres Seq. ID no. 13613276
  misc_feature (160)..(216): Pfam Name: CCAAT-binding transcription factor (CBF-B/NF-YA) Pfam Description: CCAAT-binding transcription factor
  misc_feature (1)..(298): Homolog of NCBI NO: 18402799 NR Description: CCAAT-binding factor B chain -related thaliana] >gi|15724232|gb|AAL06509.1|AF412056_1 AT3g20910/MFD22_2 thaliana] >gi|20334742|gb|AAM16232.1| AT3g20910/MFD22_2
  misc_feature (1)..(298): Homolog of NCBI NO: 9293997 NR Description: CCAAT-binding transcription factor B subunit
  misc_feature (1)..(298): Homolog of NCBI NO: 1586551 NR Description: CCAAT-binding factor:SUBUNIT=B
  misc_feature (1)..(298): Homolog of NCBI NO: 1173618 NR Description: CCAAT-binding factor B subunit homolog
  misc_feature (1)..(298): Homolog of NCBI NO: 7488444 NR Description: CCAAT-binding factor B chain homolog (clone
  misc_feature (29)..(253): Homolog of NCBI NO: 18416875 NR Description: CCAAT box binding factor/ transcription factor [Arabidopsis thaliana] >gi|11282597|pir||T49898 CCAAT box binding
  misc_feature (29)..(253): Homolog of NCBI NO: 30684143 NR Description: CCAAT box binding factor/ transcription factor [Arabidopsis thaliana] >gi|2398521|emb|CAA74048.1| transcription
  misc_feature (4)..(236): Homolog of NCBI NO: 27552556 NR Description: putative CCAAT-binding transcription factor
  misc_feature (37)..(262): Homolog of NCBI NO: 38640734 NR Description: transcription factor WAPB [Triticum aestivum]
  misc_feature (58)..(233): Homolog of NCBI NO: 34395137 NR Description: putative transcription factor [Oryza sativa

SEQ ID NO: 103653 - protein, 168 aa, Arabidopsis thaliana; identical to SEQ ID NO: 24146
  peptide (1)..(168): Ceres Seq. ID no. 13613277
  misc_feature (30)..(86): Pfam Name: CCAAT-binding transcription factor (CBF-B/NF-YA) Pfam Description: CCAAT-binding transcription factor
  misc_feature (1)..(168): Homolog of NCBI NO: 18402799 NR Description: CCAAT-binding factor B chain -related thaliana] >gi|15724232|gb|AAL06509.1|AF412056_1 AT3g20910/MFD22_2 thaliana] >gi|20334742|gb|AAM16232.1| AT3g20910/MFD22_2
  misc_feature (1)..(168): Homolog of NCBI NO: 9293997 NR Description: CCAAT-binding transcription factor B subunit
  misc_feature (1)..(168): Homolog of NCBI NO: 1586551 NR Description: CCAAT-binding factor:SUBUNIT=B
  misc_feature (1)..(168): Homolog of NCBI NO: 1173618 NR Description: CCAAT-binding factor B subunit homolog
  misc_feature (1)..(168): Homolog of NCBI NO: 7488444 NR Description: CCAAT-binding factor B chain homolog (clone
  misc_feature (1)..(123): Homolog of NCBI NO: 18416875 NR Description: CCAAT box binding factor/ transcription factor [Arabidopsis thaliana] >gi|11282597|pir||T49898 CCAAT box binding
  misc_feature (1)..(123): Homolog of NCBI NO: 30684143 NR Description: CCAAT box binding factor/ transcription factor [Arabidopsis thaliana] >gi|2398521|emb|CAA74048.1| transcription
  misc_feature (1)..(106): Homolog of NCBI NO: 27552556 NR Description: putative CCAAT-binding transcription factor
  misc_feature (1)..(132): Homolog of NCBI NO: 38640734 NR Description: transcription factor WAPB [Triticum aestivum]
  misc_feature (1)..(103): Homolog of NCBI NO: 34395137 NR Description: putative transcription factor [Oryza sativa

SEQ ID NO: 103654 - DNA, 2143 bp, Arabidopsis thaliana
  misc_feature (1)..(2143): Ceres Seq. ID no. 13613301
  misc_feature: MA Experiment ID: 108435 Result: Down-regulated in Transcription
  misc_feature: MA Experiment 108435 PARAMETER Experiment Name: At_stm_Mutants_cDNA_P Parameter: Plant Line Value: wt Landsburg vs stm
  misc_feature: MA Experiment 108435 PARAMETER Experiment Name: At_stm_Mutants_cDNA_P Parameter: Tissue Value: Shoot Apical Meristem Region
  misc_feature: MA Experiment ID: 108463 Result: Up-regulated in Transcription
  misc_feature: MA Experiment 108463 PARAMETER Experiment Name: At_Germinating_Seeds_cDNA_P Parameter: Age (day) Value: 3 vs. 0
  misc_feature: MA Experiment 108463 PARAMETER Experiment Name: At_Germinating_Seeds_cDNA_P Parameter: Tissue Value: Germinating Seeds
  misc_feature: MA Experiment ID: 108464 Result: Up-regulated in Transcription
  misc_feature: MA Experiment 108464 PARAMETER Experiment Name: At_Germinating_Seeds_cDNA_P Parameter: Age (day) Value: 4 vs. 0
  misc_feature: MA Experiment 108464 PARAMETER Experiment Name: At_Germinating_Seeds_cDNA_P Parameter: Tissue Value: Germinating Seeds
  misc_feature: MA Experiment ID: 108469 Result: Down-regulated in Transcription
  misc_feature: MA Experiment ID: 108569 Result: Up-regulated in Transcription
  misc_feature: MA Experiment 108569 PARAMETER Experiment Name: At_0.001%_MeJA__cDNA_P Parameter: Timepoint (hr) Value: 6
  misc_feature: MA Experiment 108569 PARAMETER Experiment Name: At_0.001%_MeJA__cDNA_P Parameter: Tissue Value: Aerial
  misc_feature: MA Experiment 108569 PARAMETER Experiment Name: At_0.001%_MeJA__cDNA_P Parameter: Treatment Value: 0.001% MeJA vs. No Treatment
  misc_feature: MA Experiment ID: 108573 Result: Up-regulated in Transcription
  misc_feature: MA Experiment 108573 PARAMETER Experiment Name: At_Drought_cDNA_P Parameter: Timepoint (hr) Value: 6
  misc_feature: MA Experiment 108573 PARAMETER Experiment Name: At_Drought_cDNA_P Parameter: Tissue Value: Aerial
  misc_feature: MA Experiment 108573 PARAMETER Experiment Name: At_Drought_cDNA_P Parameter: Treatment Value: Drought vs. No Drought
  misc_feature: MA Experiment ID: 108574 Result: Up-regulated in Transcription
  misc_feature: MA Experiment 108574 PARAMETER Experiment Name: At_Wounding__cDNA_P Parameter: Timepoint (hr) Value: 1
  misc_feature: MA Experiment 108574 PARAMETER Experiment Name: At_Wounding__cDNA_P Parameter: Tissue Value: Aerial
  misc_feature: MA Experiment 108574 PARAMETER Experiment Name: At_Wounding__cDNA_P Parameter: Treatment Value: Wounding vs. No Wounding
  misc_feature: MA Experiment ID: 108576 Result: Down-regulated in Transcription
  misc_feature: MA Experiment 108576 PARAMETER Experiment Name: At_42deg_Heat_cDNA_P Parameter: Temperature (deg C) Value: 42 vs. 22
  misc_feature: MA Experiment 108576 PARAMETER Experiment Name: At_42deg_Heat_cDNA_P Parameter: Timepoint (hr) Value: 1
  misc_feature: MA Experiment 108576 PARAMETER Experiment Name: At_42deg_Heat_cDNA_P Parameter: Tissue Value: Aerial
  misc_feature: MA Experiment ID: 108577 Result: Up-regulated in Transcription
  misc_feature: MA Experiment 108577 PARAMETER Experiment Name: At_42deg_Heat_cDNA_P Parameter: Temperature (deg C) Value: 42 vs. 22
  misc_feature: MA Experiment 108577 PARAMETER Experiment Name: At_42deg_Heat_cDNA_P Parameter: Timepoint (hr) Value: 6
  misc_feature: MA Experiment 108577 PARAMETER Experiment Name: At_42deg_Heat_cDNA_P Parameter: Tissue Value: Aerial
  misc_feature: MA Experiment ID: 108595 Result: Down-regulated in Transcription
  misc_feature: MA Experiment 108595 PARAMETER Experiment Name: At_Ler-pi_Ovule_cDNA_P Parameter: Plant Line Value: null
  misc_feature: MA Experiment ID: 20000069 Result: Down-regulated in Transcription
  misc_feature: MA Experiment 20000069 PARAMETER Experiment Name: At_100uM_ABA_Mutants_cDNA_P Parameter: Plant Line Value: CS23
  misc_feature: MA Experiment 20000069 PARAMETER Experiment Name: At_100uM_ABA_Mutants_cDNA_P Parameter: Timepoint (hr) Value: 6
  misc_feature: MA Experiment 20000069 PARAMETER Experiment Name: At_100uM_ABA_Mutants_cDNA_P Parameter: Tissue Value: Aerial
  misc_feature: MA Experiment 20000069 PARAMETER Experiment Name: At_100uM_ABA_Mutants_cDNA_P Parameter: Treatment Value: 100uM ABA vs. No Treatment
  misc_feature: MA Experiment ID: 20000072 Result: Down-regulated in Transcription
  misc_feature: MA Experiment 20000072 PARAMETER Experiment Name: At_100uM_ABA_Mutants_cDNA_P Parameter: Plant Line Value: CS8105
  misc_feature: MA Experiment 20000072 PARAMETER Experiment Name: At_100uM_ABA_Mutants_cDNA_P Parameter: Timepoint (hr) Value: 6
  misc_feature: MA Experiment 20000072 PARAMETER Experiment Name: At_100uM_ABA_Mutants_cDNA_P Parameter: Tissue Value: Aerial
  misc_feature: MA Experiment 20000072 PARAMETER Experiment Name: At_100uM_ABA_Mutants_cDNA_P Parameter: Treatment Value: 100uM ABA vs. No Treatment
  misc_feature: MA Experiment ID: 20000086 Result: Down-regulated in Transcription
  misc_feature: MA Experiment 20000086 PARAMETER Experiment Name: At_100uM_ABA_Mutants_cDNA_P Parameter: Plant Line Value: CS22
  misc_feature: MA Experiment 20000086 PARAMETER Experiment Name: At_100uM_ABA_Mutants_cDNA_P Parameter: Timepoint (hr) Value: 6
  misc_feature: MA Experiment 20000086 PARAMETER Experiment Name: At_100uM_ABA_Mutants_cDNA_P Parameter: Tissue Value: Aerial
  misc_feature: MA Experiment 20000086 PARAMETER Experiment Name: At_100uM_ABA_Mutants_cDNA_P Parameter: Treatment Value: 100uM ABA vs. No Treatment
  misc_feature: MA Experiment ID: 20000087 Result: Down-regulated in Transcription
  misc_feature: MA Experiment 20000087 PARAMETER Experiment Name: At_100uM_ABA_Mutants_cDNA_P Parameter: Plant Line Value: WS
  misc_feature: MA Experiment 20000087 PARAMETER Experiment Name: At_100uM_ABA_Mutants_cDNA_P Parameter: Timepoint (hr) Value: 6
  misc_feature: MA Experiment 20000087 PARAMETER Experiment Name: At_100uM_ABA_Mutants_cDNA_P Parameter: Tissue Value: Aerial
  misc_feature: MA Experiment 20000087 PARAMETER Experiment Name: At_100uM_ABA_Mutants_cDNA_P Parameter: Treatment Value: 100uM ABA vs. No Treatment
  misc_feature: MA Experiment ID: 20000089 Result: Down-regulated in Transcription
  misc_feature: MA Experiment ID: 20000090 Result: Down-regulated in Transcription
  misc_feature: MA Experiment ID: 20000111 Result: Up-regulated in Transcription
  misc_feature: MA Experiment 20000111 PARAMETER Experiment Name: At_42deg_Heat_cDNA_P Parameter: Temperature (deg C) Value: 42 vs. 22
  misc_feature: MA Experiment 20000111 PARAMETER Experiment Name: At_42deg_Heat_cDNA_P Parameter: Timepoint (hr) Value: 6
  misc_feature: MA Experiment 20000111 PARAMETER Experiment Name: At_42deg_Heat_cDNA_P Parameter: Tissue Value: Aerial
  misc_feature: MA Experiment ID: 20000113 Result: Up-regulated in Transcription
  misc_feature: MA Experiment 20000113 PARAMETER Experiment Name: At_42deg_Heat_cDNA_P Parameter: Temperature (deg C) Value: 42 vs. 22
  misc_feature: MA Experiment 20000113 PARAMETER Experiment Name: At_42deg_Heat_cDNA_P Parameter: Timepoint (hr) Value: 8
  misc_feature: MA Experiment 20000113 PARAMETER Experiment Name: At_42deg_Heat_cDNA_P Parameter: Tissue Value: Aerial
  misc_feature: MA Experiment ID: 20000144 Result: Down-regulated in Transcription
  misc_feature: MA Experiment 20000144 PARAMETER Experiment Name: At_42deg_Heat_cDNA_P Parameter: Temperature (deg C) Value: 42 vs. 22
  misc_feature: MA Experiment 20000144 PARAMETER Experiment Name: At_42deg_Heat_cDNA_P Parameter: Timepoint (hr) Value: 1
  misc_feature: MA Experiment 20000144 PARAMETER Experiment Name: At_42deg_Heat_cDNA_P Parameter: Tissue Value: Aerial
  misc_feature: MA Experiment ID: 20000171 Result: Down-regulated in Transcription
  misc_feature: MA Experiment 20000171 PARAMETER Experiment Name: At_42deg_Heat_P Parameter: Age (day) Value: 14
  misc_feature: MA Experiment 20000171 PARAMETER Experiment Name: At_42deg_Heat_P Parameter: Organism Value: A. thaliana
  misc_feature: MA Experiment 20000171 PARAMETER Experiment Name: At_42deg_Heat_P Parameter: Plant Line Value: WS
  misc_feature: MA Experiment 20000171 PARAMETER Experiment Name: At_42deg_Heat_P Parameter: Temperature (deg C) Value: 42 vs. 22
  misc_feature: MA Experiment 20000171 PARAMETER Experiment Name: At_42deg_Heat_P Parameter: Timepoint (hr) Value: 1
  misc_feature: MA Experiment 20000171 PARAMETER Experiment Name: At_42deg_Heat_P Parameter: Tissue Value: Aerial
  misc_feature: MA Experiment ID: 20000173 Result: Up-regulated in Transcription
  misc_feature: MA Experiment 20000173 PARAMETER Experiment Name: At_42deg_Heat_P Parameter: Age (day) Value: 14
  misc_feature: MA Experiment 20000173 PARAMETER Experiment Name: At_42deg_Heat_P Parameter: Organism Value: A. thaliana
  misc_feature: MA Experiment 20000173 PARAMETER Experiment Name: At_42deg_Heat_P Parameter: Plant Line Value: WS
  misc_feature: MA Experiment 20000173 PARAMETER Experiment Name: At_42deg_Heat_P Parameter: Temperature (deg C) Value: 42 vs. 22
  misc_feature: MA Experiment 20000173 PARAMETER Experiment Name: At_42deg_Heat_P Parameter: Timepoint (hr) Value: 6
  misc_feature: MA Experiment 20000173 PARAMETER Experiment Name: At_42deg_Heat_P Parameter: Tissue Value: Aerial
  misc_feature: MA Experiment ID: 20000180 Result: Up-regulated in Transcription
  misc_feature: MA Experiment 20000180 PARAMETER Experiment Name: At_Germinating_Seeds_P Parameter: Age (hr) Value: 24 vs. 0
  misc_feature: MA Experiment 20000180 PARAMETER Experiment Name: At_Germinating_Seeds_P Parameter: Tissue Value: Germinating Seeds
  misc_feature: MA Experiment ID: 20000184 Result: Up-regulated in Transcription
  misc_feature: MA Experiment 20000184 PARAMETER Experiment Name: At_Shoots__P Parameter: Age (day) Value: 7
  misc_feature: MA Experiment 20000184 PARAMETER Experiment Name: At_Shoots__P Parameter: Tissue Value: Shoots vs. Whole Plant
  misc_feature: MA Experiment ID: 20000185 Result: Down-regulated in Transcription
  misc_feature: MA Experiment 20000185 PARAMETER Experiment Name: At_Roots__P Parameter: Age (day) Value: 7 vs. 21
  misc_feature: MA Experiment 20000185 PARAMETER Experiment Name: At_Roots__P Parameter: Organism Value: A. thaliana
  misc_feature: MA Experiment 20000185 PARAMETER Experiment Name: At_Roots__P Parameter: Tissue Value: Roots vs. Whole Plant
  misc_feature: MA Experiment ID: 20000224 Result: Up-regulated in Transcription
  misc_feature: MA Experiment ID: 20000264 Result: Up-regulated in Transcription
  misc_feature: MA Experiment 20000264 PARAMETER Experiment Name: At_Open_Flower_P Parameter: Age (day) Value: 21
  misc_feature: MA Experiment 20000264 PARAMETER Experiment Name: At_Open_Flower_P Parameter: Plant Line Value: WS
  misc_feature: MA Experiment 20000264 PARAMETER Experiment Name: At_Open_Flower_P Parameter: Tissue Value: Open Flower vs. Whole Plant
  misc_feature: MA Experiment ID: 20000438 Result: Up-regulated in Transcription
  misc_feature: MA Experiment 20000438 PARAMETER Experiment Name: At_Shoots__P Parameter: Age (day) Value: 14
  misc_feature: MA Experiment 20000438 PARAMETER Experiment Name: At_Shoots__P Parameter: Tissue Value: Shoots vs. Whole Plant
  misc_feature: MA Experiment ID: 20000439 Result: Down-regulated in Transcription
  misc_feature: MA Experiment 20000439 PARAMETER Experiment Name: At_Roots__P Parameter: Age (day) Value: 14 vs. 21
  misc_feature: MA Experiment 20000439 PARAMETER Experiment Name: At_Roots__P Parameter: Organism Value: A. thaliana
  misc_feature: MA Experiment 20000439 PARAMETER Experiment Name: At_Roots__P Parameter: Tissue Value: Roots vs. Whole Plant
  misc_feature: MA Experiment ID: 20000443 Result: Up-regulated in Transcription
  misc_feature: MA Experiment 20000443 PARAMETER Experiment Name: At_1uM_BR-BRZ__P Parameter: Tissue Value: Shoot Apices
  misc_feature: MA Experiment 20000443 PARAMETER Experiment Name: At_1uM_BR-BRZ__P Parameter: Treatment Value: 1uM BRZ vs. No Treatment
  misc_feature: MA Experiment ID: 20000495 Result: Down-regulated in Transcription
  misc_feature: MA Experiment 20000495 PARAMETER Experiment Name: At_Guard_Cells_P Parameter: Harvest Date Value: 8/2/2002
  misc_feature: MA Experiment 20000495 PARAMETER Experiment Name: At_Guard_Cells_P Parameter: Organism Value: A. thaliana
  misc_feature: MA Experiment 20000495 PARAMETER Experiment Name: At_Guard_Cells_P Parameter: Tissue Value: Guard Cells vs. Leaves
  misc_feature: MA Experiment ID: 20000573 Result: Down-regulated in Transcription
  misc_feature: MA Experiment 20000573 PARAMETER Experiment Name: At_100uM_ABA_Mutants__P Parameter: Organism Value: A. thaliana
  misc_feature: MA Experiment 20000573 PARAMETER Experiment Name: At_100uM_ABA_Mutants__P Parameter: Plant Line Value: CS22 vs. Ler wt
  misc_feature: MA Experiment 20000573 PARAMETER Experiment Name: At_100uM_ABA_Mutants__P Parameter: Timepoint (hr) Value: N/A
  misc_feature: MA Experiment 20000573 PARAMETER Experiment Name: At_100uM_ABA_Mutants__P Parameter: Tissue Value: Whole Plant
  misc_feature: MA Experiment 20000573 PARAMETER Experiment Name: At_100uM_ABA_Mutants__P Parameter: Treatment Value: None
  misc_feature: MA Experiment ID: 20000574 Result: Down-regulated in Transcription
  misc_feature: MA Experiment 20000574 PARAMETER Experiment Name: At_100uM_ABA_Mutants__P Parameter: Organism Value: A. thaliana
  misc_feature: MA Experiment 20000574 PARAMETER Experiment Name: At_100uM_ABA_Mutants__P Parameter: Plant Line Value: CS23 vs. Ler wt
  misc_feature: MA Experiment 20000574 PARAMETER Experiment Name: At_100uM_ABA_Mutants__P Parameter: Timepoint (hr) Value: N/A
  misc_feature: MA Experiment 20000574 PARAMETER Experiment Name: At_100uM_ABA_Mutants__P Parameter: Tissue Value: Whole Plant
  misc_feature: MA Experiment 20000574 PARAMETER Experiment Name: At_100uM_ABA_Mutants__P Parameter: Treatment Value: None
  misc_feature: MA Experiment ID: 20000794 Result: Up-regulated in Transcription
  misc_feature: MA Experiment 20000794 PARAMETER Experiment Name: At_Petals_P Parameter: Age (day) Value: 23-25 days
  misc_feature: MA Experiment 20000794 PARAMETER Experiment Name: At_Petals_P Parameter: Plant Line Value: WS
  misc_feature: MA Experiment 20000794 PARAMETER Experiment Name: At_Petals_P Parameter: Tissue Value: Petals vs. Whole plant
  misc_feature: MA Experiment ID: 20001248 Result: Down-regulated in Transcription
  misc_feature: MA Experiment 20001248 PARAMETER Experiment Name: At_Far-red-induction_P Parameter: Age (day) Value: 7
  misc_feature: MA Experiment 20001248 PARAMETER Experiment Name: At_Far-red-induction_P Parameter: Light Value: Far-red vs. White
  misc_feature: MA Experiment 20001248 PARAMETER Experiment Name: At_Far-red-induction_P Parameter: Organism Value: A. thaliana
  misc_feature: MA Experiment 20001248 PARAMETER Experiment Name: At_Far-red-induction_P Parameter: Plant Line Value: Columbia
  misc_feature: MA Experiment 20001248 PARAMETER Experiment Name: At_Far-red-induction_P Parameter: Timepoint (hr) Value: 4
  misc_feature: MA Experiment 20001248 PARAMETER Experiment Name: At_Far-red-induction_P Parameter: Tissue Value: Whole Plant
  misc_feature: MA Experiment ID: 20001451 Result: Up-regulated in Transcription
  misc_feature: MA Experiment 20001451 PARAMETER Experiment Name: At_Far-red-induction_P Parameter: Age (day) Value: 7
  misc_feature: MA Experiment 20001451 PARAMETER Experiment Name: At_Far-red-induction_P Parameter: Light Value: Far-red vs. White
  misc_feature: MA Experiment 20001451 PARAMETER Experiment Name: At_Far-red-induction_P Parameter: Organism Value: A. thaliana
  misc_feature: MA Experiment 20001451 PARAMETER Experiment Name: At_Far-red-induction_P Parameter: Plant Line Value: Columbia
  misc_feature: MA Experiment 20001451 PARAMETER Experiment Name: At_Far-red-induction_P Parameter: Timepoint (hr) Value: 24
  misc_feature: MA Experiment 20001451 PARAMETER Experiment Name: At_Far-red-induction_P Parameter: Tissue Value: Whole Plant
atctctcttcacatgcccatttgaatcgtatctcctctcatttcttcttttgttttgttggagttagataaaatcaaaggtctaataaaagtgtcaaaacccttatcgctataacctccactaccatcttaaacttctccttataactcacgcttctctgctttcttctctcagagtctaactgctcaaataagaaaatggttcatgtgtcatcatctcatggagccaaagatggctctgaagaagcctatgattacagaggaaacccaccagataagtctaaaaccggtggatggttaggcgccggtttaattttagggagcgagctatcagagagaatatgcgtgatgggcatatcaatgaatctagtgacgtaccttgttggagatttacacatctcatcagctaaatcagcgaccatagtcaccaacttcatgggaactcttaaccttctagggcttctcggtggttttttggctgacgctaaactcggtcgctacaagatggttgcaatctcagcttctgtcacagctctgggagtgttgcttttgacggtggctacaactatctcaagcatgagaccaccaatatgtgacgatttcaggagacttcatcatcagtgcatagaagcaaacggacaccagttggctcttctctatgttgctctctataccatagctctaggcggaggaggaatcaaatccaacgtctctggttttgggtctgaccagttcgatactagtgatcctaaagaagagaaacagatgattttcttcttcaacagattctatttctccatcagcgtcggctctctcttcgccgtgattgctcttgtttacgttcaggacaacgtcgggagaggctggggttacgggatctctgccgcgactatggtggttgcagccattgttttactctgcggaacgaaacggtaccgtttcaagaaacctaaaggaagcccttttacaacaatatggagggttggtttcttggcttggaagaaaagaaaggagagttaccctgcgcatccaagtcttttgaacggttatgacaacaccacggttccacacacagagatgcttaagtgtttagacaaagccgcaatttccaagaacgagagctctcctagctcgaaggacttcgaagagaaggatccgtggatcgtttcgactgttacacaagtcgaagaagtgaaactcgtgatgaaattggtaccgatttgggcaacgaacattcttttctggacgatttactcccaaatgacgactttcacggtcgaacaagcgacgtttatggaccgaaaactcggatctttcactgttcctgcaggctcttactctgctttcctcatactcacaattctcctcttcacttcccttaacgagagagtctttgttcctttaacaagaaggctcacaaaaaagcctcaaggaatcacaagcctacagagaatcggagtagggctagtattctcaatggctgcaatggctgtagccgcggttatagagaacgctagacgcgaggcagcggttaacaacgataagaaaataagcgcgttttggttggttccacaatatttcttagtcggtgcgggtgaggcctttgcttacgttggacagcttgagttctttataagagaagcaccagagaggatgaaatcgatgagcaccggattgtttctaagcacgatatcgatgggattcttcgtgagtagcttgcttgtttcgcttgttgatagggttacagacaaaagctggcttagaagtaaccttaacaaagcgagattgaactacttctactggttacttgttgtcttgggagcattgaacttcttgatttttattgtgtttgccatgaaacatcagtataaagctgatgtgattactgttgttgtgactgatgatgattcagtggagaaggaagtgacgaagaaagagagctctgaatttgagcttaaggacattccttgaaaccagatttagaagaagaaaaaaaacctctggttttgttatttgctttgaagatttcattttgtctttgtatttttagtatattgtgtgtatgaaatagaaagattactatatggtttggattgtatttttttttgtaagatttttaaaaatttagttactatagttttttc

SEQ ID NO: 103655 - protein, 590 aa, Arabidopsis thaliana; identical to SEQ ID NO: 39905
  peptide (1)..(590): Ceres Seq. ID no. 13613302
  misc_feature (101)..(498): Pfam Name: POT family Pfam Description: POT family
  misc_feature (1)..(590): Homolog of NCBI NO: 15233123 NR Description: nitrate transporter [Arabidopsis thaliana] nitrate transporter [Arabidopsis thaliana] AT3g21670/MIL23_23 [Arabidopsis thaliana]
  misc_feature (1)..(590): Homolog of NCBI NO: 21536775 NR Description: nitrate transporter [Arabidopsis thaliana]
  misc_feature (24)..(590): Homolog of NCBI NO: 25456097 NR Description: probable nitrate transporter ntp3 [imported] - thaliana (fragment) >gi|4490323|emb|CAB38706.1| nitrate
  misc_feature (8)..(584): Homolog of NCBI NO: 21741984 NR Description: OSJNBa0060P14.5 [Oryza sativa (japonica
  misc_feature (16)..(583): Homolog of NCBI NO: 25407841 NR Description: probable nitrate transporter [imported] - thaliana >gi|2760834|gb|AAB95302.1| putative nitrate transporter
  misc_feature (16)..(583): Homolog of NCBI NO: 30683214 NR Description: nitrate transporter -related [Arabidopsis
  misc_feature (16)..(583): Homolog of NCBI NO: 20466668 NR Description: putative nitrate transporter [Arabidopsis
  misc_feature (16)..(558): Homolog of NCBI NO: 602292 NR Description: RCH2 protein
  misc_feature (16)..(558): Homolog of NCBI NO: 18391353 NR Description: putative NPK1-related protein kinase 2 thaliana] >gi|544018|sp|Q05085|CHL1_ARATH Nitrate/chlorate
  misc_feature (1)..(558): Homolog of NCBI NO: 30696666 NR Description: oligopeptide transporter -related [Arabidopsis >gi|16604436|gb|AAL24224.1| At1g62200/F19K23_13 [Arabidopsis

SEQ ID NO: 103656 - protein, 540 aa, Arabidopsis thaliana; identical to SEQ ID NO: 39906
  peptide (1)..(540): Ceres Seq. ID no. 13613303
  misc_feature (51)..(448): Pfam Name: POT family Pfam Description: POT family
  misc_feature (1)..(540): Homolog of NCBI NO: 15233123 NR Description: nitrate transporter [Arabidopsis thaliana] nitrate transporter [Arabidopsis thaliana] AT3g21670/MIL23_23 [Arabidopsis thaliana]
  misc_feature (1)..(540): Homolog of NCBI NO: 21536775 NR Description: nitrate transporter [Arabidopsis thaliana]
  misc_feature (1)..(540): Homolog of NCBI NO: 25456097 NR Description: probable nitrate transporter ntp3 [imported] - thaliana (fragment) >gi|4490323|emb|CAB38706.1| nitrate
  misc_feature (1)..(534): Homolog of NCBI NO: 21741984 NR Description: OSJNBa0060P14.5 [Oryza sativa (japonica
  misc_feature (1)..(533): Homolog of NCBI NO: 25407841 NR Description: probable nitrate transporter [imported] - thaliana >gi|2760834|gb|AAB95302.1| putative nitrate transporter
  misc_feature (1)..(533): Homolog of NCBI NO: 30683214 NR Description: nitrate transporter -related [Arabidopsis
  misc_feature (1)..(533): Homolog of NCBI NO: 20466668 NR Description: putative nitrate transporter [Arabidopsis
  misc_feature (1)..(508): Homolog of NCBI NO: 602292 NR Description: RCH2 protein
  misc_feature (1)..(508): Homolog of NCBI NO: 18391353 NR Description: putative NPK1-related protein kinase 2 thaliana] >gi|544018|sp|Q05085|CHL1_ARATH Nitrate/chlorate
  misc_feature (1)..(508): Homolog of NCBI NO: 30696666 NR Description: oligopeptide transporter -related [Arabidopsis >gi|16604436|gb|AAL24224.1| At1g62200/F19K23_13 [Arabidopsis

SEQ ID NO: 103657 - protein, 536 aa, Arabidopsis thaliana; identical to SEQ ID NO: 39907
  peptide (1)..(536): Ceres Seq. ID no. 13613304
  misc_feature (47)..(444): Pfam Name: POT family Pfam Description: POT family
  misc_feature (1)..(536): Homolog of NCBI NO: 15233123 NR Description: nitrate transporter [Arabidopsis thaliana] nitrate transporter [Arabidopsis thaliana] AT3g21670/MIL23_23 [Arabidopsis thaliana]
  misc_feature (1)..(536): Homolog of NCBI NO: 21536775 NR Description: nitrate transporter [Arabidopsis thaliana]
  misc_feature (1)..(536): Homolog of NCBI NO: 25456097 NR Description: probable nitrate transporter ntp3 [imported] - thaliana (fragment) >gi|4490323|emb|CAB38706.1| nitrate
  misc_feature (1)..(530): Homolog of NCBI NO: 21741984 NR Description: OSJNBa0060P14.5 [Oryza sativa (japonica
  misc_feature (1)..(529): Homolog of NCBI NO: 25407841 NR Description: probable nitrate transporter [imported] - thaliana >gi|2760834|gb|AAB95302.1| putative nitrate transporter
  misc_feature (1)..(529): Homolog of NCBI NO: 30683214 NR Description: nitrate transporter -related [Arabidopsis
  misc_feature (1)..(529): Homolog of NCBI NO: 20466668 NR Description: putative nitrate transporter [Arabidopsis
  misc_feature (1)..(504): Homolog of NCBI NO: 602292 NR Description: RCH2 protein
  misc_feature (1)..(504): Homolog of NCBI NO: 18391353 NR Description: putative NPK1-related protein kinase 2 thaliana] >gi|544018|sp|Q05085|CHL1_ARATH Nitrate/chlorate
  misc_feature (1)..(504): Homolog of NCBI NO: 30696666 NR Description: oligopeptide transporter -related [Arabidopsis >gi|16604436|gb|AAL24224.1| At1g62200/F19K23_13 [Arabidopsis

SEQ ID NO: 103658 - DNA, 1237 bp, Arabidopsis thaliana
  misc_feature (1)..(1237): Ceres Seq. ID no. 13613305
  misc_feature: MA Experiment ID: 108433 Result: Up-regulated in Transcription
  misc_feature: MA Experiment 108433 PARAMETER Experiment Name: At_rhl_Mutant2_cDNA_P Parameter: Age (day) Value: 7
  misc_feature: MA Experiment 108433 PARAMETER Experiment Name: At_rhl_Mutant2_cDNA_P Parameter: Organism Value: A. thaliana
  misc_feature: MA Experiment 108433 PARAMETER Experiment Name: At_rhl_Mutant2_cDNA_P Parameter: Plant Line Value: rhl Mutant vs. wt landsburg
  misc_feature: MA Experiment 108433 PARAMETER Experiment Name: At_rhl_Mutant2_cDNA_P Parameter: Tissue Value: Roots
  misc_feature: MA Experiment ID: 108434 Result: Down-regulated in Transcription
  misc_feature: MA Experiment 108434 PARAMETER Experiment Name: At_Root_Tips_cDNA_P Parameter: Tissue Value: Root Tips
  misc_feature: MA Experiment ID: 108435 Result: Up-regulated in Transcription
  misc_feature: MA Experiment 108435 PARAMETER Experiment Name: At_stm_Mutants_cDNA_P Parameter: Plant Line Value: wt Landsburg vs stm
  misc_feature: MA Experiment 108435 PARAMETER Experiment Name: At_stm_Mutants_cDNA_P Parameter: Tissue Value: Shoot Apical Meristem Region
  misc_feature: MA Experiment ID: 108461 Result: Up-regulated in Transcription
  misc_feature: MA Experiment 108461 PARAMETER Experiment Name: At_Germinating_Seeds_cDNA_P Parameter: Age (day) Value: 1 vs. 0
  misc_feature: MA Experiment 108461 PARAMETER Experiment Name: At_Germinating_Seeds_cDNA_P Parameter: Tissue Value: Germinating Seeds
  misc_feature: MA Experiment ID: 108462 Result: Up-regulated in Transcription
  misc_feature: MA Experiment 108462 PARAMETER Experiment Name: At_Germinating_Seeds_cDNA_P Parameter: Age (day) Value: 2 vs. 0
  misc_feature: MA Experiment 108462 PARAMETER Experiment Name: At_Germinating_Seeds_cDNA_P Parameter: Tissue Value: Germinating Seeds
  misc_feature: MA Experiment ID: 108463 Result: Up-regulated in Transcription
  misc_feature: MA Experiment 108463 PARAMETER Experiment Name: At_Germinating_Seeds_cDNA_P Parameter: Age (day) Value: 3 vs. 0
  misc_feature: MA Experiment 108463 PARAMETER Experiment Name: At_Germinating_Seeds_cDNA_P Parameter: Tissue Value: Germinating Seeds
  misc_feature: MA Experiment ID: 108464 Result: Up-regulated in Transcription
  misc_feature: MA Experiment 108464 PARAMETER Experiment Name: At_Germinating_Seeds_cDNA_P Parameter: Age (day) Value: 4 vs. 0
  misc_feature: MA Experiment 108464 PARAMETER Experiment Name: At_Germinating_Seeds_cDNA_P Parameter: Tissue Value: Germinating Seeds
  misc_feature: MA Experiment ID: 108489 Result: Up-regulated in Transcription
  misc_feature: MA Experiment ID: 108577 Result: Down-regulated in Transcription
  misc_feature: MA Experiment 108577 PARAMETER Experiment Name: At_42deg_Heat_cDNA_P Parameter: Temperature (deg C) Value: 42 vs. 22
  misc_feature: MA Experiment 108577 PARAMETER Experiment Name: At_42deg_Heat_cDNA_P Parameter: Timepoint (hr) Value: 6
  misc_feature: MA Experiment 108577 PARAMETER Experiment Name: At_42deg_Heat_cDNA_P Parameter: Tissue Value: Aerial
  misc_feature: MA Experiment ID: 108595 Result: Down-regulated in Transcription
  misc_feature: MA Experiment 108595 PARAMETER Experiment Name: At_Ler-pi_Ovule_cDNA_P Parameter: Plant Line Value: null
  misc_feature: MA Experiment ID: 20000111 Result: Down-regulated in Transcription
  misc_feature: MA Experiment 20000111 PARAMETER Experiment Name: At_42deg_Heat_cDNA_P Parameter: Temperature (deg C) Value: 42 vs. 22
  misc_feature: MA Experiment 20000111 PARAMETER Experiment Name: At_42deg_Heat_cDNA_P Parameter: Timepoint (hr) Value: 6
  misc_feature: MA Experiment 20000111 PARAMETER Experiment Name: At_42deg_Heat_cDNA_P Parameter: Tissue Value: Aerial
  misc_feature: MA Experiment ID: 20000113 Result: Down-regulated in Transcription
  misc_feature: MA Experiment 20000113 PARAMETER Experiment Name: At_42deg_Heat_cDNA_P Parameter: Temperature (deg C) Value: 42 vs. 22
  misc_feature: MA Experiment 20000113 PARAMETER Experiment Name: At_42deg_Heat_cDNA_P Parameter: Timepoint (hr) Value: 8
  misc_feature: MA Experiment 20000113 PARAMETER Experiment Name: At_42deg_Heat_cDNA_P Parameter: Tissue Value: Aerial
  misc_feature: MA Experiment ID: 20000185 Result: Up-regulated in Transcription
  misc_feature: MA Experiment 20000185 PARAMETER Experiment Name: At_Roots__P Parameter: Age (day) Value: 7 vs. 21
  misc_feature: MA Experiment 20000185 PARAMETER Experiment Name: At_Roots__P Parameter: Organism Value: A. thaliana
  misc_feature: MA Experiment 20000185 PARAMETER Experiment Name: At_Roots__P Parameter: Tissue Value: Roots vs. Whole Plant
  misc_feature: MA Experiment ID: 20000224 Result: Down-regulated in Transcription
  misc_feature: MA Experiment ID: 20000439 Result: Up-regulated in Transcription
  misc_feature: MA Experiment 20000439 PARAMETER Experiment Name: At_Roots__P Parameter: Age (day) Value: 14 vs. 21
  misc_feature: MA Experiment 20000439 PARAMETER Experiment Name: At_Roots__P Parameter: Organism Value: A. thaliana
  misc_feature: MA Experiment 20000439 PARAMETER Experiment Name: At_Roots__P Parameter: Tissue Value: Roots vs. Whole Plant
  misc_feature: MA Experiment ID: 20000794 Result: Up-regulated in Transcription
  misc_feature: MA Experiment 20000794 PARAMETER Experiment Name: At_Petals_P Parameter: Age (day) Value: 23-25 days
  misc_feature: MA Experiment 20000794 PARAMETER Experiment Name: At_Petals_P Parameter: Plant Line Value: WS
  misc_feature: MA Experiment 20000794 PARAMETER Experiment Name: At_Petals_P Parameter: Tissue Value: Petals vs. Whole plant
  misc_feature: MA Experiment ID: 20001557 Result: Up-regulated in Transcription
  misc_feature: MA Experiment 20001557 PARAMETER Experiment Name: At_Drought_Soil_Dry_P Parameter: Age (day) Value: 27
  misc_feature: MA Experiment 20001557 PARAMETER Experiment Name: At_Drought_Soil_Dry_P Parameter: Organism Value: A. thaliana
  misc_feature: MA Experiment 20001557 PARAMETER Experiment Name: At_Drought_Soil_Dry_P Parameter: Plant Line Value: WS
  misc_feature: MA Experiment 20001557 PARAMETER Experiment Name: At_Drought_Soil_Dry_P Parameter: Post Timepoint (hr) Value: 3
  misc_feature: MA Experiment 20001557 PARAMETER Experiment Name: At_Drought_Soil_Dry_P Parameter: Post-Treatment Value: Re-Water vs. No Drought
  misc_feature: MA Experiment 20001557 PARAMETER Experiment Name: At_Drought_Soil_Dry_P Parameter: Timepoint (day) Value: 13
  misc_feature: MA Experiment 20001557 PARAMETER Experiment Name: At_Drought_Soil_Dry_P Parameter: Treatment Value: Drought vs. No Drought
  misc_feature: MA Experiment ID: 20001911 Result: Down-regulated in Transcription
  misc_feature: MA Experiment 20001911 PARAMETER Experiment Name: At_Drought_Reproduction_P Parameter: Age (day) Value: 40
  misc_feature: MA Experiment 20001911 PARAMETER Experiment Name: At_Drought_Reproduction_P Parameter: Organism Value: A. thaliana
  misc_feature: MA Experiment 20001911 PARAMETER Experiment Name: At_Drought_Reproduction_P Parameter: Plant Line Value: WS
  misc_feature: MA Experiment 20001911 PARAMETER Experiment Name: At_Drought_Reproduction_P Parameter: Timepoint (day) Value: 10
  misc_feature: MA Experiment 20001911 PARAMETER Experiment Name: At_Drought_Reproduction_P Parameter: Tissue Value: Flowers
  misc_feature: MA Experiment 20001911 PARAMETER Experiment Name: At_Drought_Reproduction_P Parameter: Treatment Value: Drought vs. No Drought
atcctgtctctcttcagtgacacaaacccaaagaaaagtagtgagaaacaaaatcgaggtaactactagatgaagacgatgacgcaattaaatattgcggttgtggttgtagtgacggttcttattggaatgttgagatcatcggaggctcaacttcaaatgaatttctacgcgaagagctgtccaaacgcagagaaaatcatttcagatcatattcaaaatcatatccacaatggtccttctcttgcagctcctctcatccgaatgcacttccatgattgcttcgttaggggatgtgacggatcggtgttgataaattcaacatctggtaacgcagagagagatgcaccaccgaatctaacacttagaggattcggtttcgtggaaaggattaaggctcttcttgaaaaagtgtgtcctaagactgtttcttgcgcagatatcattgctttgactgctagagacgcagttgtcgccaccggaggtccttcatggagtgttccaacgggtagaagagacggtaggatctcaaataagacggaggctactaataacattccacctccaacgagtaatttcacgactttacaacgacttttcaaaaaccaaggccttaatctcaaggaccttgttctgctctctggggctcacacgattggcgtctcacattgttcttccatgaatacgcgtctctacaacttctcgactacagtaaaacaagatccatctctcgatagccagtatgcagcaaatctaaaggctaacaaatgtaagagccttaacgacaatagcaccatcctcgagatggatcccggtagtagcagaagcttcgatctcagttattataggcttgtcttgaagaggagaggcttgtttcagtctgattctgcattaacaacgaactcagcgactttgaaggtgatcaacgacttggtcaacggttctgaaaagaagtttttcaaagcttttgctaagtcaatggagaagatggggagagttaaagtgaagactggctcagctggtgtgatcaggacacggtgttctgtcgctggaagttagtaagcttcagggtcggaatgtggtgtgttatggtcattgttgttttgtgtgactttcggaaaaaacaaatgttgttaatttaattttgttgttgtttgatttgtgtttatgcacccaagaatgatgtgttatggttcaattaatatgtgaatcatttaaatttacaataattcttatt

SEQ ID NO: 103659 - protein, 329 aa, Arabidopsis thaliana
  peptide (1)..(329): Ceres Seq. ID no. 13613306
  misc_feature (1)..(329): Homolog of NCBI NO: 15233153 NR Description: peroxidase, putative [Arabidopsis thaliana] Peroxidase 30 precursor (Atperox P30) (PRXR9) (ATP7a) peroxidase [Arabidopsis thaliana] >gi|18252201|gb|AAL61933.1|
  misc_feature (1)..(329): Homolog of NCBI NO: 1402920 NR Description: peroxidase [Arabidopsis thaliana]
  misc_feature (4)..(329): Homolog of NCBI NO: 1546704 NR Description: peroxidase ATP7a [Arabidopsis thaliana]
  misc_feature (4)..(329): Homolog of NCBI NO: 21537041 NR Description: putative peroxidase [Arabidopsis thaliana]
  misc_feature (9)..(329): Homolog of NCBI NO: 21536908 NR Description: putative peroxidase [Arabidopsis thaliana]
  misc_feature (9)..(329): Homolog of NCBI NO: 15220463 NR Description: peroxidase, putative [Arabidopsis thaliana] Peroxidase 3 precursor (Atperox P3) (Rare cold inducible protein)
MKTMTQLNIAVVVVVTVLIGMLRSSEAQLQMNFYAKSCPNAEKIISDHIQNHIHNGPSLAAPLIRMHFHDCFVRGCDGSVLINSTSGNAERDAPPNLTLRGFGFVERIKALLEKVCPKTVSCADIIALTARDAVVATGGPSWSVPTGRRDGRISNKTEATNNIPPPTSNFTTLQRLFKNQGLNLKDLVLLSGAHTIGVSHCSSMNTRLYNFSTTVKQDPSLDSQYAANLKANKCKSLNDNSTILEMDPGSSRSFDLSYYRLVLKRRGLFQSDSALTTNSATLKVINDLVNGSEKKFFKAFAKSMEKMGRVKVKTGSAGVIRTRCSVAGS

SEQ ID NO: 103660 - protein, 326 aa, Arabidopsis thaliana
  peptide (1)..(326): Ceres Seq. ID no. 13613307
  misc_feature (1)..(326): Homolog of NCBI NO: 15233153 NR Description: peroxidase, putative [Arabidopsis thaliana] Peroxidase 30 precursor (Atperox P30) (PRXR9) (ATP7a) peroxidase [Arabidopsis thaliana] >gi|18252201|gb|AAL61933.1|
  misc_feature (1)..(326): Homolog of NCBI NO: 1402920 NR Description: peroxidase [Arabidopsis thaliana]
  misc_feature (1)..(326): Homolog of NCBI NO: 1546704 NR Description: peroxidase ATP7a [Arabidopsis thaliana]
  misc_feature (1)..(326): Homolog of NCBI NO: 21537041 NR Description: putative peroxidase [Arabidopsis thaliana]
  misc_feature (6)..(326): Homolog of NCBI NO: 21536908 NR Description: putative peroxidase [Arabidopsis thaliana]
  misc_feature (6)..(326): Homolog of NCBI NO: 15220463 NR Description: peroxidase, putative [Arabidopsis thaliana] Peroxidase 3 precursor (Atperox P3) (Rare cold inducible protein)
MTQLNIAVVVVVTVLIGMLRSSEAQLQMNFYAKSCPNAEKIISDHIQNHIHNGPSLAAPLIRMHFHDCFVRGCDGSVLINSTSGNAERDAPPNLTLRGFGFVERIKALLEKVCPKTVSCADIIALTARDAVVATGGPSWSVPTGRRDGRISNKTEATNNIPPPTSNFTTLQRLFKNQGLNLKDLVLLSGAHTIGVSHCSSMNTRLYNFSTTVKQDPSLDSQYAANLKANKCKSLNDNSTILEMDPGSSRSFDLSYYRLVLKRRGLFQSDSALTTNSATLKVINDLVNGSEKKFFKAFAKSMEKMGRVKVKTGSAGVIRTRCSVAGS

SEQ ID NO: 103661 - protein, 309 aa, Arabidopsis thaliana
  peptide (1)..(309): Ceres Seq. ID no. 13613308
  misc_feature (1)..(309): Homolog of NCBI NO: 15233153 NR Description: peroxidase, putative [Arabidopsis thaliana] Peroxidase 30 precursor (Atperox P30) (PRXR9) (ATP7a) peroxidase [Arabidopsis thaliana] >gi|18252201|gb|AAL61933.1|
  misc_feature (1)..(309): Homolog of NCBI NO: 1402920 NR Description: peroxidase [Arabidopsis thaliana]
  misc_feature (1)..(309): Homolog of NCBI NO: 1546704 NR Description: peroxidase ATP7a [Arabidopsis thaliana]
  misc_feature (1)..(309): Homolog of NCBI NO: 21537041 NR Description: putative peroxidase [Arabidopsis thaliana]
  misc_feature (1)..(309): Homolog of NCBI NO: 21536908 NR Description: putative peroxidase [Arabidopsis thaliana]
  misc_feature (1)..(309): Homolog of NCBI NO: 15220463 NR Description: peroxidase, putative [Arabidopsis thaliana] Peroxidase 3 precursor (Atperox P3) (Rare cold inducible protein)
MLRSSEAQLQMNFYAKSCPNAEKIISDHIQNHIHNGPSLAAPLIRMHFHDCFVRGCDGSVLINSTSGNAERDAPPNLTLRGFGFVERIKALLEKVCPKTVSCADIIALTARDAVVATGGPSWSVPTGRRDGRISNKTEATNNIPPPTSNFTTLQRLFKNQGLNLKDLVLLSGAHTIGVSHCSSMNTRLYNFSTTVKQDPSLDSQYAANLKANKCKSLNDNSTILEMDPGSSRSFDLSYYRLVLKRRGLFQSDSALTTNSATLKVINDLVNGSEKKFFKAFAKSMEKMGRVKVKTGSAGVIRTRCSVAGS

SEQ ID NO: 103662 - DNA, 1191 bp, Arabidopsis thaliana
  misc_feature (1)..(1191): Ceres Seq. ID no. 13613309
  misc_feature: MA Experiment ID: 20000307 Result: Down-regulated in Transcription
  misc_feature: MA Experiment 20000307 PARAMETER Experiment Name: At_Germinating_Seeds_Sub_P Parameter: Age (hr) Value: 24 vs. 0
  misc_feature: MA Experiment 20000307 PARAMETER Experiment Name: At_Germinating_Seeds_Sub_P Parameter: Organism Value: A. thaliana
  misc_feature: MA Experiment 20000307 PARAMETER Experiment Name: At_Germinating_Seeds_Sub_P Parameter: Plant Line Value: WS
  misc_feature: MA Experiment 20000307 PARAMETER Experiment Name: At_Germinating_Seeds_Sub_P Parameter: Tissue Value: Germinating Seeds
  misc_feature: MA Experiment ID: 20000315 Result: Down-regulated in Transcription
  misc_feature: MA Experiment 20000315 PARAMETER Experiment Name: At_14day_Shoots-Roots_Sub_P Parameter: Age (day) Value: 14
  misc_feature: MA Experiment 20000315 PARAMETER Experiment Name: At_14day_Shoots-Roots_Sub_P Parameter: Organism Value: A. thaliana
  misc_feature: MA Experiment 20000315 PARAMETER Experiment Name: At_14day_Shoots-Roots_Sub_P Parameter: Plant Line Value: WS
  misc_feature: MA Experiment 20000315 PARAMETER Experiment Name: At_14day_Shoots-Roots_Sub_P Parameter: Tissue Value: Shoots vs. Whole Plant
  misc_feature: MA Experiment ID: 20000328 Result: Down-regulated in Transcription
  misc_feature: MA Experiment 20000328 PARAMETER Experiment Name: At_42deg_Heat_Sub_P Parameter: Age (day) Value: 14
  misc_feature: MA Experiment 20000328 PARAMETER Experiment Name: At_42deg_Heat_Sub_P Parameter: Organism Value: A. thaliana
  misc_feature: MA Experiment 20000328 PARAMETER Experiment Name: At_42deg_Heat_Sub_P Parameter: Plant Line Value: WS
  misc_feature: MA Experiment 20000328 PARAMETER Experiment Name: At_42deg_Heat_Sub_P Parameter: Temperature (deg C) Value: 42 vs. 22
  misc_feature: MA Experiment 20000328 PARAMETER Experiment Name: At_42deg_Heat_Sub_P Parameter: Timepoint (hr) Value: 6
  misc_feature: MA Experiment 20000328 PARAMETER Experiment Name: At_42deg_Heat_Sub_P Parameter: Tissue Value: Aerial
  misc_feature: MA Experiment ID: 20000440 Result: Down-regulated in Transcription
  misc_feature: MA Experiment 20000440 PARAMETER Experiment Name: At_Closed-Flower__Sub_P Parameter: Tissue Value: Closed Flower vs. Whole Plant
gatatcttatcaaaaactcgctctccatccaacaaaacccgaagaaagagagattcagactcaaatctctcagtaggaatggcaagtgaaacagagaacatcaagtatgaagagagtttcatcaagaacactcgaggaatgaaactgttcacgtgcaaatgggtaccagcaaagcaagagccaaaggctttagtctttatttgccatggatatgcaatggaatgtagcatcaccatgaacagtactgcgaggaggctggtgaaagcaggatttgcggtatatggaattgattacgaagggcatggaaaatctgatgggcttagtgcttatgtcccaaactttgaccatctcgttgatgatgtctctactcactacacaagcatttgcgagaaagaagagaataaagggaagatgaggttcttgttaggagaatcaatgggaggagcagtgcttttgttgttacacagaaagaagcctcagttttgggatggggctgtcttggttgctccaatgtgtaagattgctgaagaaatgaaaccaagccctttggtaatttcgatattggccaaacttagtggagtgataccttcgtggaaaatcatccctggccaagatatcattgagactgcttttaagcagccagaaatcaggaaacaggttagggaaaatccctactgctacaagggacgtccacgtttgaagactgcttatgagcttttgagggttagcaccgatctcgagaagaggcttaatgaggtttcattaccgttcatagttttgcacggtgaagacgataaagtcacagataaagcggtgagtcgacaactgtatgaagttgcatctagttcggacaagactttcaagttgtaccctgggatgtggcatggtttactctatggagagacaccagagaatatcgagactgtttttgctgacatcattggctggttggataagaaagttgctgatgaaagtggaggctttgaatccgagcttaaacgtaaaaatgatggtattcctttgaaagggtagttatcactttaacataaacaaataaaggatagttaaaatctgtttgtctgtttgtttttctctcttttcctgaattctgtttatgttaattagttgttaccatgtttgtcactctctgacttagtgtaatactatttaataatttatggatttgatttc

SEQ ID NO: 103663 - protein, 343 aa, Arabidopsis thaliana
  peptide (1)..(343): Ceres Seq. ID no. 13613310
  misc_feature (91)..(311): Pfam Name: alpha/beta hydrolase fold Pfam Description: alpha/beta hydrolase fold
  misc_feature (27)..(343): Homolog of NCBI NO: 30687883 NR Description: esterase/lipase/thioesterase family [Arabidopsis >gi|19423964|gb|AAL87258.1| putative phospholipase [Arabidopsis >gi|21689759|gb|AAM67523.1| putative phospholipase [Arabidopsis
  misc_feature (28)..(343): Homolog of NCBI NO: 7487948 NR Description: lysophospholipase homolog F12L6.8 - Arabidopsis >gi|3355471|gb|AAC27833.1| putative phospholipase [Arabidopsis >gi|13877687|gb|AAK43921.1|AF370602_1 putative phospholipase
  misc_feature (27)..(342): Homolog of NCBI NO: 30687879 NR Description: hydrolase, alpha/beta fold family [Arabidopsis >gi|20197113|gb|AAC27832.2| putative phospholipase; alternative
  misc_feature (39)..(342): Homolog of NCBI NO: 7487947 NR Description: lysophospholipase homolog F12L6.7 - Arabidopsis
  misc_feature (34)..(338): Homolog of NCBI NO: 18405038 NR Description: hydrolase, alpha/beta fold family [Arabidopsis >gi|14532652|gb|AAK64054.1| putative phospholipase [Arabidopsis >gi|15450345|gb|AAK96466.1| At2g39400/F12L6.6 [Arabidopsis
  misc_feature (34)..(342): Homolog of NCBI NO: 15233200 NR Description: esterase/lipase/thioesterase family [Arabidopsis
  misc_feature (81)..(338): Homolog of NCBI NO: 7487946 NR Description: probable phospholipase At2g39400 [imported] -
  misc_feature (27)..(321): Homolog of NCBI NO: 15233203 NR Description: esterase/lipase/thioesterase family [Arabidopsis
  misc_feature (35)..(339): Homolog of NCBI NO: 30695682 NR Description: esterase/lipase/thioesterase family [Arabidopsis
  misc_feature (30)..(323): Homolog of NCBI NO: 18407407 NR Description: esterase/lipase/thioesterase family [Arabidopsis >gi|16323214|gb|AAL15341.1| At2g47630/F17A22.2 [Arabidopsis >gi|20196967|gb|AAM14848.1| putative phospholipase [Arabidopsis
DILSKTRSPSNKTRRKRDSDSNLSVGMASETENIKYEESFIKNTRGMKLFTCKWVPAKQEPKALVFICHGYAMECSITMNSTARRLVKAGFAVYGIDYEGHGKSDGLSAYVPNFDHLVDDVSTHYTSICEKEENKGKMRFLLGESMGGAVLLLLHRKKPQFWDGAVLVAPMCKIAEEMKPSPLVISILAKLSGVIPSWKIIPGQDIIETAFKQPEIRKQVRENPYCYKGRPRLKTAYELLRVSTDLEKRLNEVSLPFIVLHGEDDKVTDKAVSRQLYEVASSSDKTFKLYPGMWHGLLYGETPENIETVFADIIGWLDKKVADESGGFESELKRKNDGIPLKG

SEQ ID NO: 103664 - protein, 317 aa, Arabidopsis thaliana
  peptide (1)..(317): Ceres Seq. ID no. 13613311
  misc_feature (65)..(285): Pfam Name: alpha/beta hydrolase fold Pfam Description: alpha/beta hydrolase fold
  misc_feature (1)..(317): Homolog of NCBI NO: 30687883 NR Description: esterase/lipase/thioesterase family [Arabidopsis >gi|19423964|gb|AAL87258.1| putative phospholipase [Arabidopsis >gi|21689759|gb|AAM67523.1| putative phospholipase [Arabidopsis
  misc_feature (2)..(317): Homolog of NCBI NO: 7487948 NR Description: lysophospholipase homolog F12L6.8 - Arabidopsis >gi|3355471|gb|AAC27833.1| putative phospholipase [Arabidopsis >gi|13877687|gb|AAK43921.1|AF370602_1 putative phospholipase
  misc_feature (1)..(316): Homolog of NCBI NO: 30687879 NR Description: hydrolase, alpha/beta fold family [Arabidopsis >gi|20197113|gb|AAC27832.2| putative phospholipase; alternative
  misc_feature (13)..(316): Homolog of NCBI NO: 7487947 NR Description: lysophospholipase homolog F12L6.7 - Arabidopsis
  misc_feature (8)..(312): Homolog of NCBI NO: 18405038 NR Description: hydrolase, alpha/beta fold family [Arabidopsis >gi|14532652|gb|AAK64054.1| putative phospholipase [Arabidopsis >gi|15450345|gb|AAK96466.1| At2g39400/F12L6.6 [Arabidopsis
  misc_feature (8)..(316): Homolog of NCBI NO: 15233200 NR Description: esterase/lipase/thioesterase family [Arabidopsis
  misc_feature (55)..(312): Homolog of NCBI NO: 7487946 NR Description: probable phospholipase At2g39400 [imported] -
  misc_feature (1)..(295): Homolog of NCBI NO: 15233203 NR Description: esterase/lipase/thioesterase family [Arabidopsis
  misc_feature (9)..(313): Homolog of NCBI NO: 30695682 NR Description: esterase/lipase/thioesterase family [Arabidopsis
  misc_feature (4)..(297): Homolog of NCBI NO: 18407407 NR Description: esterase/lipase/thioesterase family [Arabidopsis >gi|16323214|gb|AAL15341.1| At2g47630/F17A22.2 [Arabidopsis >gi|20196967|gb|AAM14848.1| putative phospholipase [Arabidopsis
MASETENIKYEESFIKNTRGMKLFTCKWVPAKQEPKALVFICHGYAMECSITMNSTARRLVKAGFAVYGIDYEGHGKSDGLSAYVPNFDHLVDDVSTHYTSICEKEENKGKMRFLLGESMGGAVLLLLHRKKPQFWDGAVLVAPMCKIAEEMKPSPLVISILAKLSGVIPSWKIIPGQDIIETAFKQPEIRKQVRENPYCYKGRPRLKTAYELLRVSTDLEKRLNEVSLPFIVLHGEDDKVTDKAVSRQLYEVASSSDKTFKLYPGMWHGLLYGETPENIETVFADIIGWLDKKVADESGGFESELKRKNDGIPLKG

SEQ ID NO: 103665 - protein, 297 aa, Arabidopsis thaliana
  peptide (1)..(297): Ceres Seq. ID no. 13613312
  misc_feature (45)..(265): Pfam Name: alpha/beta hydrolase fold Pfam Description: alpha/beta hydrolase fold
  misc_feature (1)..(297): Homolog of NCBI NO: 30687883 NR Description: esterase/lipase/thioesterase family [Arabidopsis >gi|19423964|gb|AAL87258.1| putative phospholipase [Arabidopsis >gi|21689759|gb|AAM67523.1| putative phospholipase [Arabidopsis
  misc_feature (1)..(297): Homolog of NCBI NO: 7487948 NR Description: lysophospholipase homolog F12L6.8 - Arabidopsis >gi|3355471|gb|AAC27833.1| putative phospholipase [Arabidopsis >gi|13877687|gb|AAK43921.1|AF370602_1 putative phospholipase
  misc_feature (1)..(296): Homolog of NCBI NO: 30687879 NR Description: hydrolase, alpha/beta fold family [Arabidopsis >gi|20197113|gb|AAC27832.2| putative phospholipase; alternative
  misc_feature (1)..(296): Homolog of NCBI NO: 7487947 NR Description: lysophospholipase homolog F12L6.7 - Arabidopsis
  misc_feature (1)..(292): Homolog of NCBI NO: 18405038 NR Description: hydrolase, alpha/beta fold family [Arabidopsis >gi|14532652|gb|AAK64054.1| putative phospholipase [Arabidopsis >gi|15450345|gb|AAK96466.1| At2g39400/F12L6.6 [Arabidopsis
  misc_feature (1)..(296): Homolog of NCBI NO: 15233200 NR Description: esterase/lipase/thioesterase family [Arabidopsis
  misc_feature (35)..(292): Homolog of NCBI NO: 7487946 NR Description: probable phospholipase At2g39400 [imported] -
  misc_feature (1)..(275): Homolog of NCBI NO: 15233203 NR Description: esterase/lipase/thioesterase family [Arabidopsis
  misc_feature (1)..(293): Homolog of NCBI NO: 30695682 NR Description: esterase/lipase/thioesterase family [Arabidopsis
  misc_feature (1)..(277): Homolog of NCBI NO: 18407407 NR Description: esterase/lipase/thioesterase family [Arabidopsis >gi|16323214|gb|AAL15341.1| At2g47630/F17A22.2 [Arabidopsis >gi|20196967|gb|AAM14848.1| putative phospholipase [Arabidopsis
MKLFTCKWVPAKQEPKALVFICHGYAMECSITMNSTARRLVKAGFAVYGIDYEGHGKSDGLSAYVPNFDHLVDDVSTHYTSICEKEENKGKMRFLLGESMGGAVLLLLHRKKPQFWDGAVLVAPMCKIAEEMKPSPLVISILAKLSGVIPSWKIIPGQDIIETAFKQPEIRKQVRENPYCYKGRPRLKTAYELLRVSTDLEKRLNEVSLPFIVLHGEDDKVTDKAVSRQLYEVASSSDKTFKLYPGMWHGLLYGETPENIETVFADIIGWLDKKVADESGGFESELKRKNDGIPLKG

SEQ ID NO: 103666 - DNA, 1611 bp, Arabidopsis thaliana
  misc_feature (1)..(1611): Ceres Seq. ID no. 13613323
  misc_feature: MA Experiment ID: 108433 Result: Down-regulated in Transcription
  misc_feature: MA Experiment 108433 PARAMETER Experiment Name: At_rhl_Mutant2_cDNA_P Parameter: Age (day) Value: 7
  misc_feature: MA Experiment 108433 PARAMETER Experiment Name: At_rhl_Mutant2_cDNA_P Parameter: Organism Value: A. thaliana
  misc_feature: MA Experiment 108433 PARAMETER Experiment Name: At_rhl_Mutant2_cDNA_P Parameter: Plant Line Value: rhl Mutant vs. wt landsburg
  misc_feature: MA Experiment 108433 PARAMETER Experiment Name: At_rhl_Mutant2_cDNA_P Parameter: Tissue Value: Roots
  misc_feature: MA Experiment ID: 108573 Result: Up-regulated in Transcription
  misc_feature: MA Experiment 108573 PARAMETER Experiment Name: At_Drought_cDNA_P Parameter: Timepoint (hr) Value: 6
  misc_feature: MA Experiment 108573 PARAMETER Experiment Name: At_Drought_cDNA_P Parameter: Tissue Value: Aerial
  misc_feature: MA Experiment 108573 PARAMETER Experiment Name: At_Drought_cDNA_P Parameter: Treatment Value: Drought vs. No Drought
  misc_feature: MA Experiment ID: 108585 Result: Up-regulated in Transcription
  misc_feature: MA Experiment 108585 PARAMETER Experiment Name: At_5mM_NaNP_cDNA_P Parameter: Timepoint (hr) Value: 6
  misc_feature: MA Experiment 108585 PARAMETER Experiment Name: At_5mM_NaNP_cDNA_P Parameter: Tissue Value: Aerial
  misc_feature: MA Experiment 108585 PARAMETER Experiment Name: At_5mM_NaNP_cDNA_P Parameter: Treatment Value: null
  misc_feature: MA Experiment ID: 20000184 Result: Up-regulated in Transcription
  misc_feature: MA Experiment 20000184 PARAMETER Experiment Name: At_Shoots__P Parameter: Age (day) Value: 7
  misc_feature: MA Experiment 20000184 PARAMETER Experiment Name: At_Shoots__P Parameter: Tissue Value: Shoots vs. Whole Plant
  misc_feature: MA Experiment ID: 20000224 Result: Down-regulated in Transcription
  misc_feature: MA Experiment ID: 20000437 Result: Up-regulated in Transcription
  misc_feature: MA Experiment 20000437 PARAMETER Experiment Name: At_Drought_P Parameter: Age (day) Value: 8
  misc_feature: MA Experiment 20000437 PARAMETER Experiment Name: At_Drought_P Parameter: Organism Value: A. thaliana
  misc_feature: MA Experiment 20000437 PARAMETER Experiment Name: At_Drought_P Parameter: Plant Line Value: WS
  misc_feature: MA Experiment 20000437 PARAMETER Experiment Name: At_Drought_P Parameter: Timepoint (hr) Value: 24
  misc_feature: MA Experiment 20000437 PARAMETER Experiment Name: At_Drought_P Parameter: Tissue Value: Whole Plant
  misc_feature: MA Experiment 20000437 PARAMETER Experiment Name: At_Drought_P Parameter: Treatment Value: Drought vs. No Drought
  misc_feature: MA Experiment ID: 20001247 Result: Up-regulated in Transcription
  misc_feature: MA Experiment 20001247 PARAMETER Experiment Name: At_Far-red-induction_P Parameter: Age (day) Value: 7
  misc_feature: MA Experiment 20001247 PARAMETER Experiment Name: At_Far-red-induction_P Parameter: Light Value: Far-red vs. White
  misc_feature: MA Experiment 20001247 PARAMETER Experiment Name: At_Far-red-induction_P Parameter: Organism Value: A. thaliana
  misc_feature: MA Experiment 20001247 PARAMETER Experiment Name: At_Far-red-induction_P Parameter: Plant Line Value: Columbia
  misc_feature: MA Experiment 20001247 PARAMETER Experiment Name: At_Far-red-induction_P Parameter: Timepoint (hr) Value: 1
  misc_feature: MA Experiment 20001247 PARAMETER Experiment Name: At_Far-red-induction_P Parameter: Tissue Value: Whole Plant
aaattaaaagtcaatcatatcaaatcccaaatcctcccagatgtttttatcatcttcttcttcctgaagatttgatttcattttcctctctttcagatccctattctcatggcttctggatcttactggtgctatagttgtagccgattcgtttgggtttccgattcaatctcttgccctgattgcgacggtggtttcctcgaactcatccaagagcctctcgatttcacaccttccgattccttcaccaccaccaccaccactcaacatcgcagccccactcgcttccctcctccttcttcttcttcctccaccccatccgcttctatgcacgccgataacagtcccactcctaccatcgttactcgtacacgaagcaatcgatctcctaatccagttattgttctccgtggatctgctgctgctccttcttctgatgttgtttccgaaggtttagatcgatctgcttttcagatgtattacgatgatggtactgattctggtcttagacctttaccaccgagtatgactgagtttttgttaggttctggatttgatcgtttgttagatcagatttctcagatcgagcttaacaccaatcggaatcttcgttcttgtgaacatccaccggcttctaaatcggccattgaagctttgcctctgattgaaatcgatccgactcatctcttatcggattctcaatctcattgcgctgtttgcaaagagaatttcgttttgaaatcatctgctcgcgagatgccttgtaatcacatctatcatcctgattgtattcttccttggcttgcgattcgtaactcttgtccggtttgccgtcatgagctaccggcggaggatctcaccgacggaaccggtgctgctttgactgctgttaccgctactgcagaggaagaggaagactcagctgcggggttaacgatttggaggttaccaggtggaggattcgctgtagggagaatccctggtggttggagaggtggagatagaatgatgccggtggtttacacggaggttgatggtggtagactcggtgatgagagacttccgagaagagtagcttggggttcgagaagaggtggaagagatggtggaggtagtagagagagaggtggtggctttgcgggtcggatcatgaggcttttcggatgttttagtggatcatctggatccattgctgctgctgctgctgcatcatccgggtccgggtccagaattcgggttactcgtagaaccaggtcgttctctatgttcagtacggcgtcgtcttcgtcaaggagacgaaattggctagcgtgattactagaattaccaagctctcttctcaggtgaaaactaaacacgaaagaacacactcttcttctgtttaaatttttcctatgttccttattaagtttttgtctatttcagtgtaatgattatattcattcctaaaatttgaatctatgcgagtaaattgatacaaaattaggtgacatagtgtcttcagtggcaaatttaggaggatatgttactgtgagtctgtgactagataagtgagagtgtagatgaattgaagaatgtactctgaaggagattcatagttgttctatttgt

SEQ ID NO: 103667 - protein, 401 aa, Arabidopsis thaliana; identical to SEQ ID NO: 36705
  peptide (1)..(401): Ceres Seq. ID no. 13613324
  misc_feature (201)..(241): Pfam Name: Zinc finger, C3HC4 type (RING finger) Pfam Description: Zinc finger, C3HC4 type (RING finger)
  misc_feature (1)..(401): Homolog of NCBI NO: 18405141 NR Description: RING-H2 finger protein (RHC2a) [Arabidopsis
  misc_feature (3)..(398): Homolog of NCBI NO: 8885559 NR Description: emb|CAB62332.1~gene_id:F2O15.22~strong similarity
  misc_feature (3)..(398): Homolog of NCBI NO: 18424254 NR Description: expressed protein [Arabidopsis thaliana] AT5g59550/f2o15_210 [Arabidopsis thaliana]
  misc_feature (61)..(369): Homolog of NCBI NO: 14719329 NR Description: putative RING-H2 finger protein [Oryza sativa]
  misc_feature (83)..(360): Homolog of NCBI NO: 15232595 NR Description: expressed protein [Arabidopsis thaliana]
  misc_feature (102)..(295): Homolog of NCBI NO: 34902106 NR Description: unknown protein [Oryza sativa (japonica
  misc_feature (149)..(311): Homolog of NCBI NO: 34906008 NR Description: putative RING-H2 finger protein RHC2a [Oryza
  misc_feature (6)..(249): Homolog of NCBI NO: 11994207 NR Description: gene_id:MPN9.20~unknown protein [Arabidopsis
  misc_feature (6)..(249): Homolog of NCBI NO: 15231003 NR Description: expressed protein [Arabidopsis thaliana] AT3g19950/MPN9_19 [Arabidopsis thaliana]
  misc_feature (5)..(273): Homolog of NCBI NO: 18405518 NR Description: RING-H2 finger protein (RHC1a) [Arabidopsis

SEQ ID NO: 103668 - protein, 328 aa, Arabidopsis thaliana; identical to SEQ ID NO: 36706
  peptide (1)..(328): Ceres Seq. ID no. 13613325
  misc_feature (128)..(168): Pfam Name: Zinc finger, C3HC4 type (RING finger) Pfam Description: Zinc finger, C3HC4 type (RING finger)
  misc_feature (1)..(328): Homolog of NCBI NO: 18405141 NR Description: RING-H2 finger protein (RHC2a) [Arabidopsis
  misc_feature (1)..(325): Homolog of NCBI NO: 8885559 NR Description: emb|CAB62332.1~gene_id:F2O15.22~strong similarity
  misc_feature (1)..(325): Homolog of NCBI NO: 18424254 NR Description: expressed protein [Arabidopsis thaliana] AT5g59550/f2o15_210 [Arabidopsis thaliana]
  misc_feature (1)..(296): Homolog of NCBI NO: 14719329 NR Description: putative RING-H2 finger protein [Oryza sativa]
  misc_feature (10)..(287): Homolog of NCBI NO: 15232595 NR Description: expressed protein [Arabidopsis thaliana]
  misc_feature (29)..(222): Homolog of NCBI NO: 34902106 NR Description: unknown protein [Oryza sativa (japonica
  misc_feature (76)..(238): Homolog of NCBI NO: 34906008 NR Description: putative RING-H2 finger protein RHC2a [Oryza
  misc_feature (1)..(176): Homolog of NCBI NO: 11994207 NR Description: gene_id:MPN9.20~unknown protein [Arabidopsis
  misc_feature (1)..(176): Homolog of NCBI NO: 15231003 NR Description: expressed protein [Arabidopsis thaliana] AT3g19950/MPN9_19 [Arabidopsis thaliana]
  misc_feature (1)..(200): Homolog of NCBI NO: 18405518 NR Description: RING-H2 finger protein (RHC1a) [Arabidopsis

SEQ ID NO: 103669 - protein, 279 aa, Arabidopsis thaliana; identical to SEQ ID NO: 36707
  peptide (1)..(279): Ceres Seq. ID no. 13613326
  misc_feature (79)..(119): Pfam Name: Zinc finger, C3HC4 type (RING finger) Pfam Description: Zinc finger, C3HC4 type (RING finger)
  misc_feature (1)..(279): Homolog of NCBI NO: 18405141 NR Description: RING-H2 finger protein (RHC2a) [Arabidopsis
  misc_feature (1)..(276): Homolog of NCBI NO: 8885559 NR Description: emb|CAB62332.1~gene_id:F2O15.22~strong similarity
  misc_feature (1)..(276): Homolog of NCBI NO: 18424254 NR Description: expressed protein [Arabidopsis thaliana] AT5g59550/f2o15_210 [Arabidopsis thaliana]
  misc_feature (1)..(247): Homolog of NCBI NO: 14719329 NR Description: putative RING-H2 finger protein [Oryza sativa]
  misc_feature (1)..(238): Homolog of NCBI NO: 15232595 NR Description: expressed protein [Arabidopsis thaliana]
  misc_feature (1)..(173): Homolog of NCBI NO: 34902106 NR Description: unknown protein [Oryza sativa (japonica
  misc_feature (27)..(189): Homolog of NCBI NO: 34906008 NR Description: putative RING-H2 finger protein RHC2a [Oryza
  misc_feature (1)..(127): Homolog of NCBI NO: 11994207 NR Description: gene_id:MPN9.20~unknown protein [Arabidopsis
  misc_feature (1)..(127): Homolog of NCBI NO: 15231003 NR Description: expressed protein [Arabidopsis thaliana] AT3g19950/MPN9_19 [Arabidopsis thaliana]
  misc_feature (1)..(151): Homolog of NCBI NO: 18405518 NR Description: RING-H2 finger protein (RHC1a) [Arabidopsis

SEQ ID NO: 103670 - DNA, 1478 bp, Arabidopsis thaliana
  misc_feature (1)..(1478): Ceres Seq. ID no. 13613331
  misc_feature: MA Experiment ID: 108464 Result: Down-regulated in Transcription
  misc_feature: MA Experiment 108464 PARAMETER Experiment Name: At_Germinating_Seeds_cDNA_P Parameter: Age (day) Value: 4 vs. 0
  misc_feature: MA Experiment 108464 PARAMETER Experiment Name: At_Germinating_Seeds_cDNA_P Parameter: Tissue Value: Germinating Seeds
tttcccccaaattctcataattttcacaaacaacctctcgtcttctaggttaatccaatttcgtcgattcatgaagttcacaattctcccatcggaaaattcttcgtaatcgacgacgaagagatcatgagtaccgtcggaggtatagagcagttgatacctgattccgtttcaacgtcgttcatcgaaacggtgaacggttcgcaccagttcacgattcaaggttactctctagccaaaggcatgagccctgggaagtttatacagagcgatatcttctccgttggtggatacgattgggcgatttacttctatcctgatgggaagaacccggaggaccagtcctcgtatatctctttgttcatcgctttagcgagtgattctaatgatattagggctttgtttgagcttacgcttatggatcagagtgggaaagggaaacataaggtgcatagtcactttgatcgggcgcttgaaggtggtccttatacacttaagtataaaggaagcatgtggggttacaaacgctttttcaaacgatcagctttagaaacctctgactacttaaaggatgattgtcttgtcatcaattgtactgttggcgttgttagagcccgactcgagggtccaaaacagtatggcattgtgctacccctgtcgaatatgggtcagggattgaaagacttgttagattctgaagttggttgtgacatagctttccaagtcggagatgaaacatacaaagctcacaaactgattctcgcggcacgctccccagtttttagagctcagttttttggaccaattgggaataacaatgtggatagaatagtgatagacgacatcgaaccttctatcttcaaggctatgcttagcttcatttacaccgatgtacttcctaatgtgcatgaaattaccgggtcaacttctgccagttcgtttacaaacatgatacaacatctcttggcagctgctgacctctatgaccttgcaaggttaaagatattatgtgaagttttgctatgcgaaaaacttgatgttgataatgtggcaacaacacttgcgttggctgaacagcaccaattcttacagctcaaagcgttctgcttagaatttgttgcatctccagcaaacttgggagctgtaatgaagtccgaagggttcaagcacttgaaacagagctgtcccactttgttatctgagttgctgaacactgttgcagcagcagataagagctcgacgagtggacaatcaaacaagaaaagaagtgcgagcagtgtattagggtgtgacactacaaatgtgaggcaattgaggaggagaacacgaaaagaagtgcgagcagtgtcttaggatcattacataccgtatgcaaaattctagaattatgcattgtgtttcaagcagagtttatgaattccaagtcatcccgtgaacttttttaccagtgagaattatagaggcctgaactctgaacc

SEQ ID NO: 103671 - protein, 408 aa, Arabidopsis thaliana; identical to SEQ ID NO: 28014
  peptide (1)..(408): Ceres Seq. ID no. 13613332
  misc_feature (184)..(303): Pfam Name: BTB/POZ domain Pfam Description: BTB/POZ domain
  misc_feature (1)..(408): Homolog of NCBI NO: 18405153 NR Description: expressed protein [Arabidopsis thaliana]
  misc_feature (1)..(408): Homolog of NCBI NO: 21595740 NR Description: unknown [Arabidopsis thaliana]
  misc_feature (14)..(404): Homolog of NCBI NO: 34394164 NR Description: putative speckle-type POZ protein [Oryza sativa
  misc_feature (14)..(399): Homolog of NCBI NO: 22531225 NR Description: putative protein [Arabidopsis thaliana]
  misc_feature (13)..(373): Homolog of NCBI NO: 23617108 NR Description: contains ESTs to Arabidopsis thaliana chromosome 5, At5g19000~unknown protein
  misc_feature (1)..(399): Homolog of NCBI NO: 18397497 NR Description: expressed protein [Arabidopsis thaliana] unknown protein [Arabidopsis thaliana] unknown protein [Arabidopsis thaliana]
  misc_feature (12)..(400): Homolog of NCBI NO: 34900034 NR Description: OJ1641_C04.24 [Oryza sativa (japonica >gi|22202734|dbj|BAC07391.1| putative zinc finger POZ domain
  misc_feature (10)..(400): Homolog of NCBI NO: 15242126 NR Description: expressed protein [Arabidopsis thaliana]
  misc_feature (12)..(395): Homolog of NCBI NO: 21536509 NR Description: unknown [Arabidopsis thaliana]
  misc_feature (12)..(395): Homolog of NCBI NO: 30678912 NR Description: expressed protein [Arabidopsis thaliana] unknown protein [Arabidopsis thaliana] AT3g03740/F20H23_23 [Arabidopsis thaliana]

SEQ ID NO: 103672 - protein, 369 aa, Arabidopsis thaliana; identical to SEQ ID NO: 28015
  peptide (1)..(369): Ceres Seq. ID no. 13613333
  misc_feature (145)..(264): Pfam Name: BTB/POZ domain Pfam Description: BTB/POZ domain
  misc_feature (1)..(369): Homolog of NCBI NO: 18405153 NR Description: expressed protein [Arabidopsis thaliana]
  misc_feature (1)..(369): Homolog of NCBI NO: 21595740 NR Description: unknown [Arabidopsis thaliana]
  misc_feature (1)..(365): Homolog of NCBI NO: 34394164 NR Description: putative speckle-type POZ protein [Oryza sativa
  misc_feature (1)..(360): Homolog of NCBI NO: 22531225 NR Description: putative protein [Arabidopsis thaliana]
  misc_feature (1)..(334): Homolog of NCBI NO: 23617108 NR Description: contains ESTs to Arabidopsis thaliana chromosome 5, At5g19000~unknown protein
  misc_feature (1)..(360): Homolog of NCBI NO: 18397497 NR Description: expressed protein [Arabidopsis thaliana] unknown protein [Arabidopsis thaliana] unknown protein [Arabidopsis thaliana]
  misc_feature (1)..(361): Homolog of NCBI NO: 34900034 NR Description: OJ1641_C04.24 [Oryza sativa (japonica >gi|22202734|dbj|BAC07391.1| putative zinc finger POZ domain
  misc_feature (1)..(361): Homolog of NCBI NO: 15242126 NR Description: expressed protein [Arabidopsis thaliana]
  misc_feature (1)..(356): Homolog of NCBI NO: 21536509 NR Description: unknown [Arabidopsis thaliana]
  misc_feature (1)..(356): Homolog of NCBI NO: 30678912 NR Description: expressed protein [Arabidopsis thaliana] unknown protein [Arabidopsis thaliana] AT3g03740/F20H23_23 [Arabidopsis thaliana]

SEQ ID NO: 103673 - protein, 311 aa, Arabidopsis thaliana; identical to SEQ ID NO: 28016
  peptide (1)..(311): Ceres Seq. ID no. 13613334
  misc_feature (87)..(206): Pfam Name: BTB/POZ domain Pfam Description: BTB/POZ domain
  misc_feature (1)..(311): Homolog of NCBI NO: 18405153 NR Description: expressed protein [Arabidopsis thaliana]
  misc_feature (1)..(311): Homolog of NCBI NO: 21595740 NR Description: unknown [Arabidopsis thaliana]
  misc_feature (1)..(307): Homolog of NCBI NO: 34394164 NR Description: putative speckle-type POZ protein [Oryza sativa
  misc_feature (1)..(302): Homolog of NCBI NO: 22531225 NR Description: putative protein [Arabidopsis thaliana]
  misc_feature (1)..(276): Homolog of NCBI NO: 23617108 NR Description: contains ESTs to Arabidopsis thaliana chromosome 5, At5g19000~unknown protein
  misc_feature (1)..(302): Homolog of NCBI NO: 18397497 NR Description: expressed protein [Arabidopsis thaliana] unknown protein [Arabidopsis thaliana] unknown protein [Arabidopsis thaliana]
  misc_feature (1)..(303): Homolog of NCBI NO: 34900034 NR Description: OJ1641_C04.24 [Oryza sativa (japonica >gi|22202734|dbj|BAC07391.1| putative zinc finger POZ domain
  misc_feature (1)..(303): Homolog of NCBI NO: 15242126 NR Description: expressed protein [Arabidopsis thaliana]
  misc_feature (1)..(298): Homolog of NCBI NO: 21536509 NR Description: unknown [Arabidopsis thaliana]
  misc_feature (1)..(298): Homolog of NCBI NO: 30678912 NR Description: expressed protein [Arabidopsis thaliana] unknown protein [Arabidopsis thaliana] AT3g03740/F20H23_23 [Arabidopsis thaliana]

SEQ ID NO: 103674 - DNA, 1240 bp, Arabidopsis thaliana
  misc_feature (1)..(1240): Ceres Seq. ID no. 13613346
  misc_feature: MA Experiment ID: 108434 Result: Up-regulated in Transcription
  misc_feature: MA Experiment 108434 PARAMETER Experiment Name: At_Root_Tips_cDNA_P Parameter: Tissue Value: Root Tips
  misc_feature: MA Experiment ID: 20000264 Result: Up-regulated in Transcription
  misc_feature: MA Experiment 20000264 PARAMETER Experiment Name: At_Open_Flower_P Parameter: Age (day) Value: 21
  misc_feature: MA Experiment 20000264 PARAMETER Experiment Name: At_Open_Flower_P Parameter: Plant Line Value: WS
  misc_feature: MA Experiment 20000264 PARAMETER Experiment Name: At_Open_Flower_P Parameter: Tissue Value: Open Flower vs. Whole Plant
  misc_feature: MA Experiment ID: 20000794 Result: Up-regulated in Transcription
  misc_feature: MA Experiment 20000794 PARAMETER Experiment Name: At_Petals_P Parameter: Age (day) Value: 23-25 days
  misc_feature: MA Experiment 20000794 PARAMETER Experiment Name: At_Petals_P Parameter: Plant Line Value: WS
  misc_feature: MA Experiment 20000794 PARAMETER Experiment Name: At_Petals_P Parameter: Tissue Value: Petals vs. Whole plant
aaagaaataaagtaatgaagaaaactagaaatgttgcttcttctcctattgaatgtgtccacctccagaccaaacccaccaccactcttgttcggtctttcttcttcttcctcttcaactctcaaacaatctcttcctttatcatcttctatctcttcctctgttccttcttctggttttgccaatcaccaaacctgactaacccttctcctcctcctctctccgtcgctccccttcgcggggatgccaattctccaccgccggaatcttcttcttctccggcgacgaaatcttctttaatgatttcttctagagatcccaatgccctctttagcggcggtggaatcagctttttagcaggagttagaactgtgaagtttagttatggttattctagtcttaaaggtaaaagagcaacaatggaggattacttcgaaactagaatctctgatgttaatggacaaatggttgctttctttggtgtctttgatggtcatggtggagcaagaactgcagaatatcttaaaaacaatcttttcaagaatttagttagtcatgatgattttatctcagacactaagaaagctattgttgaagtttttaagcagacagatgaagagtatcttattgaagaggcaggacaaccgaagaatgctggctcgactgctgcgactgcttttcttataggtgataagttgattgttgctaacgttggtgattctagagttgtagcgtcaagaaatggttcagctgttccactctctgatgatcataaacctgatagatcagatgagcgacaacggattgaagatgctggtggctttattatttgggctggaacatggcgagttggtggaattcttgcggtctctcgggcttttggagataagcaacttaagccatatgtgattgcggagccagaaattcaggaggaggatataagcacattggagtttattgttgttgctagtgatggactgtggaatgtgttgtcaaacaaggatgccgtggcaatagtacgagacatttcagatgcggaaacagcagcaagaaagcttgtgcaagaaggttacgcacggggtagctgcgacaatatcacttgcattgttgtacgattcgaggtttcttgagcaagaaccaaattcatattgttcttgttctatgaatgtaccatcttcagctgttgaatacactaacatatttgggttatacaattttataaaagaaagatatatttatg

SEQ ID NO: 103675 - protein, 375 aa, Arabidopsis thaliana; identical to SEQ ID NO: 23002
  peptide (1)..(375): Ceres Seq. ID no. 13613347
  misc_feature (126)..(365): Pfam Name: Protein phosphatase 2C Pfam Description: Protein phosphatase 2C
  misc_feature (5)..(375): Homolog of NCBI NO: 30693757 NR Description: protein phosphatase 2C (PP2C), putative thaliana] >gi|17381034|gb|AAL36329.1| putative protein type 2C [Arabidopsis thaliana] >gi|21436259|gb|AAM51268.1|
  misc_feature (5)..(196): Homolog of NCBI NO: 8778653 NR Description: F9C16.6 [Arabidopsis thaliana]
  misc_feature (197)..(375): Homolog of NCBI NO: 8778653 NR Description: F9C16.6 [Arabidopsis thaliana]
  misc_feature (5)..(196): Homolog of NCBI NO: 7523669 NR Description: Unknown protein [Arabidopsis thaliana]
  misc_feature (197)..(278): Homolog of NCBI NO: 7523669 NR Description: Unknown protein [Arabidopsis thaliana]
  misc_feature (111)..(372): Homolog of NCBI NO: 20146110 NR Description: protein phosphatase 2C [Mesembryanthemum
  misc_feature (97)..(372): Homolog of NCBI NO: 30689144 NR Description: protein phosphatase 2C (PP2C), putative thaliana] >gi|19347765|gb|AAL86334.1| unknown protein thaliana] >gi|22136752|gb|AAM91695.1| unknown protein
  misc_feature (111)..(372): Homolog of NCBI NO: 18416366 NR Description: protein phosphatase 2C (PP2C) -related
  misc_feature (125)..(309): Homolog of NCBI NO: 7486331 NR Description: hypothetical protein F28M20.60 - Arabidopsis >gi|3281853|emb|CAA19748.1| putative protein [Arabidopsis >gi|7270078|emb|CAB79893.1| putative protein [Arabidopsis
  misc_feature (298)..(372): Homolog of NCBI NO: 7486331 NR Description: hypothetical protein F28M20.60 - Arabidopsis >gi|3281853|emb|CAA19748.1| putative protein [Arabidopsis >gi|7270078|emb|CAB79893.1| putative protein [Arabidopsis

SEQ ID NO: 103676 - protein, 371 aa, Arabidopsis thaliana; identical to SEQ ID NO: 23003
  peptide (1)..(371): Ceres Seq. ID no. 13613348
  misc_feature (122)..(361): Pfam Name: Protein phosphatase 2C Pfam Description: Protein phosphatase 2C
  misc_feature (1)..(371): Homolog of NCBI NO: 30693757 NR Description: protein phosphatase 2C (PP2C), putative thaliana] >gi|17381034|gb|AAL36329.1| putative protein type 2C [Arabidopsis thaliana] >gi|21436259|gb|AAM51268.1|
  misc_feature (1)..(192): Homolog of NCBI NO: 8778653 NR Description: F9C16.6 [Arabidopsis thaliana]
  misc_feature (193)..(371): Homolog of NCBI NO: 8778653 NR Description: F9C16.6 [Arabidopsis thaliana]
  misc_feature (1)..(192): Homolog of NCBI NO: 7523669 NR Description: Unknown protein [Arabidopsis thaliana]
  misc_feature (193)..(274): Homolog of NCBI NO: 7523669 NR Description: Unknown protein [Arabidopsis thaliana]
  misc_feature (107)..(368): Homolog of NCBI NO: 20146110 NR Description: protein phosphatase 2C [Mesembryanthemum
  misc_feature (93)..(368): Homolog of NCBI NO: 30689144 NR Description: protein phosphatase 2C (PP2C), putative thaliana] >gi|19347765|gb|AAL86334.1| unknown protein thaliana] >gi|22136752|gb|AAM91695.1| unknown protein
  misc_feature (107)..(368): Homolog of NCBI NO: 18416366 NR Description: protein phosphatase 2C (PP2C) -related
  misc_feature (121)..(305): Homolog of NCBI NO: 7486331 NR Description: hypothetical protein F28M20.60 - Arabidopsis >gi|3281853|emb|CAA19748.1| putative protein [Arabidopsis >gi|7270078|emb|CAB79893.1| putative protein [Arabidopsis
  misc_feature (294)..(368): Homolog of NCBI NO: 7486331 NR Description: hypothetical protein F28M20.60 - Arabidopsis >gi|3281853|emb|CAA19748.1| putative protein [Arabidopsis >gi|7270078|emb|CAB79893.1| putative protein [Arabidopsis

SEQ ID NO: 103677 - protein, 276 aa, Arabidopsis thaliana; identical to SEQ ID NO: 23004
  peptide (1)..(276): Ceres Seq. ID no. 13613349
  misc_feature (27)..(266): Pfam Name: Protein phosphatase 2C Pfam Description: Protein phosphatase 2C
  misc_feature (1)..(276): Homolog of NCBI NO: 30693757 NR Description: protein phosphatase 2C (PP2C), putative thaliana] >gi|17381034|gb|AAL36329.1| putative protein type 2C [Arabidopsis thaliana] >gi|21436259|gb|AAM51268.1|
  misc_feature (1)..(97): Homolog of NCBI NO: 8778653 NR Description: F9C16.6 [Arabidopsis thaliana]
  misc_feature (98)..(276): Homolog of NCBI NO: 8778653 NR Description: F9C16.6 [Arabidopsis thaliana]
  misc_feature (1)..(97): Homolog of NCBI NO: 7523669 NR Description: Unknown protein [Arabidopsis thaliana]
  misc_feature (98)..(179): Homolog of NCBI NO: 7523669 NR Description: Unknown protein [Arabidopsis thaliana]
  misc_feature (12)..(273): Homolog of NCBI NO: 20146110 NR Description: protein phosphatase 2C [Mesembryanthemum
  misc_feature (1)..(273): Homolog of NCBI NO: 30689144 NR Description: protein phosphatase 2C (PP2C), putative thaliana] >gi|19347765|gb|AAL86334.1| unknown protein thaliana] >gi|22136752|gb|AAM91695.1| unknown protein
  misc_feature (12)..(273): Homolog of NCBI NO: 18416366 NR Description: protein phosphatase 2C (PP2C) -related
  misc_feature (26)..(210): Homolog of NCBI NO: 7486331 NR Description: hypothetical protein F28M20.60 - Arabidopsis >gi|3281853|emb|CAA19748.1| putative protein [Arabidopsis >gi|7270078|emb|CAB79893.1| putative protein [Arabidopsis
  misc_feature (199)..(273): Homolog of NCBI NO: 7486331 NR Description: hypothetical protein F28M20.60 - Arabidopsis >gi|3281853|emb|CAA19748.1| putative protein [Arabidopsis >gi|7270078|emb|CAB79893.1| putative protein [Arabidopsis

SEQ ID NO: 103678 - DNA, 2019 bp, Arabidopsis thaliana
  misc_feature (1)..(2019): Ceres Seq. ID no. 13613350
  misc_feature: MA Experiment ID: 108433 Result: Down-regulated in Transcription
  misc_feature: MA Experiment 108433 PARAMETER Experiment Name: At_rhl_Mutant2_cDNA_P Parameter: Age (day) Value: 7
  misc_feature: MA Experiment 108433 PARAMETER Experiment Name: At_rhl_Mutant2_cDNA_P Parameter: Organism Value: A. thaliana
  misc_feature: MA Experiment 108433 PARAMETER Experiment Name: At_rhl_Mutant2_cDNA_P Parameter: Plant Line Value: rhl Mutant vs. wt landsburg
  misc_feature: MA Experiment 108433 PARAMETER Experiment Name: At_rhl_Mutant2_cDNA_P Parameter: Tissue Value: Roots
  misc_feature: MA Experiment ID: 108434 Result: Down-regulated in Transcription
  misc_feature: MA Experiment 108434 PARAMETER Experiment Name: At_Root_Tips_cDNA_P Parameter: Tissue Value: Root Tips
  misc_feature: MA Experiment ID: 108462 Result: Up-regulated in Transcription
  misc_feature: MA Experiment 108462 PARAMETER Experiment Name: At_Germinating_Seeds_cDNA_P Parameter: Age (day) Value: 2 vs. 0
  misc_feature: MA Experiment 108462 PARAMETER Experiment Name: At_Germinating_Seeds_cDNA_P Parameter: Tissue Value: Germinating Seeds
  misc_feature: MA Experiment ID: 108463 Result: Up-regulated in Transcription
  misc_feature: MA Experiment 108463 PARAMETER Experiment Name: At_Germinating_Seeds_cDNA_P Parameter: Age (day) Value: 3 vs. 0
  misc_feature: MA Experiment 108463 PARAMETER Experiment Name: At_Germinating_Seeds_cDNA_P Parameter: Tissue Value: Germinating Seeds
  misc_feature: MA Experiment ID: 108464 Result: Up-regulated in Transcription
  misc_feature: MA Experiment 108464 PARAMETER Experiment Name: At_Germinating_Seeds_cDNA_P Parameter: Age (day) Value: 4 vs. 0
  misc_feature: MA Experiment 108464 PARAMETER Experiment Name: At_Germinating_Seeds_cDNA_P Parameter: Tissue Value: Germinating Seeds
  misc_feature: MA Experiment ID: 108469 Result: Up-regulated in Transcription
  misc_feature: MA Experiment ID: 108573 Result: Up-regulated in Transcription
  misc_feature: MA Experiment 108573 PARAMETER Experiment Name: At_Drought_cDNA_P Parameter: Timepoint (hr) Value: 6
  misc_feature: MA Experiment 108573 PARAMETER Experiment Name: At_Drought_cDNA_P Parameter: Tissue Value: Aerial
  misc_feature: MA Experiment 108573 PARAMETER Experiment Name: At_Drought_cDNA_P Parameter: Treatment Value: Drought vs. No Drought
  misc_feature: MA Experiment ID: 108574 Result: Up-regulated in Transcription
  misc_feature: MA Experiment 108574 PARAMETER Experiment Name: At_Wounding__cDNA_P Parameter: Timepoint (hr) Value: 1
  misc_feature: MA Experiment 108574 PARAMETER Experiment Name: At_Wounding__cDNA_P Parameter: Tissue Value: Aerial
  misc_feature: MA Experiment 108574 PARAMETER Experiment Name: At_Wounding__cDNA_P Parameter: Treatment Value: Wounding vs. No Wounding
  misc_feature: MA Experiment ID: 108585 Result: Up-regulated in Transcription
  misc_feature: MA Experiment 108585 PARAMETER Experiment Name: At_5mM_NaNP_cDNA_P Parameter: Timepoint (hr) Value: 6
  misc_feature: MA Experiment 108585 PARAMETER Experiment Name: At_5mM_NaNP_cDNA_P Parameter: Tissue Value: Aerial
  misc_feature: MA Experiment 108585 PARAMETER Experiment Name: At_5mM_NaNP_cDNA_P Parameter: Treatment Value: null
  misc_feature: MA Experiment ID: 108668 Result: Up-regulated in Transcription
  misc_feature: MA Experiment 108668 PARAMETER Experiment Name: At_2mM_SA_cDNA_P Parameter: Plant Line Value: WS
  misc_feature: MA Experiment 108668 PARAMETER Experiment Name: At_2mM_SA_cDNA_P Parameter: Timepoint (hr) Value: 6
  misc_feature: MA Experiment 108668 PARAMETER Experiment Name: At_2mM_SA_cDNA_P Parameter: Treatment Value: 2mM SA vs. No Treatment
  misc_feature: MA Experiment ID: 20000179 Result: Up-regulated in Transcription
  misc_feature: MA Experiment 20000179 PARAMETER Experiment Name: At_Germinating_Seeds_P Parameter: Age (hr) Value: 6 vs. 0
  misc_feature: MA Experiment 20000179 PARAMETER Experiment Name: At_Germinating_Seeds_P Parameter: Tissue Value: Germinating Seeds
  misc_feature: MA Experiment ID: 20000182 Result: Up-regulated in Transcription
  misc_feature: MA Experiment 20000182 PARAMETER Experiment Name: At_2mM_SA_P Parameter: Age (day) Value: 14
  misc_feature: MA Experiment 20000182 PARAMETER Experiment Name: At_2mM_SA_P Parameter: Organism Value: A. thaliana
  misc_feature: MA Experiment 20000182 PARAMETER Experiment Name: At_2mM_SA_P Parameter: Plant Line Value: WS
  misc_feature: MA Experiment 20000182 PARAMETER Experiment Name: At_2mM_SA_P Parameter: Timepoint (hr) Value: 6
  misc_feature: MA Experiment 20000182 PARAMETER Experiment Name: At_2mM_SA_P Parameter: Tissue Value: Aerial
  misc_feature: MA Experiment 20000182 PARAMETER Experiment Name: At_2mM_SA_P Parameter: Treatment Value: 2mM SA vs. No Treatment
  misc_feature: MA Experiment ID: 20000185 Result: Down-regulated in Transcription
  misc_feature: MA Experiment 20000185 PARAMETER Experiment Name: At_Roots__P Parameter: Age (day) Value: 7 vs. 21
  misc_feature: MA Experiment 20000185 PARAMETER Experiment Name: At_Roots__P Parameter: Organism Value: A. thaliana
  misc_feature: MA Experiment 20000185 PARAMETER Experiment Name: At_Roots__P Parameter: Tissue Value: Roots vs. Whole Plant
  misc_feature: MA Experiment ID: 20000211 Result: Up-regulated in Transcription
  misc_feature: MA Experiment 20000211 PARAMETER Experiment Name: At_0.001percent_MeJA__P Parameter: Age (day) Value: 14
  misc_feature: MA Experiment 20000211 PARAMETER Experiment Name: At_0.001percent_MeJA__P Parameter: Organism Value: A. thaliana
  misc_feature: MA Experiment 20000211 PARAMETER Experiment Name: At_0.001percent_MeJA__P Parameter: Plant Line Value: WS
  misc_feature: MA Experiment 20000211 PARAMETER Experiment Name: At_0.001percent_MeJA__P Parameter: Timepoint (hr) Value: 1
  misc_feature: MA Experiment 20000211 PARAMETER Experiment Name: At_0.001percent_MeJA__P Parameter: Tissue Value: Aerial
  misc_feature: MA Experiment 20000211 PARAMETER Experiment Name: At_0.001percent_MeJA__P Parameter: Treatment Value: 0.001percent MeJA vs. No Treatment
  misc_feature: MA Experiment ID: 20000439 Result: Down-regulated in Transcription
  misc_feature: MA Experiment 20000439 PARAMETER Experiment Name: At_Roots__P Parameter: Age (day) Value: 14 vs. 21
  misc_feature: MA Experiment 20000439 PARAMETER Experiment Name: At_Roots__P Parameter: Organism Value: A. thaliana
  misc_feature: MA Experiment 20000439 PARAMETER Experiment Name: At_Roots__P Parameter: Tissue Value: Roots vs. Whole Plant
  misc_feature: MA Experiment ID: 20000496 Result: Down-regulated in Transcription
  misc_feature: MA Experiment 20000496 PARAMETER Experiment Name: At_Guard_Cells_P Parameter: Harvest Date Value: 7/19/2002
  misc_feature: MA Experiment 20000496 PARAMETER Experiment Name: At_Guard_Cells_P Parameter: Organism Value: Canola
  misc_feature: MA Experiment 20000496 PARAMETER Experiment Name: At_Guard_Cells_P Parameter: Tissue Value: Guard Cells vs. Leaves
  misc_feature: MA Experiment ID: 20000573 Result: Up-regulated in Transcription
  misc_feature: MA Experiment 20000573 PARAMETER Experiment Name: At_100uM_ABA_Mutants__P Parameter: Organism Value: A. thaliana
  misc_feature: MA Experiment 20000573 PARAMETER Experiment Name: At_100uM_ABA_Mutants__P Parameter: Plant Line Value: CS22 vs. Ler wt
  misc_feature: MA Experiment 20000573 PARAMETER Experiment Name: At_100uM_ABA_Mutants__P Parameter: Timepoint (hr) Value: N/A
  misc_feature: MA Experiment 20000573 PARAMETER Experiment Name: At_100uM_ABA_Mutants__P Parameter: Tissue Value: Whole Plant
  misc_feature: MA Experiment 20000573 PARAMETER Experiment Name: At_100uM_ABA_Mutants__P Parameter: Treatment Value: None
  misc_feature: MA Experiment ID: 20000574 Result: Up-regulated in Transcription
  misc_feature: MA Experiment 20000574 PARAMETER Experiment Name: At_100uM_ABA_Mutants__P Parameter: Organism Value: A. thaliana
  misc_feature: MA Experiment 20000574 PARAMETER Experiment Name: At_100uM_ABA_Mutants__P Parameter: Plant Line Value: CS23 vs. Ler wt
  misc_feature: MA Experiment 20000574 PARAMETER Experiment Name: At_100uM_ABA_Mutants__P Parameter: Timepoint (hr) Value: N/A
  misc_feature: MA Experiment 20000574 PARAMETER Experiment Name: At_100uM_ABA_Mutants__P Parameter: Tissue Value: Whole Plant
  misc_feature: MA Experiment 20000574 PARAMETER Experiment Name: At_100uM_ABA_Mutants__P Parameter: Treatment Value: None
  misc_feature: MA Experiment ID: 20000709 Result: Up-regulated in Transcription
  misc_feature: MA Experiment 20000709 PARAMETER Experiment Name: At_15mM_NH4NO3_L-to-H_P Parameter: Age (hr) Value: 14
  misc_feature: MA Experiment 20000709 PARAMETER Experiment Name: At_15mM_NH4NO3_L-to-H_P Parameter: Organism Value: A. thaliana
  misc_feature: MA Experiment 20000709 PARAMETER Experiment Name: At_15mM_NH4NO3_L-to-H_P Parameter: Plant Line Value: WS
  misc_feature: MA Experiment 20000709 PARAMETER Experiment Name: At_15mM_NH4NO3_L-to-H_P Parameter: Timepoint (hr) Value: 4
  misc_feature: MA Experiment 20000709 PARAMETER Experiment Name: At_15mM_NH4NO3_L-to-H_P Parameter: Tissue Value: Aerial
  misc_feature: MA Experiment 20000709 PARAMETER Experiment Name: At_15mM_NH4NO3_L-to-H_P Parameter: Treatment Value: 15mM NH4NO3 vs. 30mM Mannitol
  misc_feature: MA Experiment ID: 20001248 Result: Up-regulated in Transcription
  misc_feature: MA Experiment 20001248 PARAMETER Experiment Name: At_Far-red-induction_P Parameter: Age (day) Value: 7
  misc_feature: MA Experiment 20001248 PARAMETER Experiment Name: At_Far-red-induction_P Parameter: Light Value: Far-red vs. White
  misc_feature: MA Experiment 20001248 PARAMETER Experiment Name: At_Far-red-induction_P Parameter: Organism Value: A. thaliana
  misc_feature: MA Experiment 20001248 PARAMETER Experiment Name: At_Far-red-induction_P Parameter: Plant Line Value: Columbia
  misc_feature: MA Experiment 20001248 PARAMETER Experiment Name: At_Far-red-induction_P Parameter: Timepoint (hr) Value: 4
  misc_feature: MA Experiment 20001248 PARAMETER Experiment Name: At_Far-red-induction_P Parameter: Tissue Value: Whole Plant
  misc_feature: MA Experiment ID: 20001450 Result: Up-regulated in Transcription
  misc_feature: MA Experiment 20001450 PARAMETER Experiment Name: At_Far-red-induction_P Parameter: Age (day) Value: 7
  misc_feature: MA Experiment 20001450 PARAMETER Experiment Name: At_Far-red-induction_P Parameter: Light Value: Far-red vs. White
  misc_feature: MA Experiment 20001450 PARAMETER Experiment Name: At_Far-red-induction_P Parameter: Organism Value: A. thaliana
  misc_feature: MA Experiment 20001450 PARAMETER Experiment Name: At_Far-red-induction_P Parameter: Plant Line Value: Columbia
  misc_feature: MA Experiment 20001450 PARAMETER Experiment Name: At_Far-red-induction_P Parameter: Timepoint (hr) Value: 8
  misc_feature: MA Experiment 20001450 PARAMETER Experiment Name: At_Far-red-induction_P Parameter: Tissue Value: Whole Plant
  misc_feature: MA Experiment ID: 20001504 Result: Down-regulated in Transcription
  misc_feature: MA Experiment 20001504 PARAMETER Experiment Name: At_Far-red-enriched_P Parameter: Age (day) Value: 10
  misc_feature: MA Experiment 20001504 PARAMETER Experiment Name: At_Far-red-enriched_P Parameter: Light Value: Far-red enriched vs. White
  misc_feature: MA Experiment 20001504 PARAMETER Experiment Name: At_Far-red-enriched_P Parameter: Organism Value: A. thaliana
  misc_feature: MA Experiment 20001504 PARAMETER Experiment Name: At_Far-red-enriched_P Parameter: Plant Line Value: Columbia
  misc_feature: MA Experiment 20001504 PARAMETER Experiment Name: At_Far-red-enriched_P Parameter: Timepoint (day) Value: 6
  misc_feature: MA Experiment 20001504 PARAMETER Experiment Name: At_Far-red-enriched_P Parameter: Tissue Value: Whole Plant
atcctctctcttcactcagcatccttttataaccaaaacaaactttatctccctctctctctctcacagacaagaacacaaagttatggacaatctccggaaacttaatcttctctctgtctctctaaccataatctttgtctctcttaccatagccaccaacttacctttctttgaagtgaaatatcccaacaacaacccttttgggatgttactacggccgacaccgatcaagaaccaatccttgggtctaccggctcatgtcgggtcagatgagtgtcgggtttggaccaaagcatgttctgatgagattcttaggctgacttatcagccggataacgttgcgtggcttaaacgcgttaggaggacgatccatgagaacccggagctagcgtttgaggagtatgagactagtaggcttattaggtcggagctggaccgtatgggtatcatgtatagatatccgttagcgaaaacgggtattcgggcttggatcggatccggtggaccgccttttgttgcggttcgggctgatatggacgcactacctattcaggaagcagttgaatgggaacatataagcaaagttgcaggcaaaatgcatgcatgtggtcatgacgcacatgtgactatgcttcttggtgctgcccatattcttaaggctcgtgaacatcttctcaagggaacagtggttctgttattccaaccggctgaagaagctggaaatggtgcaaagaatatgatcgaagacggagctttggatgacgtggaggctatcttcgcggtccatgtgtcccatatccatccaacgggtgtgattggatcaagaagtggtcctttgctcgcgggatgtggaattttccgggcggttatcacttcggaagatagccgtggcgccgctaatctccttcttgcagcttcttccgcggtcattagtcttcaaggcattgtatcccgtgaagctagtcctcttgactctcaggttgtgtcggttacttcatttgatggcggtcatagtctcgatgtggcgccggacacggtggtcctcggtggtactttcagagctttttctaactcaagcttctactacctcaagaaacgtattcaagaggtactcatggatcaggtcggggttttcggttgccaagcgacagtgaacttctttgagaagcagaatgcgatatacccgccaactacgaacaatgatgcaacatacaatcacttgaagaaagtcaccatagatttgctcggagatagccatttcaccttggctccacagatgatgggagccgaagatttcgccttctactcagaaatcatcccagccgctttctacttcattggcataagaaatgaagaactcggatcagtccacattgctcattcaccacatttcatgatcgatgaagatagtttacccgttggagccgcggttcatgccgccgtggctgagagatacttaaatgataaacattcataagagtaaaaacaatctccccggcttttttttgggtggttatatttctaggcgttacggaaattatattgttcttaatctatctttgcttggaaatgtttgtgaagagtagtttttttttttaaacgtgtaaaccgcatattgcatatggtgtatggattttagctaaagaggttagagtaaaagatagctagcggtacaaaatcttagacaactattttcttgatatcatgaaatatttggacgtttgagtatttgctacgaaattgtattaccatgtgattattaaggtttatattgacaacagaggtttcatatgtgattattagcttgtaagtgaaacaaagaaaagtaacgtcaattgaagataactgcaaggttgacaatttccaaagtccaagaagaaaattacggaatccgaaagcatacaaacgaggaagattttcaagattttaggtcataattttcttggttcgtgtgggatattaatttttgggtactttctaaggattgataaactataatatctctttttagcatct

SEQ ID NO: 103679 - protein, 492 aa, Arabidopsis thaliana; identical to SEQ ID NO: 21893
  peptide (1)..(492): Ceres Seq. ID no. 13613351
  misc_feature (114)..(488): Pfam Name: Peptidase family M20/M25/M40 Pfam Description: Peptidase family M20/M25/M40
  misc_feature (29)..(492): Homolog of NCBI NO: 15219390 NR Description: gr1 protein [Arabidopsis thaliana]
  misc_feature (29)..(492): Homolog of NCBI NO: 3559811 NR Description: gr1-protein [Arabidopsis thaliana]
  misc_feature (52)..(492): Homolog of NCBI NO: 17978838 NR Description: IAA-amino acid conjugate hydrolase-like protein
  misc_feature (103)..(490): Homolog of NCBI NO: 34910396 NR Description: putative IAA-Ala hydrolase [Oryza sativa
  misc_feature (104)..(487): Homolog of NCBI NO: 34914096 NR Description: putative IAA-Ala hydrolase [Oryza sativa
  misc_feature (104)..(487): Homolog of NCBI NO: 27948556 NR Description: IAA-amino acid hydrolase [Oryza sativa (indica
  misc_feature (103)..(487): Homolog of NCBI NO: 15218027 NR Description: IAA-Ala hydrolase (IAR3) [Arabidopsis thaliana]
  misc_feature (97)..(492): Homolog of NCBI NO: 15241894 NR Description: IAA-amino acid hydrolase 2 (ILL2) [Arabidopsis
  misc_feature (97)..(492): Homolog of NCBI NO: 18175667 NR Description: IAA-amino acid hydrolase [Arabidopsis thaliana]
  misc_feature (97)..(492): Homolog of NCBI NO: 902791 NR Description: ILL2

SEQ ID NO: 103680 - protein, 464 aa, Arabidopsis thaliana; identical to SEQ ID NO: 21894
  peptide (1)..(464): Ceres Seq. ID no. 13613352
  misc_feature (86)..(460): Pfam Name: Peptidase family M20/M25/M40 Pfam Description: Peptidase family M20/M25/M40
  misc_feature (1)..(464): Homolog of NCBI NO: 15219390 NR Description: gr1 protein [Arabidopsis thaliana]
  misc_feature (1)..(464): Homolog of NCBI NO: 3559811 NR Description: gr1-protein [Arabidopsis thaliana]
  misc_feature (24)..(464): Homolog of NCBI NO: 17978838 NR Description: IAA-amino acid conjugate hydrolase-like protein
  misc_feature (75)..(462): Homolog of NCBI NO: 34910396 NR Description: putative IAA-Ala hydrolase [Oryza sativa
  misc_feature (76)..(459): Homolog of NCBI NO: 34914096 NR Description: putative IAA-Ala hydrolase [Oryza sativa
  misc_feature (76)..(459): Homolog of NCBI NO: 27948556 NR Description: IAA-amino acid hydrolase [Oryza sativa (indica
  misc_feature (75)..(459): Homolog of NCBI NO: 15218027 NR Description: IAA-Ala hydrolase (IAR3) [Arabidopsis thaliana]
  misc_feature (69)..(464): Homolog of NCBI NO: 15241894 NR Description: IAA-amino acid hydrolase 2 (ILL2) [Arabidopsis
  misc_feature (69)..(464): Homolog of NCBI NO: 18175667 NR Description: IAA-amino acid hydrolase [Arabidopsis thaliana]
  misc_feature (69)..(464): Homolog of NCBI NO: 902791 NR Description: ILL2

SEQ ID NO: 103681 - protein, 423 aa, Arabidopsis thaliana; identical to SEQ ID NO: 21895
  peptide (1)..(423): Ceres Seq. ID no. 13613353
  misc_feature (45)..(419): Pfam Name: Peptidase family M20/M25/M40 Pfam Description: Peptidase family M20/M25/M40
  misc_feature (1)..(423): Homolog of NCBI NO: 15219390 NR Description: gr1 protein [Arabidopsis thaliana]
  misc_feature (1)..(423): Homolog of NCBI NO: 3559811 NR Description: gr1-protein [Arabidopsis thaliana]
  misc_feature (1)..(423): Homolog of NCBI NO: 17978838 NR Description: IAA-amino acid conjugate hydrolase-like protein
  misc_feature (34)..(421): Homolog of NCBI NO: 34910396 NR Description: putative IAA-Ala hydrolase [Oryza sativa
  misc_feature (35)..(418): Homolog of NCBI NO: 34914096 NR Description: putative IAA-Ala hydrolase [Oryza sativa
  misc_feature (35)..(418): Homolog of NCBI NO: 27948556 NR Description: IAA-amino acid hydrolase [Oryza sativa (indica
  misc_feature (34)..(418): Homolog of NCBI NO: 15218027 NR Description: IAA-Ala hydrolase (IAR3) [Arabidopsis thaliana]
  misc_feature (28)..(423): Homolog of NCBI NO: 15241894 NR Description: IAA-amino acid hydrolase 2 (ILL2) [Arabidopsis
  misc_feature (28)..(423): Homolog of NCBI NO: 18175667 NR Description: IAA-amino acid hydrolase [Arabidopsis thaliana]
  misc_feature (28)..(423): Homolog of NCBI NO: 902791 NR Description: ILL2

SEQ ID NO: 103682 - DNA, 1090 bp, Arabidopsis thaliana
  misc_feature (1)..(1090): Ceres Seq. ID no. 13613358
  misc_feature: MA Experiment ID: 108488 Result: Down-regulated in Transcription
  misc_feature: MA Experiment ID: 108561 Result: Up-regulated in Transcription
  misc_feature: MA Experiment 108561 PARAMETER Experiment Name: At_100uM_ABA_cDNA_P Parameter: Timepoint (hr) Value: 6
  misc_feature: MA Experiment 108561 PARAMETER Experiment Name: At_100uM_ABA_cDNA_P Parameter: Tissue Value: Aerial
  misc_feature: MA Experiment 108561 PARAMETER Experiment Name: At_100uM_ABA_cDNA_P Parameter: Treatment Value: 100uM ABA vs. No Treatment
  misc_feature: MA Experiment ID: 108572 Result: Up-regulated in Transcription
  misc_feature: MA Experiment 108572 PARAMETER Experiment Name: At_Drought_cDNA_P Parameter: Timepoint (hr) Value: 1
  misc_feature: MA Experiment 108572 PARAMETER Experiment Name: At_Drought_cDNA_P Parameter: Tissue Value: Aerial
  misc_feature: MA Experiment 108572 PARAMETER Experiment Name: At_Drought_cDNA_P Parameter: Treatment Value: Drought vs. No Drought
  misc_feature: MA Experiment ID: 108573 Result: Up-regulated in Transcription
  misc_feature: MA Experiment 108573 PARAMETER Experiment Name: At_Drought_cDNA_P Parameter: Timepoint (hr) Value: 6
  misc_feature: MA Experiment 108573 PARAMETER Experiment Name: At_Drought_cDNA_P Parameter: Tissue Value: Aerial
  misc_feature: MA Experiment 108573 PARAMETER Experiment Name: At_Drought_cDNA_P Parameter: Treatment Value: Drought vs. No Drought
  misc_feature: MA Experiment ID: 108595 Result: Down-regulated in Transcription
  misc_feature: MA Experiment 108595 PARAMETER Experiment Name: At_Ler-pi_Ovule_cDNA_P Parameter: Plant Line Value: null
  misc_feature: MA Experiment ID: 20000224 Result: Down-regulated in Transcription
  misc_feature: MA Experiment ID: 20000794 Result: Up-regulated in Transcription
  misc_feature: MA Experiment 20000794 PARAMETER Experiment Name: At_Petals_P Parameter: Age (day) Value: 23-25 days
  misc_feature: MA Experiment 20000794 PARAMETER Experiment Name: At_Petals_P Parameter: Plant Line Value: WS
  misc_feature: MA Experiment 20000794 PARAMETER Experiment Name: At_Petals_P Parameter: Tissue Value: Petals vs. Whole plant
  misc_feature: MA Experiment ID: 20001557 Result: Down-regulated in Transcription
  misc_feature: MA Experiment 20001557 PARAMETER Experiment Name: At_Drought_Soil_Dry_P Parameter: Age (day) Value: 27
  misc_feature: MA Experiment 20001557 PARAMETER Experiment Name: At_Drought_Soil_Dry_P Parameter: Organism Value: A. thaliana
  misc_feature: MA Experiment 20001557 PARAMETER Experiment Name: At_Drought_Soil_Dry_P Parameter: Plant Line Value: WS
  misc_feature: MA Experiment 20001557 PARAMETER Experiment Name: At_Drought_Soil_Dry_P Parameter: Post Timepoint (hr) Value: 3
  misc_feature: MA Experiment 20001557 PARAMETER Experiment Name: At_Drought_Soil_Dry_P Parameter: Post-Treatment Value: Re-Water vs. No Drought
  misc_feature: MA Experiment 20001557 PARAMETER Experiment Name: At_Drought_Soil_Dry_P Parameter: Timepoint (day) Value: 13
  misc_feature: MA Experiment 20001557 PARAMETER Experiment Name: At_Drought_Soil_Dry_P Parameter: Treatment Value: Drought vs. No Drought
  misc_feature: MA Experiment ID: 20001558 Result: Down-regulated in Transcription
  misc_feature: MA Experiment 20001558 PARAMETER Experiment Name: At_Drought_Soil_Dry_P Parameter: Age (day) Value: 27
  misc_feature: MA Experiment 20001558 PARAMETER Experiment Name: At_Drought_Soil_Dry_P Parameter: Organism Value: A. thaliana
  misc_feature: MA Experiment 20001558 PARAMETER Experiment Name: At_Drought_Soil_Dry_P Parameter: Plant Line Value: WS
  misc_feature: MA Experiment 20001558 PARAMETER Experiment Name: At_Drought_Soil_Dry_P Parameter: Post Timepoint (hr) Value: 6
  misc_feature: MA Experiment 20001558 PARAMETER Experiment Name: At_Drought_Soil_Dry_P Parameter: Post-Treatment Value: Re-Water vs. No Drought
  misc_feature: MA Experiment 20001558 PARAMETER Experiment Name: At_Drought_Soil_Dry_P Parameter: Timepoint (day) Value: 13
  misc_feature: MA Experiment 20001558 PARAMETER Experiment Name: At_Drought_Soil_Dry_P Parameter: Treatment Value: Drought vs. No Drought
  misc_feature: MA Experiment ID: 20001560 Result: Down-regulated in Transcription
  misc_feature: MA Experiment 20001560 PARAMETER Experiment Name: At_Drought_Soil_Dry_P Parameter: Age (day) Value: 28
  misc_feature: MA Experiment 20001560 PARAMETER Experiment Name: At_Drought_Soil_Dry_P Parameter: Organism Value: A. thaliana
  misc_feature: MA Experiment 20001560 PARAMETER Experiment Name: At_Drought_Soil_Dry_P Parameter: Plant Line Value: WS
  misc_feature: MA Experiment 20001560 PARAMETER Experiment Name: At_Drought_Soil_Dry_P Parameter: Post Timepoint (hr) Value: None
  misc_feature: MA Experiment 20001560 PARAMETER Experiment Name: At_Drought_Soil_Dry_P Parameter: Post-Treatment Value: None
  misc_feature: MA Experiment 20001560 PARAMETER Experiment Name: At_Drought_Soil_Dry_P Parameter: Timepoint (day) Value: 14
  misc_feature: MA Experiment 20001560 PARAMETER Experiment Name: At_Drought_Soil_Dry_P Parameter: Treatment Value: Drought vs. No Drought
aaacgacaagtagtttcctttagaatttatcattatccagattttcgagaaggagacggtgaagaagaagaagaagatcaaaaccatgacgagtcaccacgcgatcgaagtgacgaagacggtgctggaagtagccgacgtagcatggaccgcggtggaaacttaccatcaccaccaccaccaccaagacgaaaatcacgagtcaacgaatccaatttctgatccacgagatcgtgaattagaagctcttcgtcaagagaatcgtcgtctcaggactttgcttgaatcgaatcttaaactctttgagactctcgctgaatctgctgcgttctctcatgattgccctagcgacctctatgctaggcttgtaacgatggttacttcaagagatttcttggctagattagagaatctaagacaagctttatctaatggaactcagaatcaatttccattcaaggaaccaacagaagatgatgtgaagactgttgaagttcttatagagatggatcatcaagagccaagttggtgggttttagttactgatgatatggttcctagtaatgtcgaggaacaaagcgcgatcgataacgaacattacattgttgtgaatgaagaacatgtgattgatgctgttgctcactttttggctaaatgtattatgtcaaatcccaaagctaagaatctcaaacctgaagagcttcagaaacttttggtgcaagaagttactgctctgagcaaggtagggaaggtagtggatatatggcatgctgggaaaatgttctacacactgtccacttggggacttgcatttggagggttataccaagctcgtggtgtgctgaagatagctgctaagggtgttcatgcgaccagcaaggttgttcttagggctctttgaaagttataagaggtctatctaatactatctttgggtttgtctttctgtgcgagactctgtttttaaattaatagcattgcgtgtgtaaatagtgtaaatagggtttgatcaatgttgtatttcatattgatttcaaattcgacatttgttctttgattctcgtttataaacgcagacaatttgtgaata

SEQ ID NO: 103683 - protein, 271 aa, Arabidopsis thaliana
  peptide (1)..(271): Ceres Seq. ID no. 13613359
  misc_feature (1)..(271): Homolog of NCBI NO: 15219442 NR Description: expressed protein [Arabidopsis thaliana]
  misc_feature (1)..(271): Homolog of NCBI NO: 25373234 NR Description: hypothetical protein T12C22.4 [imported] - thaliana >gi|8655987|gb|AAF78260.1|AC020576_4 Contains weak to tail completion gi|5354213 from coliphage T4 gb|AF158101. ESTs
  misc_feature (7)..(259): Homolog of NCBI NO: 19033559 NR Description: putative growth factor [Oryza sativa (japonica
  misc_feature (147)..(267): Homolog of NCBI NO: 30695733 NR Description: expressed protein [Arabidopsis thaliana]
  misc_feature (124)..(267): Homolog of NCBI NO: 30686591 NR Description: expressed protein [Arabidopsis thaliana]
MTSHHAIEVTKTVLEVADVAWTAVETYHHHHHHQDENHESTNPISDPRDRELEALRQENRRLRTLLESNLKLFETLAESAAFSHDCPSDLYARLVTMVTSRDFLARLENLRQALSNGTQNQFPFKEPTEDDVKTVEVLIEMDHQEPSWWVLVTDDMVPSNVEEQSAIDNEHYIVVNEEHVIDAVAHFLAKCIMSNPKAKNLKPEELQKLLVQEVTALSKVGKVVDIWHAGKMFYTLSTWGLAFGGLYQARGVLKIAAKGVHATSKVVLRAL

SEQ ID NO: 103684 - protein, 175 aa, Arabidopsis thaliana
  peptide (1)..(175): Ceres Seq. ID no. 13613360
  misc_feature (1)..(175): Homolog of NCBI NO: 15219442 NR Description: expressed protein [Arabidopsis thaliana]
  misc_feature (1)..(175): Homolog of NCBI NO: 25373234 NR Description: hypothetical protein T12C22.4 [imported] - thaliana >gi|8655987|gb|AAF78260.1|AC020576_4 Contains weak to tail completion gi|5354213 from coliphage T4 gb|AF158101. ESTs
  misc_feature (1)..(163): Homolog of NCBI NO: 19033559 NR Description: putative growth factor [Oryza sativa (japonica
  misc_feature (51)..(171): Homolog of NCBI NO: 30695733 NR Description: expressed protein [Arabidopsis thaliana]
  misc_feature (28)..(171): Homolog of NCBI NO: 30686591 NR Description: expressed protein [Arabidopsis thaliana]
MVTSRDFLARLENLRQALSNGTQNQFPFKEPTEDDVKTVEVLIEMDHQEPSWWVLVTDDMVPSNVEEQSAIDNEHYIVVNEEHVIDAVAHFLAKCIMSNPKAKNLKPEELQKLLVQEVTALSKVGKVVDIWHAGKMFYTLSTWGLAFGGLYQARGVLKIAAKGVHATSKVVLRAL

SEQ ID NO: 103685 - DNA, 808 bp, Arabidopsis thaliana
  misc_feature (1)..(808): Ceres Seq. ID no. 13613361
  misc_feature: MA Experiment ID: 108461 Result: Up-regulated in Transcription
  misc_feature: MA Experiment 108461 PARAMETER Experiment Name: At_Germinating_Seeds_cDNA_P Parameter: Age (day) Value: 1 vs. 0
  misc_feature: MA Experiment 108461 PARAMETER Experiment Name: At_Germinating_Seeds_cDNA_P Parameter: Tissue Value: Germinating Seeds
  misc_feature: MA Experiment ID: 20000072 Result: Up-regulated in Transcription
  misc_feature: MA Experiment 20000072 PARAMETER Experiment Name: At_100uM_ABA_Mutants_cDNA_P Parameter: Plant Line Value: CS8105
  misc_feature: MA Experiment 20000072 PARAMETER Experiment Name: At_100uM_ABA_Mutants_cDNA_P Parameter: Timepoint (hr) Value: 6
  misc_feature: MA Experiment 20000072 PARAMETER Experiment Name: At_100uM_ABA_Mutants_cDNA_P Parameter: Tissue Value: Aerial
  misc_feature: MA Experiment 20000072 PARAMETER Experiment Name: At_100uM_ABA_Mutants_cDNA_P Parameter: Treatment Value: 100uM ABA vs. No Treatment
  misc_feature: MA Experiment ID: 20000111 Result: Down-regulated in Transcription
  misc_feature: MA Experiment 20000111 PARAMETER Experiment Name: At_42deg_Heat_cDNA_P Parameter: Temperature (deg C) Value: 42 vs. 22
  misc_feature: MA Experiment 20000111 PARAMETER Experiment Name: At_42deg_Heat_cDNA_P Parameter: Timepoint (hr) Value: 6
  misc_feature: MA Experiment 20000111 PARAMETER Experiment Name: At_42deg_Heat_cDNA_P Parameter: Tissue Value: Aerial
  misc_feature: MA Experiment ID: 20000117 Result: Up-regulated in Transcription
  misc_feature: MA Experiment 20000117 PARAMETER Experiment Name: At_100uM_ABA_Mutants_cDNA_P Parameter: Plant Line Value: Columbia
  misc_feature: MA Experiment 20000117 PARAMETER Experiment Name: At_100uM_ABA_Mutants_cDNA_P Parameter: Timepoint (hr) Value: 6
  misc_feature: MA Experiment 20000117 PARAMETER Experiment Name: At_100uM_ABA_Mutants_cDNA_P Parameter: Tissue Value: Aerial
  misc_feature: MA Experiment 20000117 PARAMETER Experiment Name: At_100uM_ABA_Mutants_cDNA_P Parameter: Treatment Value: 100uM ABA vs. No Treatment
aaacatgtggtaattggttcatttatccttctttctttcttctccaatcggatctctcactttctctacatcaccggtaaaaatggcgatgtgggtattcgggtacggatctttaatatggaaaacgggttttcctttcgacgaaagcctccctggtttcattaaaggctatcgccgtgtcttccatcaaggtagtactgatcatagaggaactccggattttccgggaagaacagtgacattagaagctgctcatgaagaagtttgttgtggagttgcttacaagataactaaagaggaagataaaagagatgctttattgcatttggaagtgagggagaagcaatatgatcagaaagagtatcttgatttcttcactgactctaatgcttcggaaccggctgtggcaggagtaatggtgtacatagcttcacctgacaagaagagcaacaacaactacttaggaccagctcctcttgaagatattgccaaacagatagttaaagcgaaaggaccttcagggccaaacagagactatctcttcaacctcgaagaggctcttgctcaactcgggtttaaagataaacatgtcacagatcttgcaaaccaagttaggcacattctttcagaatccgaagagttagacattgatgccaccgccgccaccgccaacaatgtctagattcacagcttcttttcgatttatccgaaaagaacaaaacccaatttttaagagatgcattttgcatcccccaattgaatctgttatcactatcaatcaactctcttctttatcatatttgatcac

SEQ ID NO: 103686 - protein, 199 aa, Arabidopsis thaliana
  peptide (1)..(199): Ceres Seq. ID no. 13613362
  misc_feature (3)..(180): Pfam Name: ChaC-like protein Pfam Description: ChaC-like protein
  misc_feature (1)..(199): Homolog of NCBI NO: 18401334 NR Description: expressed protein [Arabidopsis thaliana]
  misc_feature (3)..(199): Homolog of NCBI NO: 12083292 NR Description: unknown protein [Arabidopsis thaliana]
  misc_feature (73)..(199): Homolog of NCBI NO: 25349686 NR Description: hypothetical protein T12C22.6 [imported] - thaliana >gi|8655989|gb|AAF78262.1|AC020576_6 Contains similarity cation transport protein CHAC from Escherichia coli gi|2506988.
  misc_feature (3)..(62): Homolog of NCBI NO: 25349686 NR Description: hypothetical protein T12C22.6 [imported] - thaliana >gi|8655989|gb|AAF78262.1|AC020576_6 Contains similarity cation transport protein CHAC from Escherichia coli gi|2506988.
  misc_feature (1)..(178): Homolog of NCBI NO: 38344831 NR Description: OSJNBa0064H22.12 [Oryza sativa (japonica
  misc_feature (1)..(184): Homolog of NCBI NO: 18417778 NR Description: expressed protein [Arabidopsis thaliana]
  misc_feature (1)..(184): Homolog of NCBI NO: 21593515 NR Description: unknown [Arabidopsis thaliana]
  misc_feature (1)..(187): Homolog of NCBI NO: 15239626 NR Description: expressed protein [Arabidopsis thaliana] unknown protein [Arabidopsis thaliana]
  misc_feature (1)..(181): Homolog of NCBI NO: 27525010 NR Description: putative cation transporter [Beta procumbens]
  misc_feature (91)..(187): Homolog of NCBI NO: 7486723 NR Description: hypothetical protein F9D12.14 - Arabidopsis >gi|3319340|gb|AAC26229.1| contains similarity to E. coli cation
MAMWVFGYGSLIWKTGFPFDESLPGFIKGYRRVFHQGSTDHRGTPDFPGRTVTLEAAHEEVCCGVAYKITKEEDKRDALLHLEVREKQYDQKEYLDFFTDSNASEPAVAGVMVYIASPDKKSNNNYLGPAPLEDIAKQIVKAKGPSGPNRDYLFNLEEALAQLGFKDKHVTDLANQVRHILSESEELDIDATAATANNV

SEQ ID NO: 103687 - protein, 197 aa, Arabidopsis thaliana
  peptide (1)..(197): Ceres Seq. ID no. 13613363
  misc_feature (1)..(178): Pfam Name: ChaC-like protein Pfam Description: ChaC-like protein
  misc_feature (1)..(197): Homolog of NCBI NO: 18401334 NR Description: expressed protein [Arabidopsis thaliana]
  misc_feature (1)..(197): Homolog of NCBI NO: 12083292 NR Description: unknown protein [Arabidopsis thaliana]
  misc_feature (71)..(197): Homolog of NCBI NO: 25349686 NR Description: hypothetical protein T12C22.6 [imported] - thaliana >gi|8655989|gb|AAF78262.1|AC020576_6 Contains similarity cation transport protein CHAC from Escherichia coli gi|2506988.
  misc_feature (1)..(60): Homolog of NCBI NO: 25349686 NR Description: hypothetical protein T12C22.6 [imported] - thaliana >gi|8655989|gb|AAF78262.1|AC020576_6 Contains similarity cation transport protein CHAC from Escherichia coli gi|2506988.
  misc_feature (1)..(176): Homolog of NCBI NO: 38344831 NR Description: OSJNBa0064H22.12 [Oryza sativa (japonica
  misc_feature (1)..(182): Homolog of NCBI NO: 18417778 NR Description: expressed protein [Arabidopsis thaliana]
  misc_feature (1)..(182): Homolog of NCBI NO: 21593515 NR Description: unknown [Arabidopsis thaliana]
  misc_feature (1)..(185): Homolog of NCBI NO: 15239626 NR Description: expressed protein [Arabidopsis thaliana] unknown protein [Arabidopsis thaliana]
  misc_feature (1)..(179): Homolog of NCBI NO: 27525010 NR Description: putative cation transporter [Beta procumbens]
  misc_feature (89)..(185): Homolog of NCBI NO: 7486723 NR Description: hypothetical protein F9D12.14 - Arabidopsis >gi|3319340|gb|AAC26229.1| contains similarity to E. coli cation
MWVFGYGSLIWKTGFPFDESLPGFIKGYRRVFHQGSTDHRGTPDFPGRTVTLEAAHEEVCCGVAYKITKEEDKRDALLHLEVREKQYDQKEYLDFFTDSNASEPAVAGVMVYIASPDKKSNNNYLGPAPLEDIAKQIVKAKGPSGPNRDYLFNLEEALAQLGFKDKHVTDLANQVRHILSESEELDIDATAATANNV

SEQ ID NO: 103688 - DNA, 1477 bp, Arabidopsis thaliana
  misc_feature (1)..(1477): Ceres Seq. ID no. 13613364
  misc_feature: MA Experiment ID: 108434 Result: Down-regulated in Transcription
  misc_feature: MA Experiment 108434 PARAMETER Experiment Name: At_Root_Tips_cDNA_P Parameter: Tissue Value: Root Tips
  misc_feature: MA Experiment ID: 108435 Result: Up-regulated in Transcription
  misc_feature: MA Experiment 108435 PARAMETER Experiment Name: At_stm_Mutants_cDNA_P Parameter: Plant Line Value: wt Landsburg vs stm
  misc_feature: MA Experiment 108435 PARAMETER Experiment Name: At_stm_Mutants_cDNA_P Parameter: Tissue Value: Shoot Apical Meristem Region
  misc_feature: MA Experiment ID: 108463 Result: Up-regulated in Transcription
  misc_feature: MA Experiment 108463 PARAMETER Experiment Name: At_Germinating_Seeds_cDNA_P Parameter: Age (day) Value: 3 vs. 0
  misc_feature: MA Experiment 108463 PARAMETER Experiment Name: At_Germinating_Seeds_cDNA_P Parameter: Tissue Value: Germinating Seeds
  misc_feature: MA Experiment ID: 108464 Result: Up-regulated in Transcription
  misc_feature: MA Experiment 108464 PARAMETER Experiment Name: At_Germinating_Seeds_cDNA_P Parameter: Age (day) Value: 4 vs. 0
  misc_feature: MA Experiment 108464 PARAMETER Experiment Name: At_Germinating_Seeds_cDNA_P Parameter: Tissue Value: Germinating Seeds
  misc_feature: MA Experiment ID: 108501 Result: Down-regulated in Transcription
  misc_feature: MA Experiment 108501 PARAMETER Experiment Name: At_ap2_floral_buds_cDNA_P Parameter: Plant Line Value: ap2 (Ler.)
  misc_feature: MA Experiment 108501 PARAMETER Experiment Name: At_ap2_floral_buds_cDNA_P Parameter: Tissue Value: Closed Flower
  misc_feature: MA Experiment ID: 108561 Result: Up-regulated in Transcription
  misc_feature: MA Experiment 108561 PARAMETER Experiment Name: At_100uM_ABA_cDNA_P Parameter: Timepoint (hr) Value: 6
  misc_feature: MA Experiment 108561 PARAMETER Experiment Name: At_100uM_ABA_cDNA_P Parameter: Tissue Value: Aerial
  misc_feature: MA Experiment 108561 PARAMETER Experiment Name: At_100uM_ABA_cDNA_P Parameter: Treatment Value: 100uM ABA vs. No Treatment
  misc_feature: MA Experiment ID: 108576 Result: Down-regulated in Transcription
  misc_feature: MA Experiment 108576 PARAMETER Experiment Name: At_42deg_Heat_cDNA_P Parameter: Temperature (deg C) Value: 42 vs. 22
  misc_feature: MA Experiment 108576 PARAMETER Experiment Name: At_42deg_Heat_cDNA_P Parameter: Timepoint (hr) Value: 1
  misc_feature: MA Experiment 108576 PARAMETER Experiment Name: At_42deg_Heat_cDNA_P Parameter: Tissue Value: Aerial
  misc_feature: MA Experiment ID: 108585 Result: Up-regulated in Transcription
  misc_feature: MA Experiment 108585 PARAMETER Experiment Name: At_5mM_NaNP_cDNA_P Parameter: Timepoint (hr) Value: 6
  misc_feature: MA Experiment 108585 PARAMETER Experiment Name: At_5mM_NaNP_cDNA_P Parameter: Tissue Value: Aerial
  misc_feature: MA Experiment 108585 PARAMETER Experiment Name: At_5mM_NaNP_cDNA_P Parameter: Treatment Value: null
  misc_feature: MA Experiment ID: 108607 Result: Up-regulated in Transcription
  misc_feature: MA Experiment 108607 PARAMETER Experiment Name: At_100uM_ABA_cDNA_P Parameter: Timepoint (hr) Value: 4
  misc_feature: MA Experiment 108607 PARAMETER Experiment Name: At_100uM_ABA_cDNA_P Parameter: Tissue Value: Aerial
  misc_feature: MA Experiment 108607 PARAMETER Experiment Name: At_100uM_ABA_cDNA_P Parameter: Treatment Value: 100uM ABA vs. No Treatment
  misc_feature: MA Experiment ID: 20000070 Result: Up-regulated in Transcription
  misc_feature: MA Experiment 20000070 PARAMETER Experiment Name: At_100uM_ABA_Mutants_cDNA_P Parameter: Plant Line Value: CS24
  misc_feature: MA Experiment 20000070 PARAMETER Experiment Name: At_100uM_ABA_Mutants_cDNA_P Parameter: Timepoint (hr) Value: 6
  misc_feature: MA Experiment 20000070 PARAMETER Experiment Name: At_100uM_ABA_Mutants_cDNA_P Parameter: Tissue Value: Aerial
  misc_feature: MA Experiment 20000070 PARAMETER Experiment Name: At_100uM_ABA_Mutants_cDNA_P Parameter: Treatment Value: 100uM ABA vs. No Treatment
  misc_feature: MA Experiment ID: 20000072 Result: Up-regulated in Transcription
  misc_feature: MA Experiment 20000072 PARAMETER Experiment Name: At_100uM_ABA_Mutants_cDNA_P Parameter: Plant Line Value: CS8105
  misc_feature: MA Experiment 20000072 PARAMETER Experiment Name: At_100uM_ABA_Mutants_cDNA_P Parameter: Timepoint (hr) Value: 6
  misc_feature: MA Experiment 20000072 PARAMETER Experiment Name: At_100uM_ABA_Mutants_cDNA_P Parameter: Tissue Value: Aerial
  misc_feature: MA Experiment 20000072 PARAMETER Experiment Name: At_100uM_ABA_Mutants_cDNA_P Parameter: Treatment Value: 100uM ABA vs. No Treatment
  misc_feature: MA Experiment ID: 20000086 Result: Up-regulated in Transcription
  misc_feature: MA Experiment 20000086 PARAMETER Experiment Name: At_100uM_ABA_Mutants_cDNA_P Parameter: Plant Line Value: CS22
  misc_feature: MA Experiment 20000086 PARAMETER Experiment Name: At_100uM_ABA_Mutants_cDNA_P Parameter: Timepoint (hr) Value: 6
  misc_feature: MA Experiment 20000086 PARAMETER Experiment Name: At_100uM_ABA_Mutants_cDNA_P Parameter: Tissue Value: Aerial
  misc_feature: MA Experiment 20000086 PARAMETER Experiment Name: At_100uM_ABA_Mutants_cDNA_P Parameter: Treatment Value: 100uM ABA vs. No Treatment
  misc_feature: MA Experiment ID: 20000087 Result: Up-regulated in Transcription
  misc_feature: MA Experiment 20000087 PARAMETER Experiment Name: At_100uM_ABA_Mutants_cDNA_P Parameter: Plant Line Value: WS
  misc_feature: MA Experiment 20000087 PARAMETER Experiment Name: At_100uM_ABA_Mutants_cDNA_P Parameter: Timepoint (hr) Value: 6
  misc_feature: MA Experiment 20000087 PARAMETER Experiment Name: At_100uM_ABA_Mutants_cDNA_P Parameter: Tissue Value: Aerial
  misc_feature: MA Experiment 20000087 PARAMETER Experiment Name: At_100uM_ABA_Mutants_cDNA_P Parameter: Treatment Value: 100uM ABA vs. No Treatment
  misc_feature: MA Experiment ID: 20000088 Result: Up-regulated in Transcription
  misc_feature: MA Experiment 20000088 PARAMETER Experiment Name: At_100uM_ABA_Mutants_cDNA_P Parameter: Plant Line Value: Landsberg
  misc_feature: MA Experiment 20000088 PARAMETER Experiment Name: At_100uM_ABA_Mutants_cDNA_P Parameter: Timepoint (hr) Value: 6
  misc_feature: MA Experiment 20000088 PARAMETER Experiment Name: At_100uM_ABA_Mutants_cDNA_P Parameter: Tissue Value: Aerial
  misc_feature: MA Experiment 20000088 PARAMETER Experiment Name: At_100uM_ABA_Mutants_cDNA_P Parameter: Treatment Value: 100uM ABA vs. No Treatment
  misc_feature: MA Experiment ID: 20000111 Result: Down-regulated in Transcription
  misc_feature: MA Experiment 20000111 PARAMETER Experiment Name: At_42deg_Heat_cDNA_P Parameter: Temperature (deg C) Value: 42 vs. 22
  misc_feature: MA Experiment 20000111 PARAMETER Experiment Name: At_42deg_Heat_cDNA_P Parameter: Timepoint (hr) Value: 6
  misc_feature: MA Experiment 20000111 PARAMETER Experiment Name: At_42deg_Heat_cDNA_P Parameter: Tissue Value: Aerial
  misc_feature: MA Experiment ID: 20000112 Result: Down-regulated in Transcription
  misc_feature: MA Experiment 20000112 PARAMETER Experiment Name: At_42deg_Heat_cDNA_P Parameter: Temperature (deg C) Value: 42 vs. 22
  misc_feature: MA Experiment 20000112 PARAMETER Experiment Name: At_42deg_Heat_cDNA_P Parameter: Timepoint (hr) Value: 2
  misc_feature: MA Experiment 20000112 PARAMETER Experiment Name: At_42deg_Heat_cDNA_P Parameter: Tissue Value: Aerial
  misc_feature: MA Experiment ID: 20000144 Result: Down-regulated in Transcription
  misc_feature: MA Experiment 20000144 PARAMETER Experiment Name: At_42deg_Heat_cDNA_P Parameter: Temperature (deg C) Value: 42 vs. 22
  misc_feature: MA Experiment 20000144 PARAMETER Experiment Name: At_42deg_Heat_cDNA_P Parameter: Timepoint (hr) Value: 1
  misc_feature: MA Experiment 20000144 PARAMETER Experiment Name: At_42deg_Heat_cDNA_P Parameter: Tissue Value: Aerial
  misc_feature: MA Experiment ID: 20000185 Result: Up-regulated in Transcription
  misc_feature: MA Experiment 20000185 PARAMETER Experiment Name: At_Roots__P Parameter: Age (day) Value: 7 vs. 21
  misc_feature: MA Experiment 20000185 PARAMETER Experiment Name: At_Roots__P Parameter: Organism Value: A. thaliana
  misc_feature: MA Experiment 20000185 PARAMETER Experiment Name: At_Roots__P Parameter: Tissue Value: Roots vs. Whole Plant
  misc_feature: MA Experiment ID: 20000234 Result: Down-regulated in Transcription
  misc_feature: MA Experiment 20000234 PARAMETER Experiment Name: At_Siliques_P Parameter: Age (day) Value: 21
  misc_feature: MA Experiment 20000234 PARAMETER Experiment Name: At_Siliques_P Parameter: Organism Value: A. thaliana
  misc_feature: MA Experiment 20000234 PARAMETER Experiment Name: At_Siliques_P Parameter: Plant Line Value: WS
  misc_feature: MA Experiment 20000234 PARAMETER Experiment Name: At_Siliques_P Parameter: Tissue Value: Less Than 5mm Siliques vs. Whole Plant
  misc_feature: MA Experiment ID: 20000264 Result: Up-regulated in Transcription
  misc_feature: MA Experiment 20000264 PARAMETER Experiment Name: At_Open_Flower_P Parameter: Age (day) Value: 21
  misc_feature: MA Experiment 20000264 PARAMETER Experiment Name: At_Open_Flower_P Parameter: Plant Line Value: WS
  misc_feature: MA Experiment 20000264 PARAMETER Experiment Name: At_Open_Flower_P Parameter: Tissue Value: Open Flower vs. Whole Plant
  misc_feature: MA Experiment ID: 20000286 Result: Up-regulated in Transcription
  misc_feature: MA Experiment 20000286 PARAMETER Experiment Name: At_Open_Flower_P Parameter: Age (day) Value: 21
  misc_feature: MA Experiment 20000286 PARAMETER Experiment Name: At_Open_Flower_P Parameter: Plant Line Value: WS
  misc_feature: MA Experiment 20000286 PARAMETER Experiment Name: At_Open_Flower_P Parameter: Tissue Value: Half Open vs. Whole Plant
  misc_feature: MA Experiment ID: 20000436 Result: Up-regulated in Transcription
  misc_feature: MA Experiment 20000436 PARAMETER Experiment Name: At_Drought_P Parameter: Age (day) Value: 7
  misc_feature: MA Experiment 20000436 PARAMETER Experiment Name: At_Drought_P Parameter: Organism Value: A. thaliana
  misc_feature: MA Experiment 20000436 PARAMETER Experiment Name: At_Drought_P Parameter: Plant Line Value: WS
  misc_feature: MA Experiment 20000436 PARAMETER Experiment Name: At_Drought_P Parameter: Timepoint (hr) Value: 12
  misc_feature: MA Experiment 20000436 PARAMETER Experiment Name: At_Drought_P Parameter: Tissue Value: Whole Plant
  misc_feature: MA Experiment 20000436 PARAMETER Experiment Name: At_Drought_P Parameter: Treatment Value: Drought vs. No Drought
  misc_feature: MA Experiment ID: 20000439 Result: Up-regulated in Transcription
  misc_feature: MA Experiment 20000439 PARAMETER Experiment Name: At_Roots__P Parameter: Age (day) Value: 14 vs. 21
  misc_feature: MA Experiment 20000439 PARAMETER Experiment Name: At_Roots__P Parameter: Organism Value: A. thaliana
  misc_feature: MA Experiment 20000439 PARAMETER Experiment Name: At_Roots__P Parameter: Tissue Value: Roots vs. Whole Plant
  misc_feature: MA Experiment ID: 20000495 Result: Up-regulated in Transcription
  misc_feature: MA Experiment 20000495 PARAMETER Experiment Name: At_Guard_Cells_P Parameter: Harvest Date Value: 8/2/2002
  misc_feature: MA Experiment 20000495 PARAMETER Experiment Name: At_Guard_Cells_P Parameter: Organism Value: A. thaliana
  misc_feature: MA Experiment 20000495 PARAMETER Experiment Name: At_Guard_Cells_P Parameter: Tissue Value: Guard Cells vs. Leaves
  misc_feature: MA Experiment ID: 20000527 Result: Down-regulated in Transcription
  misc_feature: MA Experiment 20000527 PARAMETER Experiment Name: At_10percent_PEG_P Parameter: Age (day) Value: 20
  misc_feature: MA Experiment 20000527 PARAMETER Experiment Name: At_10percent_PEG_P Parameter: Organism Value: A. thaliana
  misc_feature: MA Experiment 20000527 PARAMETER Experiment Name: At_10percent_PEG_P Parameter: Plant Line Value: WS
  misc_feature: MA Experiment 20000527 PARAMETER Experiment Name: At_10percent_PEG_P Parameter: Timepoint (day) Value: 20
  misc_feature: MA Experiment 20000527 PARAMETER Experiment Name: At_10percent_PEG_P Parameter: Tissue Value: Whole Plant
  misc_feature: MA Experiment 20000527 PARAMETER Experiment Name: At_10percent_PEG_P Parameter: Treatment Value: 10percent PEG vs. No Treatment
  misc_feature: MA Experiment ID: 20000794 Result: Up-regulated in Transcription
  misc_feature: MA Experiment 20000794 PARAMETER Experiment Name: At_Petals_P Parameter: Age (day) Value: 23-25 days
  misc_feature: MA Experiment 20000794 PARAMETER Experiment Name: At_Petals_P Parameter: Plant Line Value: WS
  misc_feature: MA Experiment 20000794 PARAMETER Experiment Name: At_Petals_P Parameter: Tissue Value: Petals vs. Whole plant
  misc_feature: MA Experiment ID: 20001757 Result: Down-regulated in Transcription
  misc_feature: MA Experiment 20001757 PARAMETER Experiment Name: At_50mM_NH4NO3_L-to-H_P Parameter: Timepoint (hr) Value: 6
  misc_feature: MA Experiment 20001757 PARAMETER Experiment Name: At_50mM_NH4NO3_L-to-H_P Parameter: Tissue Value: Leaf
  misc_feature: MA Experiment 20001757 PARAMETER Experiment Name: At_50mM_NH4NO3_L-to-H_P Parameter: Treatment Value: 50mM NH4NO3 vs 100mM Mannitol
  misc_feature: MA Experiment ID: 20001905 Result: Up-regulated in Transcription
  misc_feature: MA Experiment 20001905 PARAMETER Experiment Name: At_Drought_Reproduction_P Parameter: Age (day) Value: 40
  misc_feature: MA Experiment 20001905 PARAMETER Experiment Name: At_Drought_Reproduction_P Parameter: Organism Value: A. thaliana
  misc_feature: MA Experiment 20001905 PARAMETER Experiment Name: At_Drought_Reproduction_P Parameter: Plant Line Value: WS
  misc_feature: MA Experiment 20001905 PARAMETER Experiment Name: At_Drought_Reproduction_P Parameter: Timepoint (day) Value: 10
  misc_feature: MA Experiment 20001905 PARAMETER Experiment Name: At_Drought_Reproduction_P Parameter: Tissue Value: Rosettes
  misc_feature: MA Experiment 20001905 PARAMETER Experiment Name: At_Drought_Reproduction_P Parameter: Treatment Value: Drought vs. No Drought
ctgcctcaaacaaatagagcttatctcatcactcaccaaacaactctcatcaatataaagagaagagagtggtagagttatatattacacacataaacttagatatagtagtgttatattcttgattaagtaataaagatgaaaggtggaagcatggagaaaattaagccgatattggcgataatttcactgcaatttgggtatgcaggcatgtacatcatcaccatggtctcgttcaaacatggcatggaccattgggttcttgctacataccgtcatgtcgtagccacggttgtcatggctccctttgctctcatgttcgagaggaaaattaggcccaagatgacactagcaatattctggaggcttcttgctcttggaatattagagcccctcatggaccagaatttgtactacataggattgaaaaacacatcagcatcgtacacttctgcctttaccaatgcacttcccgccgtcaccttcattctcgccctcattttcaggcttgagacggtgaactttagaaaggtccacagtgttgcaaaagtggtaggaacggtaataacggttggaggagcaatgatcatgactttgtacaaaggtccggccattgagattgtgaaggccgcacataattctttccacggtggttcgagcagcacacccaccggccaacattgggtccttggaaccatagccattatgggcagtatctctacatgggctgctttcttcattttacagtcatacacattaaaagtctatccagctgagctatcactagtaacgttgatatgtgggatagggacgatcctaaacgctattgcttcgctaataatggttcgtgacccgagtgcatggaaaatcggcatggattcagggacactcgccgcggtttactctggagtggtttgttcgggaatagcttattacatacaaagcattgtgattaagcaacgtggaccggtttttacgacgtcgtttagtcctatgtgtatgatcatcactgccttcctcggtgcattggttttggctgagaaaatccatctcggaagcataatcggggcggttttcatagtgcttggactatacagtgtggtatggggtaaaagtaaagacgaagtgaatcctttggatgagaaaatcgtagccaagtcccaagagcttccgattactaacgtagtcaaacaaacgaacggtcacgatgtctcgggagcaccgactaacggtgtggttaccagtacctgatccaagtcccaaaagagaagaaagatacttaaacaaagatctcatctccatgcattggaggtggaagttttgattatctttcttgttgtttttgtgttttttcttttacattttctaatcgatctacgcttaacttttagtatctttttaccttatgtaatgattttctgcttctactttcttgtatttgaaatttccaaaacgaatgatgaatgcatcatttggt

SEQ ID NO: 103689 - protein, 370 aa, Arabidopsis thaliana; identical to SEQ ID NO: 42641
  peptide (1)..(370): Ceres Seq. ID no. 13613365
  misc_feature (20)..(153): Pfam Name: Integral membrane protein DUF6 Pfam Description: Integral membrane protein DUF6
  misc_feature (1)..(370): Homolog of NCBI NO: 15219448 NR Description: nodulin MtN21 family protein [Arabidopsis
  misc_feature (6)..(370): Homolog of NCBI NO: 21553533 NR Description: nodulin protein, putative [Arabidopsis thaliana]
  misc_feature (1)..(370): Homolog of NCBI NO: 30680708 NR Description: nodulin MtN21 family protein [Arabidopsis
  misc_feature (6)..(370): Homolog of NCBI NO: 7486870 NR Description: hypothetical protein T12G13.140 - Arabidopsis
  misc_feature (1)..(351): Homolog of NCBI NO: 15219123 NR Description: nodulin N21 family protein [Arabidopsis thaliana]
  misc_feature (1)..(351): Homolog of NCBI NO: 17529004 NR Description: putative nodulin protein [Arabidopsis thaliana]
  misc_feature (1)..(351): Homolog of NCBI NO: 6552743 NR Description: T26F17.11 [Arabidopsis thaliana]
  misc_feature (10)..(347): Homolog of NCBI NO: 15225480 NR Description: nodulin MtN21 family protein [Arabidopsis
  misc_feature (3)..(370): Homolog of NCBI NO: 34908998 NR Description: nodulin-like protein [Oryza sativa (japonica
  misc_feature (6)..(368): Homolog of NCBI NO: 21593603 NR Description: nodulin-like protein [Arabidopsis thaliana]

SEQ ID NO: 103690 - protein, 365 aa, Arabidopsis thaliana; identical to SEQ ID NO: 42642
  peptide (1)..(365): Ceres Seq. ID no. 13613366
  misc_feature (15)..(148): Pfam Name: Integral membrane protein DUF6 Pfam Description: Integral membrane protein DUF6
  misc_feature (1)..(365): Homolog of NCBI NO: 15219448 NR Description: nodulin MtN21 family protein [Arabidopsis
  misc_feature (1)..(365): Homolog of NCBI NO: 21553533 NR Description: nodulin protein, putative [Arabidopsis thaliana]
  misc_feature (1)..(365): Homolog of NCBI NO: 30680708 NR Description: nodulin MtN21 family protein [Arabidopsis
  misc_feature (1)..(365): Homolog of NCBI NO: 7486870 NR Description: hypothetical protein T12G13.140 - Arabidopsis
  misc_feature (1)..(346): Homolog of NCBI NO: 15219123 NR Description: nodulin N21 family protein [Arabidopsis thaliana]
  misc_feature (1)..(346): Homolog of NCBI NO: 17529004 NR Description: putative nodulin protein [Arabidopsis thaliana]
  misc_feature (1)..(346): Homolog of NCBI NO: 6552743 NR Description: T26F17.11 [Arabidopsis thaliana]
  misc_feature (5)..(342): Homolog of NCBI NO: 15225480 NR Description: nodulin MtN21 family protein [Arabidopsis
  misc_feature (1)..(365): Homolog of NCBI NO: 34908998 NR Description: nodulin-like protein [Oryza sativa (japonica
  misc_feature (1)..(363): Homolog of NCBI NO: 21593603 NR Description: nodulin-like protein [Arabidopsis thaliana]

SEQ ID NO: 103691 - protein, 346 aa, Arabidopsis thaliana; identical to SEQ ID NO: 42643
  peptide (1)..(346): Ceres Seq. ID no. 13613367
  misc_feature (1)..(129): Pfam Name: Integral membrane protein DUF6 Pfam Description: Integral membrane protein DUF6
  misc_feature (1)..(346): Homolog of NCBI NO: 15219448 NR Description: nodulin MtN21 family protein [Arabidopsis
  misc_feature (1)..(346): Homolog of NCBI NO: 21553533 NR Description: nodulin protein, putative [Arabidopsis thaliana]
  misc_feature (1)..(346): Homolog of NCBI NO: 30680708 NR Description: nodulin MtN21 family protein [Arabidopsis
  misc_feature (1)..(346): Homolog of NCBI NO: 7486870 NR Description: hypothetical protein T12G13.140 - Arabidopsis
  misc_feature (1)..(327): Homolog of NCBI NO: 15219123 NR Description: nodulin N21 family protein [Arabidopsis thaliana]
  misc_feature (1)..(327): Homolog of NCBI NO: 17529004 NR Description: putative nodulin protein [Arabidopsis thaliana]
  misc_feature (1)..(327): Homolog of NCBI NO: 6552743 NR Description: T26F17.11 [Arabidopsis thaliana]
  misc_feature (1)..(323): Homolog of NCBI NO: 15225480 NR Description: nodulin MtN21 family protein [Arabidopsis
  misc_feature (1)..(346): Homolog of NCBI NO: 34908998 NR Description: nodulin-like protein [Oryza sativa (japonica
  misc_feature (1)..(344): Homolog of NCBI NO: 21593603 NR Description: nodulin-like protein [Arabidopsis thaliana]

SEQ ID NO: 103692 - DNA, 1149 bp, Arabidopsis thaliana
  misc_feature (1)..(1149): Ceres Seq. ID no. 13613368
  misc_feature: MA Experiment ID: 108434 Result: Up-regulated in Transcription
  misc_feature: MA Experiment 108434 PARAMETER Experiment Name: At_Root_Tips_cDNA_P Parameter: Tissue Value: Root Tips
  misc_feature: MA Experiment ID: 108462 Result: Down-regulated in Transcription
  misc_feature: MA Experiment 108462 PARAMETER Experiment Name: At_Germinating_Seeds_cDNA_P Parameter: Age (day) Value: 2 vs. 0
  misc_feature: MA Experiment 108462 PARAMETER Experiment Name: At_Germinating_Seeds_cDNA_P Parameter: Tissue Value: Germinating Seeds
  misc_feature: MA Experiment ID: 108463 Result: Down-regulated in Transcription
  misc_feature: MA Experiment 108463 PARAMETER Experiment Name: At_Germinating_Seeds_cDNA_P Parameter: Age (day) Value: 3 vs. 0
  misc_feature: MA Experiment 108463 PARAMETER Experiment Name: At_Germinating_Seeds_cDNA_P Parameter: Tissue Value: Germinating Seeds
  misc_feature: MA Experiment ID: 108464 Result: Down-regulated in Transcription
  misc_feature: MA Experiment 108464 PARAMETER Experiment Name: At_Germinating_Seeds_cDNA_P Parameter: Age (day) Value: 4 vs. 0
  misc_feature: MA Experiment 108464 PARAMETER Experiment Name: At_Germinating_Seeds_cDNA_P Parameter: Tissue Value: Germinating Seeds
  misc_feature: MA Experiment ID: 108577 Result: Down-regulated in Transcription
  misc_feature: MA Experiment 108577 PARAMETER Experiment Name: At_42deg_Heat_cDNA_P Parameter: Temperature (deg C) Value: 42 vs. 22
  misc_feature: MA Experiment 108577 PARAMETER Experiment Name: At_42deg_Heat_cDNA_P Parameter: Timepoint (hr) Value: 6
  misc_feature: MA Experiment 108577 PARAMETER Experiment Name: At_42deg_Heat_cDNA_P Parameter: Tissue Value: Aerial
  misc_feature: MA Experiment ID: 108595 Result: Down-regulated in Transcription
  misc_feature: MA Experiment 108595 PARAMETER Experiment Name: At_Ler-pi_Ovule_cDNA_P Parameter: Plant Line Value: null
  misc_feature: MA Experiment ID: 20000113 Result: Down-regulated in Transcription
  misc_feature: MA Experiment 20000113 PARAMETER Experiment Name: At_42deg_Heat_cDNA_P Parameter: Temperature (deg C) Value: 42 vs. 22
  misc_feature: MA Experiment 20000113 PARAMETER Experiment Name: At_42deg_Heat_cDNA_P Parameter: Timepoint (hr) Value: 8
  misc_feature: MA Experiment 20000113 PARAMETER Experiment Name: At_42deg_Heat_cDNA_P Parameter: Tissue Value: Aerial
  misc_feature: MA Experiment ID: 20000173 Result: Down-regulated in Transcription
  misc_feature: MA Experiment 20000173 PARAMETER Experiment Name: At_42deg_Heat_P Parameter: Age (day) Value: 14
  misc_feature: MA Experiment 20000173 PARAMETER Experiment Name: At_42deg_Heat_P Parameter: Organism Value: A. thaliana
  misc_feature: MA Experiment 20000173 PARAMETER Experiment Name: At_42deg_Heat_P Parameter: Plant Line Value: WS
  misc_feature: MA Experiment 20000173 PARAMETER Experiment Name: At_42deg_Heat_P Parameter: Temperature (deg C) Value: 42 vs. 22
  misc_feature: MA Experiment 20000173 PARAMETER Experiment Name: At_42deg_Heat_P Parameter: Timepoint (hr) Value: 6
  misc_feature: MA Experiment 20000173 PARAMETER Experiment Name: At_42deg_Heat_P Parameter: Tissue Value: Aerial
  misc_feature: MA Experiment ID: 20000227 Result: Up-regulated in Transcription
  misc_feature: MA Experiment 20000227 PARAMETER Experiment Name: At_Root-Tips-vs-Tops_P Parameter: Tissue Value: Root Tips vs. Root Tops
  misc_feature: MA Experiment ID: 20000451 Result: Up-regulated in Transcription
  misc_feature: MA Experiment 20000451 PARAMETER Experiment Name: At_CS6879_Shoots-Roots_P Parameter: Age (day) Value: 14
  misc_feature: MA Experiment 20000451 PARAMETER Experiment Name: At_CS6879_Shoots-Roots_P Parameter: Organism Value: A. thaliana
  misc_feature: MA Experiment 20000451 PARAMETER Experiment Name: At_CS6879_Shoots-Roots_P Parameter: Plant Line Value: CS6879 vs. WS
  misc_feature: MA Experiment 20000451 PARAMETER Experiment Name: At_CS6879_Shoots-Roots_P Parameter: Tissue Value: Roots
  misc_feature: MA Experiment ID: 20001558 Result: Up-regulated in Transcription
  misc_feature: MA Experiment 20001558 PARAMETER Experiment Name: At_Drought_Soil_Dry_P Parameter: Age (day) Value: 27
  misc_feature: MA Experiment 20001558 PARAMETER Experiment Name: At_Drought_Soil_Dry_P Parameter: Organism Value: A. thaliana
  misc_feature: MA Experiment 20001558 PARAMETER Experiment Name: At_Drought_Soil_Dry_P Parameter: Plant Line Value: WS
  misc_feature: MA Experiment 20001558 PARAMETER Experiment Name: At_Drought_Soil_Dry_P Parameter: Post Timepoint (hr) Value: 6
  misc_feature: MA Experiment 20001558 PARAMETER Experiment Name: At_Drought_Soil_Dry_P Parameter: Post-Treatment Value: Re-Water vs. No Drought
  misc_feature: MA Experiment 20001558 PARAMETER Experiment Name: At_Drought_Soil_Dry_P Parameter: Timepoint (day) Value: 13
  misc_feature: MA Experiment 20001558 PARAMETER Experiment Name: At_Drought_Soil_Dry_P Parameter: Treatment Value: Drought vs. No Drought
aaactttcgtcttctcaacaaaatctgcagttccttgctcctttctcagtccaaattctctgatttttgattttttcgattcaatgggtttcaccaaagatcagttgcttgatcgacttcaggaacttgagattgattattccaagtatgaacatccgcctgtactaaccgtcgaagaacaggccaagtatgttagcagtagtaagggtgcactgagtaagaatctcttcttgaaggacaagaaacatcggtattatattgtttcagcgatggtggatacgaaagttgacatgaaagttttatctcagagacttggtcttggaaaaggagggattagaatggctccagaagaagcacttggtgagcttttgcaggtatccctcggatgtgttaccccgtttgcagttgtaaatgaatcagcaagagacgtgtctctcttgttagaccaaaaattcaagaaccaaacgcgttgcatcttccacccattgtctaacgatgtctcagtctctctgaacacattgggtctggacaagtttctgaagtcgattgggagagatcccgtatacgttgaccttgaggctaacccggtagttggtaaagaccaggctccagatctagctgtttgtgttccgtctaattcagttattgttcccgagattcctaatcaaacatcttctacacaaattcctcttccaaaaagtgtgtcagcagaggtcaagcctgtggcttcagccaaaacgagcaagccagcttgtaaggtgaagagcgtcgctgaaaattcagctccatcagcttacaagaacccggagaaatttgtgcaggagattttggacaaaacttcggctctattattgtccgaggctaagggagagtgcgtggaggctttggcagaaacactaagaaaacgacttacctcagagttgacccacctctctattatgtacaagaactcagcgtacgcagaaggtttttatgctggtacacgccaccagccgaagcgattgtaagaggtttggtttacatgttgaaccggagatatttgggagagaaacattaccggttcagcaatatattttccttcgttggacagcaaattttagataagactgaaaatgattacatttacatgaaagctcgaaccatttattc

SEQ ID NO: 103693 - protein, 334 aa, Arabidopsis thaliana
  peptide (1)..(334): Ceres Seq. ID no. 13613369
  misc_feature (41)..(191): Pfam Name: YbaK / prolyl-tRNA synthetases associated domain Pfam Description: YbaK / prolyl-tRNA synthetases associated domain
  misc_feature (28)..(334): Homolog of NCBI NO: 30693857 NR Description: expressed protein [Arabidopsis thaliana] unknown protein [Arabidopsis thaliana]
  misc_feature (165)..(334): Homolog of NCBI NO: 25405166 NR Description: hypothetical protein T12C22.11 [imported] - thaliana >gi|8655994|gb|AAF78267.1|AC020576_11 Contains weak to 25.7 kDa protein from Cicer arietinum gb|AJ276422 and
  misc_feature (113)..(333): Homolog of NCBI NO: 7271117 NR Description: 25.7 kDa protein [Cicer arietinum]
  misc_feature (28)..(180): Homolog of NCBI NO: 25405166 NR Description: hypothetical protein T12C22.11 [imported] - thaliana >gi|8655994|gb|AAF78267.1|AC020576_11 Contains weak to 25.7 kDa protein from Cicer arietinum gb|AJ276422 and
  misc_feature (44)..(198): Homolog of NCBI NO: 16124366 NR Description: DNA-binding protein, putative [Caulobacter
  misc_feature (35)..(192): Homolog of NCBI NO: 27676960 NR Description: similar to RIKEN cDNA 2010316F05 [Mus musculus]
  misc_feature (34)..(192): Homolog of NCBI NO: 21312706 NR Description: RIKEN cDNA 2010316F05 [Mus musculus]
  misc_feature (31)..(198): Homolog of NCBI NO: 22968624 NR Description: hypothetical protein [Rhodospirillum rubrum]
  misc_feature (32)..(192): Homolog of NCBI NO: 34783837 NR Description: Unknown (protein for MGC:64201) [Danio rerio]
  misc_feature (31)..(193): Homolog of NCBI NO: 13473736 NR Description: hypothetical protein, putative DNA-binding [Mesorhizobium loti] >gi|14024487|dbj|BAB51090.1| hypothetical
TFVFSTKSAVPCSFLSPNSLIFDFFDSMGFTKDQLLDRLQELEIDYSKYEHPPVLTVEEQAKYVSSSKGALSKNLFLKDKKHRYYIVSAMVDTKVDMKVLSQRLGLGKGGIRMAPEEALGELLQVSLGCVTPFAVVNESARDVSLLLDQKFKNQTRCIFHPLSNDVSVSLNTLGLDKFLKSIGRDPVYVDLEANPVVGKDQAPDLAVCVPSNSVIVPEIPNQTSSTQIPLPKSVSAEVKPVASAKTSKPACKVKSVAENSAPSAYKNPEKFVQEILDKTSALLLSEAKGECVEALAETLRKRLTSELTHLSIMYKNSAYAEGFYAGTRHQPKRL

SEQ ID NO: 103694 - protein, 307 aa, Arabidopsis thaliana; identical to SEQ ID NO: 37872
  peptide (1)..(307): Ceres Seq. ID no. 13613370
  misc_feature (14)..(164): Pfam Name: YbaK / prolyl-tRNA synthetases associated domain Pfam Description: YbaK / prolyl-tRNA synthetases associated domain
  misc_feature (1)..(307): Homolog of NCBI NO: 30693857 NR Description: expressed protein [Arabidopsis thaliana] unknown protein [Arabidopsis thaliana]
  misc_feature (138)..(307): Homolog of NCBI NO: 25405166 NR Description: hypothetical protein T12C22.11 [imported] - thaliana >gi|8655994|gb|AAF78267.1|AC020576_11 Contains weak to 25.7 kDa protein from Cicer arietinum gb|AJ276422 and
  misc_feature (86)..(306): Homolog of NCBI NO: 7271117 NR Description: 25.7 kDa protein [Cicer arietinum]
  misc_feature (1)..(153): Homolog of NCBI NO: 25405166 NR Description: hypothetical protein T12C22.11 [imported] - thaliana >gi|8655994|gb|AAF78267.1|AC020576_11 Contains weak to 25.7 kDa protein from Cicer arietinum gb|AJ276422 and
  misc_feature (17)..(171): Homolog of NCBI NO: 16124366 NR Description: DNA-binding protein, putative [Caulobacter
  misc_feature (8)..(165): Homolog of NCBI NO: 27676960 NR Description: similar to RIKEN cDNA 2010316F05 [Mus musculus]
  misc_feature (7)..(165): Homolog of NCBI NO: 21312706 NR Description: RIKEN cDNA 2010316F05 [Mus musculus]
  misc_feature (4)..(171): Homolog of NCBI NO: 22968624 NR Description: hypothetical protein [Rhodospirillum rubrum]
  misc_feature (5)..(165): Homolog of NCBI NO: 34783837 NR Description: Unknown (protein for MGC:64201) [Danio rerio]
  misc_feature (4)..(166): Homolog of NCBI NO: 13473736 NR Description: hypothetical protein, putative DNA-binding [Mesorhizobium loti] >gi|14024487|dbj|BAB51090.1| hypothetical

SEQ ID NO: 103695 - protein, 245 aa, Arabidopsis thaliana; identical to SEQ ID NO: 37873
  peptide (1)..(245): Ceres Seq. ID no. 13613371
  misc_feature (1)..(102): Pfam Name: YbaK / prolyl-tRNA synthetases associated domain Pfam Description: YbaK / prolyl-tRNA synthetases associated domain
  misc_feature (1)..(245): Homolog of NCBI NO: 30693857 NR Description: expressed protein [Arabidopsis thaliana] unknown protein [Arabidopsis thaliana]
  misc_feature (76)..(245): Homolog of NCBI NO: 25405166 NR Description: hypothetical protein T12C22.11 [imported] - thaliana >gi|8655994|gb|AAF78267.1|AC020576_11 Contains weak to 25.7 kDa protein from Cicer arietinum gb|AJ276422 and
  misc_feature (24)..(244): Homolog of NCBI NO: 7271117 NR Description: 25.7 kDa protein [Cicer arietinum]
  misc_feature (1)..(91): Homolog of NCBI NO: 25405166 NR Description: hypothetical protein T12C22.11 [imported] - thaliana >gi|8655994|gb|AAF78267.1|AC020576_11 Contains weak to 25.7 kDa protein from Cicer arietinum gb|AJ276422 and
  misc_feature (1)..(109): Homolog of NCBI NO: 16124366 NR Description: DNA-binding protein, putative [Caulobacter
  misc_feature (1)..(103): Homolog of NCBI NO: 27676960 NR Description: similar to RIKEN cDNA 2010316F05 [Mus musculus]
  misc_feature (1)..(103): Homolog of NCBI NO: 21312706 NR Description: RIKEN cDNA 2010316F05 [Mus musculus]
  misc_feature (1)..(109): Homolog of NCBI NO: 22968624 NR Description: hypothetical protein [Rhodospirillum rubrum]
  misc_feature (1)..(103): Homolog of NCBI NO: 34783837 NR Description: Unknown (protein for MGC:64201) [Danio rerio]
  misc_feature (1)..(104): Homolog of NCBI NO: 13473736 NR Description: hypothetical protein, putative DNA-binding [Mesorhizobium loti] >gi|14024487|dbj|BAB51090.1| hypothetical

SEQ ID NO: 103696 - DNA, 1163 bp, Arabidopsis thaliana
  misc_feature (1)..(1163): Ceres Seq. ID no. 13613376
  misc_feature: MA Experiment ID: 20000234 Result: Down-regulated in Transcription
  misc_feature: MA Experiment 20000234 PARAMETER Experiment Name: At_Siliques_P Parameter: Age (day) Value: 21
  misc_feature: MA Experiment 20000234 PARAMETER Experiment Name: At_Siliques_P Parameter: Organism Value: A. thaliana
  misc_feature: MA Experiment 20000234 PARAMETER Experiment Name: At_Siliques_P Parameter: Plant Line Value: WS
  misc_feature: MA Experiment 20000234 PARAMETER Experiment Name: At_Siliques_P Parameter: Tissue Value: Less Than 5mm Siliques vs. Whole Plant
  misc_feature: MA Experiment ID: 20000495 Result: Down-regulated in Transcription
  misc_feature: MA Experiment 20000495 PARAMETER Experiment Name: At_Guard_Cells_P Parameter: Harvest Date Value: 8/2/2002
  misc_feature: MA Experiment 20000495 PARAMETER Experiment Name: At_Guard_Cells_P Parameter: Organism Value: A. thaliana
  misc_feature: MA Experiment 20000495 PARAMETER Experiment Name: At_Guard_Cells_P Parameter: Tissue Value: Guard Cells vs. Leaves
  misc_feature: MA Experiment ID: 20001458 Result: Up-regulated in Transcription
  misc_feature: MA Experiment 20001458 PARAMETER Experiment Name: At_50mM_NH4NO3_L-to-H_P Parameter: Age (day) Value: Undefined
  misc_feature: MA Experiment 20001458 PARAMETER Experiment Name: At_50mM_NH4NO3_L-to-H_P Parameter: Organism Value: Undefined
  misc_feature: MA Experiment 20001458 PARAMETER Experiment Name: At_50mM_NH4NO3_L-to-H_P Parameter: Plant Line Value: Undefined
  misc_feature: MA Experiment 20001458 PARAMETER Experiment Name: At_50mM_NH4NO3_L-to-H_P Parameter: Timepoint (hr) Value: 2
  misc_feature: MA Experiment 20001458 PARAMETER Experiment Name: At_50mM_NH4NO3_L-to-H_P Parameter: Tissue Value: Siliques
  misc_feature: MA Experiment 20001458 PARAMETER Experiment Name: At_50mM_NH4NO3_L-to-H_P Parameter: Treatment Value: 50mM NH4NO3 vs. 100mM Manitol
  misc_feature: MA Experiment ID: 20001757 Result: Up-regulated in Transcription
  misc_feature: MA Experiment 20001757 PARAMETER Experiment Name: At_50mM_NH4NO3_L-to-H_P Parameter: Timepoint (hr) Value: 6
  misc_feature: MA Experiment 20001757 PARAMETER Experiment Name: At_50mM_NH4NO3_L-to-H_P Parameter: Tissue Value: Leaf
  misc_feature: MA Experiment 20001757 PARAMETER Experiment Name: At_50mM_NH4NO3_L-to-H_P Parameter: Treatment Value: 50mM NH4NO3 vs 100mM Mannitol
cgagattttttattttaatatcacgctcgaatatacaattcggaatgtgcagatgttttttttgaaggcaatttagaaaaatagacaaaaatcgaacaaacatatatagaaatagagatctaaataaaaacatttattttatttcctcttggaaacaaggaaaaaatgaattggggtgggtgacgtggcagtcatacccttgccacacccttcctatacgcatataaacagcagctgcgaggagagagagatttcagagtattttctagggtttcgttttttttaaagatttagagaaaaaagtgagttattaagagattccaatcaaaatgagcggagacaacggcggtggtgagaggcgcaaaggctccgtcaagtggtttgatacccagaagggtttcggcttcatcactcctgacgacggtggcgacgatctcttcgttcaccagtcctccatcagatctgagggtttccgtagcctcgctgccgaagaagccgtagagttcgaggttgagatcgacaacaacaaccgtcccaaggccatcgatgtttctggacccgacggcgctcccgtccaaggaaacagcggtggtggttcatctggcggacgcggcggtttcggtggaggaagaggaggtggacgcggatctggaggtggatacggcggtggcggtggtggatacggaggaagaggaggtggtggtcgaggaggcagcgactgctacaagtgtggtgagcccggtcacatggcgagagactgttctgaaggcggtggaggttacggaggaggcggcggtggctacggaggtggaggcggatacggcggaggaggtggtggttacggaggtggtggccgtggaggtggtggcggcgggggaagctgctacagctgtggcgagtcgggacatttcgccagggattgcaccagcggtggacgttaaaaccaacgccggttacgcggtggagaagagtgagttggttatctcacaagtgatcggttctttctcccgccgccttctatctctctattatccactttttgcttattatgatggatctctatctttgttagttggttttttcttgatggtttcggattaggactcttcttttggttttgctacttatggttggttttatttatggtacttgtgatatgggtg

SEQ ID NO: 103697 - protein, 203 aa, Arabidopsis thaliana; identical to SEQ ID NO: 26302
  peptide (1)..(203): Ceres Seq. ID no. 13613377
  misc_feature (10)..(77): Pfam Name: 'Cold-shock' DNA-binding domain Pfam Description: 'Cold-shock' DNA-binding domain
  misc_feature (1)..(203): Homolog of NCBI NO: 15234010 NR Description: glycine-rich protein 2 (GRP2) [Arabidopsis
  misc_feature (7)..(202): Homolog of NCBI NO: 15226451 NR Description: glycine-rich protein (AtGRP2) [Arabidopsis
  misc_feature (8)..(203): Homolog of NCBI NO: 121631 NR Description: Glycine-rich protein 2 >gi|72323|pir||KNNT2S
  misc_feature (9)..(200): Homolog of NCBI NO: 29467522 NR Description: P0582D05.12 [Oryza sativa (japonica
  misc_feature (8)..(202): Homolog of NCBI NO: 21322752 NR Description: cold shock protein-1 [Triticum aestivum]
  misc_feature (8)..(198): Homolog of NCBI NO: 40363759 NR Description: putative glycine-rich protein [Triticum aestivum]
  misc_feature (1)..(202): Homolog of NCBI NO: 18398546 NR Description: glycine-rich, zinc-finger DNA-binding protein
  misc_feature (10)..(202): Homolog of NCBI NO: 7442089 NR Description: glycine-rich protein T13L16.11 - Arabidopsis
  misc_feature (87)..(198): Homolog of NCBI NO: 21322752 NR Description: cold shock protein-1 [Triticum aestivum]
  misc_feature (1)..(199): Homolog of NCBI NO: 15233440 NR Description: glycine-rich protein [Arabidopsis thaliana]

SEQ ID NO: 103698 - protein, 184 aa, Arabidopsis thaliana; identical to SEQ ID NO: 26303
  peptide (1)..(184): Ceres Seq. ID no. 13613378

SEQ ID NO: 103699 - DNA, 1361 bp, Arabidopsis thaliana
  misc_feature (1)..(1361): Ceres Seq. ID no. 13613379
  misc_feature: MA Experiment ID: 108462 Result: Down-regulated in Transcription
  misc_feature: MA Experiment 108462 PARAMETER Experiment Name: At_Germinating_Seeds_cDNA_P Parameter: Age (day) Value: 2 vs. 0
  misc_feature: MA Experiment 108462 PARAMETER Experiment Name: At_Germinating_Seeds_cDNA_P Parameter: Tissue Value: Germinating Seeds
  misc_feature: MA Experiment ID: 108488 Result: Down-regulated in Transcription
  misc_feature: MA Experiment ID: 108572 Result: Down-regulated in Transcription
  misc_feature: MA Experiment 108572 PARAMETER Experiment Name: At_Drought_cDNA_P Parameter: Timepoint (hr) Value: 1
  misc_feature: MA Experiment 108572 PARAMETER Experiment Name: At_Drought_cDNA_P Parameter: Tissue Value: Aerial
  misc_feature: MA Experiment 108572 PARAMETER Experiment Name: At_Drought_cDNA_P Parameter: Treatment Value: Drought vs. No Drought
  misc_feature: MA Experiment ID: 108573 Result: Down-regulated in Transcription
  misc_feature: MA Experiment 108573 PARAMETER Experiment Name: At_Drought_cDNA_P Parameter: Timepoint (hr) Value: 6
  misc_feature: MA Experiment 108573 PARAMETER Experiment Name: At_Drought_cDNA_P Parameter: Tissue Value: Aerial
  misc_feature: MA Experiment 108573 PARAMETER Experiment Name: At_Drought_cDNA_P Parameter: Treatment Value: Drought vs. No Drought
  misc_feature: MA Experiment ID: 108576 Result: Down-regulated in Transcription
  misc_feature: MA Experiment 108576 PARAMETER Experiment Name: At_42deg_Heat_cDNA_P Parameter: Temperature (deg C) Value: 42 vs. 22
  misc_feature: MA Experiment 108576 PARAMETER Experiment Name: At_42deg_Heat_cDNA_P Parameter: Timepoint (hr) Value: 1
  misc_feature: MA Experiment 108576 PARAMETER Experiment Name: At_42deg_Heat_cDNA_P Parameter: Tissue Value: Aerial
  misc_feature: MA Experiment ID: 108577 Result: Down-regulated in Transcription
  misc_feature: MA Experiment 108577 PARAMETER Experiment Name: At_42deg_Heat_cDNA_P Parameter: Temperature (deg C) Value: 42 vs. 22
  misc_feature: MA Experiment 108577 PARAMETER Experiment Name: At_42deg_Heat_cDNA_P Parameter: Timepoint (hr) Value: 6
  misc_feature: MA Experiment 108577 PARAMETER Experiment Name: At_42deg_Heat_cDNA_P Parameter: Tissue Value: Aerial
  misc_feature: MA Experiment ID: 108579 Result: Up-regulated in Transcription
  misc_feature: MA Experiment 108579 PARAMETER Experiment Name: At_4deg_Cold_cDNA_P Parameter: Temperature (deg C) Value: 4 vs. 22
  misc_feature: MA Experiment 108579 PARAMETER Experiment Name: At_4deg_Cold_cDNA_P Parameter: Timepoint (hr) Value: 6
  misc_feature: MA Experiment 108579 PARAMETER Experiment Name: At_4deg_Cold_cDNA_P Parameter: Tissue Value: Aerial
  misc_feature: MA Experiment ID: 108605 Result: Down-regulated in Transcription
  misc_feature: MA Experiment 108605 PARAMETER Experiment Name: At_100uM_ABA_cDNA_P Parameter: Timepoint (hr) Value: 6
  misc_feature: MA Experiment 108605 PARAMETER Experiment Name: At_100uM_ABA_cDNA_P Parameter: Tissue Value: Aerial
  misc_feature: MA Experiment 108605 PARAMETER Experiment Name: At_100uM_ABA_cDNA_P Parameter: Treatment Value: 100uM ABA vs. No Treatment
  misc_feature: MA Experiment ID: 108607 Result: Down-regulated in Transcription
  misc_feature: MA Experiment 108607 PARAMETER Experiment Name: At_100uM_ABA_cDNA_P Parameter: Timepoint (hr) Value: 4
  misc_feature: MA Experiment 108607 PARAMETER Experiment Name: At_100uM_ABA_cDNA_P Parameter: Tissue Value: Aerial
  misc_feature: MA Experiment 108607 PARAMETER Experiment Name: At_100uM_ABA_cDNA_P Parameter: Treatment Value: 100uM ABA vs. No Treatment
  misc_feature: MA Experiment ID: 108609 Result: Down-regulated in Transcription
  misc_feature: MA Experiment 108609 PARAMETER Experiment Name: At_100uM_ABA_cDNA_P Parameter: Timepoint (hr) Value: 24
  misc_feature: MA Experiment 108609 PARAMETER Experiment Name: At_100uM_ABA_cDNA_P Parameter: Tissue Value: Aerial
  misc_feature: MA Experiment 108609 PARAMETER Experiment Name: At_100uM_ABA_cDNA_P Parameter: Treatment Value: 100uM ABA vs. No Treatment
  misc_feature: MA Experiment ID: 20000069 Result: Up-regulated in Transcription
  misc_feature: MA Experiment 20000069 PARAMETER Experiment Name: At_100uM_ABA_Mutants_cDNA_P Parameter: Plant Line Value: CS23
  misc_feature: MA Experiment 20000069 PARAMETER Experiment Name: At_100uM_ABA_Mutants_cDNA_P Parameter: Timepoint (hr) Value: 6
  misc_feature: MA Experiment 20000069 PARAMETER Experiment Name: At_100uM_ABA_Mutants_cDNA_P Parameter: Tissue Value: Aerial
  misc_feature: MA Experiment 20000069 PARAMETER Experiment Name: At_100uM_ABA_Mutants_cDNA_P Parameter: Treatment Value: 100uM ABA vs. No Treatment
  misc_feature: MA Experiment ID: 20000070 Result: Up-regulated in Transcription
  misc_feature: MA Experiment 20000070 PARAMETER Experiment Name: At_100uM_ABA_Mutants_cDNA_P Parameter: Plant Line Value: CS24
  misc_feature: MA Experiment 20000070 PARAMETER Experiment Name: At_100uM_ABA_Mutants_cDNA_P Parameter: Timepoint (hr) Value: 6
  misc_feature: MA Experiment 20000070 PARAMETER Experiment Name: At_100uM_ABA_Mutants_cDNA_P Parameter: Tissue Value: Aerial
  misc_feature: MA Experiment 20000070 PARAMETER Experiment Name: At_100uM_ABA_Mutants_cDNA_P Parameter: Treatment Value: 100uM ABA vs. No Treatment
  misc_feature: MA Experiment ID: 20000071 Result: Up-regulated in Transcription
  misc_feature: MA Experiment 20000071 PARAMETER Experiment Name: At_100uM_ABA_Mutants_cDNA_P Parameter: Plant Line Value: CS8104
  misc_feature: MA Experiment 20000071 PARAMETER Experiment Name: At_100uM_ABA_Mutants_cDNA_P Parameter: Timepoint (hr) Value: 6
  misc_feature: MA Experiment 20000071 PARAMETER Experiment Name: At_100uM_ABA_Mutants_cDNA_P Parameter: Tissue Value: Aerial
  misc_feature: MA Experiment 20000071 PARAMETER Experiment Name: At_100uM_ABA_Mutants_cDNA_P Parameter: Treatment Value: 100uM ABA vs. No Treatment
  misc_feature: MA Experiment ID: 20000072 Result: Up-regulated in Transcription
  misc_feature: MA Experiment 20000072 PARAMETER Experiment Name: At_100uM_ABA_Mutants_cDNA_P Parameter: Plant Line Value: CS8105
  misc_feature: MA Experiment 20000072 PARAMETER Experiment Name: At_100uM_ABA_Mutants_cDNA_P Parameter: Timepoint (hr) Value: 6
  misc_feature: MA Experiment 20000072 PARAMETER Experiment Name: At_100uM_ABA_Mutants_cDNA_P Parameter: Tissue Value: Aerial
  misc_feature: MA Experiment 20000072 PARAMETER Experiment Name: At_100uM_ABA_Mutants_cDNA_P Parameter: Treatment Value: 100uM ABA vs. No Treatment
  misc_feature: MA Experiment ID: 20000086 Result: Up-regulated in Transcription
  misc_feature: MA Experiment 20000086 PARAMETER Experiment Name: At_100uM_ABA_Mutants_cDNA_P Parameter: Plant Line Value: CS22
  misc_feature: MA Experiment 20000086 PARAMETER Experiment Name: At_100uM_ABA_Mutants_cDNA_P Parameter: Timepoint (hr) Value: 6
  misc_feature: MA Experiment 20000086 PARAMETER Experiment Name: At_100uM_ABA_Mutants_cDNA_P Parameter: Tissue Value: Aerial
  misc_feature: MA Experiment 20000086 PARAMETER Experiment Name: At_100uM_ABA_Mutants_cDNA_P Parameter: Treatment Value: 100uM ABA vs. No Treatment
  misc_feature: MA Experiment ID: 20000087 Result: Up-regulated in Transcription
  misc_feature: MA Experiment 20000087 PARAMETER Experiment Name: At_100uM_ABA_Mutants_cDNA_P Parameter: Plant Line Value: WS
  misc_feature: MA Experiment 20000087 PARAMETER Experiment Name: At_100uM_ABA_Mutants_cDNA_P Parameter: Timepoint (hr) Value: 6
  misc_feature: MA Experiment 20000087 PARAMETER Experiment Name: At_100uM_ABA_Mutants_cDNA_P Parameter: Tissue Value: Aerial
  misc_feature: MA Experiment 20000087 PARAMETER Experiment Name: At_100uM_ABA_Mutants_cDNA_P Parameter: Treatment Value: 100uM ABA vs. No Treatment
  misc_feature: MA Experiment ID: 20000088 Result: Up-regulated in Transcription
  misc_feature: MA Experiment 20000088 PARAMETER Experiment Name: At_100uM_ABA_Mutants_cDNA_P Parameter: Plant Line Value: Landsberg
  misc_feature: MA Experiment 20000088 PARAMETER Experiment Name: At_100uM_ABA_Mutants_cDNA_P Parameter: Timepoint (hr) Value: 6
  misc_feature: MA Experiment 20000088 PARAMETER Experiment Name: At_100uM_ABA_Mutants_cDNA_P Parameter: Tissue Value: Aerial
  misc_feature: MA Experiment 20000088 PARAMETER Experiment Name: At_100uM_ABA_Mutants_cDNA_P Parameter: Treatment Value: 100uM ABA vs. No Treatment
  misc_feature: MA Experiment ID: 20000089 Result: Up-regulated in Transcription
  misc_feature: MA Experiment ID: 20000090 Result: Up-regulated in Transcription
  misc_feature: MA Experiment ID: 20000111 Result: Down-regulated in Transcription
  misc_feature: MA Experiment 20000111 PARAMETER Experiment Name: At_42deg_Heat_cDNA_P Parameter: Temperature (deg C) Value: 42 vs. 22
  misc_feature: MA Experiment 20000111 PARAMETER Experiment Name: At_42deg_Heat_cDNA_P Parameter: Timepoint (hr) Value: 6
  misc_feature: MA Experiment 20000111 PARAMETER Experiment Name: At_42deg_Heat_cDNA_P Parameter: Tissue Value: Aerial
  misc_feature: MA Experiment ID: 20000112 Result: Down-regulated in Transcription
  misc_feature: MA Experiment 20000112 PARAMETER Experiment Name: At_42deg_Heat_cDNA_P Parameter: Temperature (deg C) Value: 42 vs. 22
  misc_feature: MA Experiment 20000112 PARAMETER Experiment Name: At_42deg_Heat_cDNA_P Parameter: Timepoint (hr) Value: 2
  misc_feature: MA Experiment 20000112 PARAMETER Experiment Name: At_42deg_Heat_cDNA_P Parameter: Tissue Value: Aerial
  misc_feature: MA Experiment ID: 20000113 Result: Down-regulated in Transcription
  misc_feature: MA Experiment 20000113 PARAMETER Experiment Name: At_42deg_Heat_cDNA_P Parameter: Temperature (deg C) Value: 42 vs. 22
  misc_feature: MA Experiment 20000113 PARAMETER Experiment Name: At_42deg_Heat_cDNA_P Parameter: Timepoint (hr) Value: 8
  misc_feature: MA Experiment 20000113 PARAMETER Experiment Name: At_42deg_Heat_cDNA_P Parameter: Tissue Value: Aerial
  misc_feature: MA Experiment ID: 20000117 Result: Up-regulated in Transcription
  misc_feature: MA Experiment 20000117 PARAMETER Experiment Name: At_100uM_ABA_Mutants_cDNA_P Parameter: Plant Line Value: Columbia
  misc_feature: MA Experiment 20000117 PARAMETER Experiment Name: At_100uM_ABA_Mutants_cDNA_P Parameter: Timepoint (hr) Value: 6
  misc_feature: MA Experiment 20000117 PARAMETER Experiment Name: At_100uM_ABA_Mutants_cDNA_P Parameter: Tissue Value: Aerial
  misc_feature: MA Experiment 20000117 PARAMETER Experiment Name: At_100uM_ABA_Mutants_cDNA_P Parameter: Treatment Value: 100uM ABA vs. No Treatment
  misc_feature: MA Experiment ID: 20000173 Result: Down-regulated in Transcription
  misc_feature: MA Experiment 20000173 PARAMETER Experiment Name: At_42deg_Heat_P Parameter: Age (day) Value: 14
  misc_feature: MA Experiment 20000173 PARAMETER Experiment Name: At_42deg_Heat_P Parameter: Organism Value: A. thaliana
  misc_feature: MA Experiment 20000173 PARAMETER Experiment Name: At_42deg_Heat_P Parameter: Plant Line Value: WS
  misc_feature: MA Experiment 20000173 PARAMETER Experiment Name: At_42deg_Heat_P Parameter: Temperature (deg C) Value: 42 vs. 22
  misc_feature: MA Experiment 20000173 PARAMETER Experiment Name: At_42deg_Heat_P Parameter: Timepoint (hr) Value: 6
  misc_feature: MA Experiment 20000173 PARAMETER Experiment Name: At_42deg_Heat_P Parameter: Tissue Value: Aerial
  misc_feature: MA Experiment ID: 20000213 Result: Up-regulated in Transcription
  misc_feature: MA Experiment 20000213 PARAMETER Experiment Name: At_4deg_Cold_P Parameter: Timepoint (hr) Value: 2
  misc_feature: MA Experiment ID: 20000453 Result: Down-regulated in Transcription
  misc_feature: MA Experiment 20000453 PARAMETER Experiment Name: At_100uM_ABA_P Parameter: Age (day) Value: 15
  misc_feature: MA Experiment 20000453 PARAMETER Experiment Name: At_100uM_ABA_P Parameter: Organism Value: A. thaliana
  misc_feature: MA Experiment 20000453 PARAMETER Experiment Name: At_100uM_ABA_P Parameter: Plant Line Value: WS
  misc_feature: MA Experiment 20000453 PARAMETER Experiment Name: At_100uM_ABA_P Parameter: Timepoint (hr) Value: 24
  misc_feature: MA Experiment 20000453 PARAMETER Experiment Name: At_100uM_ABA_P Parameter: Tissue Value: Aerial
  misc_feature: MA Experiment 20000453 PARAMETER Experiment Name: At_100uM_ABA_P Parameter: Treatment Value: 100uM ABA vs. No Treatment
  misc_feature: MA Experiment ID: 20001247 Result: Down-regulated in Transcription
  misc_feature: MA Experiment 20001247 PARAMETER Experiment Name: At_Far-red-induction_P Parameter: Age (day) Value: 7
  misc_feature: MA Experiment 20001247 PARAMETER Experiment Name: At_Far-red-induction_P Parameter: Light Value: Far-red vs. White
  misc_feature: MA Experiment 20001247 PARAMETER Experiment Name: At_Far-red-induction_P Parameter: Organism Value: A. thaliana
  misc_feature: MA Experiment 20001247 PARAMETER Experiment Name: At_Far-red-induction_P Parameter: Plant Line Value: Columbia
  misc_feature: MA Experiment 20001247 PARAMETER Experiment Name: At_Far-red-induction_P Parameter: Timepoint (hr) Value: 1
  misc_feature: MA Experiment 20001247 PARAMETER Experiment Name: At_Far-red-induction_P Parameter: Tissue Value: Whole Plant
  misc_feature: MA Experiment ID: 20001248 Result: Up-regulated in Transcription
  misc_feature: MA Experiment 20001248 PARAMETER Experiment Name: At_Far-red-induction_P Parameter: Age (day) Value: 7
  misc_feature: MA Experiment 20001248 PARAMETER Experiment Name: At_Far-red-induction_P Parameter: Light Value: Far-red vs. White
  misc_feature: MA Experiment 20001248 PARAMETER Experiment Name: At_Far-red-induction_P Parameter: Organism Value: A. thaliana
  misc_feature: MA Experiment 20001248 PARAMETER Experiment Name: At_Far-red-induction_P Parameter: Plant Line Value: Columbia
  misc_feature: MA Experiment 20001248 PARAMETER Experiment Name: At_Far-red-induction_P Parameter: Timepoint (hr) Value: 4
  misc_feature: MA Experiment 20001248 PARAMETER Experiment Name: At_Far-red-induction_P Parameter: Tissue Value: Whole Plant
  misc_feature: MA Experiment ID: 20001557 Result: Up-regulated in Transcription
  misc_feature: MA Experiment 20001557 PARAMETER Experiment Name: At_Drought_Soil_Dry_P Parameter: Age (day) Value: 27
  misc_feature: MA Experiment 20001557 PARAMETER Experiment Name: At_Drought_Soil_Dry_P Parameter: Organism Value: A. thaliana
  misc_feature: MA Experiment 20001557 PARAMETER Experiment Name: At_Drought_Soil_Dry_P Parameter: Plant Line Value: WS
  misc_feature: MA Experiment 20001557 PARAMETER Experiment Name: At_Drought_Soil_Dry_P Parameter: Post Timepoint (hr) Value: 3
  misc_feature: MA Experiment 20001557 PARAMETER Experiment Name: At_Drought_Soil_Dry_P Parameter: Post-Treatment Value: Re-Water vs. No Drought
  misc_feature: MA Experiment 20001557 PARAMETER Experiment Name: At_Drought_Soil_Dry_P Parameter: Timepoint (day) Value: 13
  misc_feature: MA Experiment 20001557 PARAMETER Experiment Name: At_Drought_Soil_Dry_P Parameter: Treatment Value: Drought vs. No Drought
ttgtatgacataatgacgacgagacgaaggacaaaattgtcatttaaggaataaaagatattcttacaaagatattttttgctcgaaacgaggagaaaaaatcattagttatcgaaaatgctcacatgatgtgggcctaaccactaacccaattaaccacacatcttaatcagagtaagttgaaacaaatctttcagcaaaccctagaaaacatgtttaaccctagttattacgtcacacctgttctataaattaaggctgcgtcttatcacctcaaatcacataagtctctctcttacattttgaaaccctaatttctcttcttttccccaaaaaaaaatgtctgaagttgagtaccggtgctttgtcggcggccttgcctgggccaccaatgatgaagatcttcaaaggacgttctcacagttcggcgacgttatcgattctaaggtctgttacacgagagatcggtctcccggatcgagccgattccgatgattctgatcctcgacggatctgattccgatctgtttctctgttacttgattcgattactgttactatgttctctctcgttctttgttactgttacttaatttgtcccatcggtacgttcatcttcctgcttctatgagctcggagatcgatcgatttttgctttatattcatcgctttgttttatattccttccacgattgtttttgctgatgtgtatgattttgtttgtttacagatcattaacgaccgcgagagtggaagatcaaggggattcggattcgtcaccttcaaggacgagaaagccatgagggatgcgattgaagagatgaacggtaaagagctcgatggacgtgtcatcaccgtgaacgaggctcagtcgagaggtagcggcggtggcggaggaggccgtggtggaagcggtggtggttaccgcagcggaggcggtggtggatactcaggaggcggtggcggcggatactcaggaggaggcggtggtggttacgagagacgtagcggaggttacggatctggtggaggcggtggtggccgaggatacggtggtggtggacgccgtgagggaggtggctacggaggcggtgatggtggaagttacggaggcggtggtggcggctggtaatcaaagatagagttgtttgcgtgctgctgctctgtttttggtttagatttggttttgtgtcaccacttctggtttggttatcgttcgtttggtttacttttttgatgaaacagtttcgtttaagtcttctttgtctggaacgaaatgttaattcgcgtgttgtttactaaatttataacgtttccttttaaccagattcgagattttccctcaaataatttatcttgtt

SEQ ID NO: 103700 - protein, 110 aa, Arabidopsis thaliana; identical to SEQ ID NO: 22060
  peptide (1)..(110): Ceres Seq. ID no. 13613380
  misc_feature (30)..(109): Pfam Name: Herpesvirus large structural phosphoprotein UL32 Pfam Description: Herpesvirus large structural phosphoprotein UL32
  misc_feature (1)..(110): Homolog of NCBI NO: 15235002 NR Description: glycine-rich RNA-binding protein 8 (GRP8) (CCR1)
  misc_feature (1)..(110): Homolog of NCBI NO: 1346180 NR Description: Glycine-rich RNA-binding protein GRP1A
  misc_feature (1)..(110): Homolog of NCBI NO: 14334648 NR Description: putative glycine-rich protein [Arabidopsis
  misc_feature (1)..(106): Homolog of NCBI NO: 20152613 NR Description: putative glycine rich protein [Rumex obtusifolius]
  misc_feature (1)..(110): Homolog of NCBI NO: 2331131 NR Description: glycine-rich protein [Oryza sativa]
  misc_feature (1)..(104): Homolog of NCBI NO: 7439987 NR Description: glycine-rich RNA-binding protein - rice
  misc_feature (1)..(108): Homolog of NCBI NO: 7439982 NR Description: RNA-binding glycine-rich protein-1 (RGP-1c) -
  misc_feature (1)..(109): Homolog of NCBI NO: 7439985 NR Description: glycine-rich RNA-binding protein - rice
  misc_feature (1)..(110): Homolog of NCBI NO: 15226605 NR Description: glycine-rich RNA-binding protein (AtGRP7)
  misc_feature (1)..(108): Homolog of NCBI NO: 18076086 NR Description: glycine-rich RNA-binding protein [Ricinus

SEQ ID NO: 103701 - protein, 103 aa, Arabidopsis thaliana; identical to SEQ ID NO: 22061
  peptide (1)..(103): Ceres Seq. ID no. 13613381
  misc_feature (23)..(102): Pfam Name: Herpesvirus large structural phosphoprotein UL32 Pfam Description: Herpesvirus large structural phosphoprotein UL32
  misc_feature (1)..(103): Homolog of NCBI NO: 15235002 NR Description: glycine-rich RNA-binding protein 8 (GRP8) (CCR1)
  misc_feature (1)..(103): Homolog of NCBI NO: 1346180 NR Description: Glycine-rich RNA-binding protein GRP1A
  misc_feature (1)..(103): Homolog of NCBI NO: 14334648 NR Description: putative glycine-rich protein [Arabidopsis
  misc_feature (1)..(99): Homolog of NCBI NO: 20152613 NR Description: putative glycine rich protein [Rumex obtusifolius]
  misc_feature (1)..(103): Homolog of NCBI NO: 2331131 NR Description: glycine-rich protein [Oryza sativa]
  misc_feature (1)..(97): Homolog of NCBI NO: 7439987 NR Description: glycine-rich RNA-binding protein - rice
  misc_feature (1)..(101): Homolog of NCBI NO: 7439982 NR Description: RNA-binding glycine-rich protein-1 (RGP-1c) -
  misc_feature (1)..(102): Homolog of NCBI NO: 7439985 NR Description: glycine-rich RNA-binding protein - rice
  misc_feature (1)..(103): Homolog of NCBI NO: 15226605 NR Description: glycine-rich RNA-binding protein (AtGRP7)
  misc_feature (1)..(101): Homolog of NCBI NO: 18076086 NR Description: glycine-rich RNA-binding protein [Ricinus

SEQ ID NO: 103702 - DNA, 767 bp, Arabidopsis thaliana
  misc_feature (1)..(767): Ceres Seq. ID no. 13613385
  misc_feature: MA Experiment ID: 108462 Result: Down-regulated in Transcription
  misc_feature: MA Experiment 108462 PARAMETER Experiment Name: At_Germinating_Seeds_cDNA_P Parameter: Age (day) Value: 2 vs. 0
  misc_feature: MA Experiment 108462 PARAMETER Experiment Name: At_Germinating_Seeds_cDNA_P Parameter: Tissue Value: Germinating Seeds
  misc_feature: MA Experiment ID: 108463 Result: Down-regulated in Transcription
  misc_feature: MA Experiment 108463 PARAMETER Experiment Name: At_Germinating_Seeds_cDNA_P Parameter: Age (day) Value: 3 vs. 0
  misc_feature: MA Experiment 108463 PARAMETER Experiment Name: At_Germinating_Seeds_cDNA_P Parameter: Tissue Value: Germinating Seeds
  misc_feature: MA Experiment ID: 108464 Result: Down-regulated in Transcription
  misc_feature: MA Experiment 108464 PARAMETER Experiment Name: At_Germinating_Seeds_cDNA_P Parameter: Age (day) Value: 4 vs. 0
  misc_feature: MA Experiment 108464 PARAMETER Experiment Name: At_Germinating_Seeds_cDNA_P Parameter: Tissue Value: Germinating Seeds
  misc_feature: MA Experiment ID: 108605 Result: Down-regulated in Transcription
  misc_feature: MA Experiment 108605 PARAMETER Experiment Name: At_100uM_ABA_cDNA_P Parameter: Timepoint (hr) Value: 6
  misc_feature: MA Experiment 108605 PARAMETER Experiment Name: At_100uM_ABA_cDNA_P Parameter: Tissue Value: Aerial
  misc_feature: MA Experiment 108605 PARAMETER Experiment Name: At_100uM_ABA_cDNA_P Parameter: Treatment Value: 100uM ABA vs. No Treatment
  misc_feature: MA Experiment ID: 108607 Result: Down-regulated in Transcription
  misc_feature: MA Experiment 108607 PARAMETER Experiment Name: At_100uM_ABA_cDNA_P Parameter: Timepoint (hr) Value: 4
  misc_feature: MA Experiment 108607 PARAMETER Experiment Name: At_100uM_ABA_cDNA_P Parameter: Tissue Value: Aerial
  misc_feature: MA Experiment 108607 PARAMETER Experiment Name: At_100uM_ABA_cDNA_P Parameter: Treatment Value: 100uM ABA vs. No Treatment
  misc_feature: MA Experiment ID: 108609 Result: Down-regulated in Transcription
  misc_feature: MA Experiment 108609 PARAMETER Experiment Name: At_100uM_ABA_cDNA_P Parameter: Timepoint (hr) Value: 24
  misc_feature: MA Experiment 108609 PARAMETER Experiment Name: At_100uM_ABA_cDNA_P Parameter: Tissue Value: Aerial
  misc_feature: MA Experiment 108609 PARAMETER Experiment Name: At_100uM_ABA_cDNA_P Parameter: Treatment Value: 100uM ABA vs. No Treatment
  misc_feature: MA Experiment ID: 20000069 Result: Up-regulated in Transcription
  misc_feature: MA Experiment 20000069 PARAMETER Experiment Name: At_100uM_ABA_Mutants_cDNA_P Parameter: Plant Line Value: CS23
  misc_feature: MA Experiment 20000069 PARAMETER Experiment Name: At_100uM_ABA_Mutants_cDNA_P Parameter: Timepoint (hr) Value: 6
  misc_feature: MA Experiment 20000069 PARAMETER Experiment Name: At_100uM_ABA_Mutants_cDNA_P Parameter: Tissue Value: Aerial
  misc_feature: MA Experiment 20000069 PARAMETER Experiment Name: At_100uM_ABA_Mutants_cDNA_P Parameter: Treatment Value: 100uM ABA vs. No Treatment
  misc_feature: MA Experiment ID: 20000070 Result: Up-regulated in Transcription
  misc_feature: MA Experiment 20000070 PARAMETER Experiment Name: At_100uM_ABA_Mutants_cDNA_P Parameter: Plant Line Value: CS24
  misc_feature: MA Experiment 20000070 PARAMETER Experiment Name: At_100uM_ABA_Mutants_cDNA_P Parameter: Timepoint (hr) Value: 6
  misc_feature: MA Experiment 20000070 PARAMETER Experiment Name: At_100uM_ABA_Mutants_cDNA_P Parameter: Tissue Value: Aerial
  misc_feature: MA Experiment 20000070 PARAMETER Experiment Name: At_100uM_ABA_Mutants_cDNA_P Parameter: Treatment Value: 100uM ABA vs. No Treatment
  misc_feature: MA Experiment ID: 20000072 Result: Up-regulated in Transcription
  misc_feature: MA Experiment 20000072 PARAMETER Experiment Name: At_100uM_ABA_Mutants_cDNA_P Parameter: Plant Line Value: CS8105
  misc_feature: MA Experiment 20000072 PARAMETER Experiment Name: At_100uM_ABA_Mutants_cDNA_P Parameter: Timepoint (hr) Value: 6
  misc_feature: MA Experiment 20000072 PARAMETER Experiment Name: At_100uM_ABA_Mutants_cDNA_P Parameter: Tissue Value: Aerial
  misc_feature: MA Experiment 20000072 PARAMETER Experiment Name: At_100uM_ABA_Mutants_cDNA_P Parameter: Treatment Value: 100uM ABA vs. No Treatment
  misc_feature: MA Experiment ID: 20000086 Result: Up-regulated in Transcription
  misc_feature: MA Experiment 20000086 PARAMETER Experiment Name: At_100uM_ABA_Mutants_cDNA_P Parameter: Plant Line Value: CS22
  misc_feature: MA Experiment 20000086 PARAMETER Experiment Name: At_100uM_ABA_Mutants_cDNA_P Parameter: Timepoint (hr) Value: 6
  misc_feature: MA Experiment 20000086 PARAMETER Experiment Name: At_100uM_ABA_Mutants_cDNA_P Parameter: Tissue Value: Aerial
  misc_feature: MA Experiment 20000086 PARAMETER Experiment Name: At_100uM_ABA_Mutants_cDNA_P Parameter: Treatment Value: 100uM ABA vs. No Treatment
  misc_feature: MA Experiment ID: 20000087 Result: Up-regulated in Transcription
  misc_feature: MA Experiment 20000087 PARAMETER Experiment Name: At_100uM_ABA_Mutants_cDNA_P Parameter: Plant Line Value: WS
  misc_feature: MA Experiment 20000087 PARAMETER Experiment Name: At_100uM_ABA_Mutants_cDNA_P Parameter: Timepoint (hr) Value: 6
  misc_feature: MA Experiment 20000087 PARAMETER Experiment Name: At_100uM_ABA_Mutants_cDNA_P Parameter: Tissue Value: Aerial
  misc_feature: MA Experiment 20000087 PARAMETER Experiment Name: At_100uM_ABA_Mutants_cDNA_P Parameter: Treatment Value: 100uM ABA vs. No Treatment
  misc_feature: MA Experiment ID: 20000088 Result: Up-regulated in Transcription
  misc_feature: MA Experiment 20000088 PARAMETER Experiment Name: At_100uM_ABA_Mutants_cDNA_P Parameter: Plant Line Value: Landsberg
  misc_feature: MA Experiment 20000088 PARAMETER Experiment Name: At_100uM_ABA_Mutants_cDNA_P Parameter: Timepoint (hr) Value: 6
  misc_feature: MA Experiment 20000088 PARAMETER Experiment Name: At_100uM_ABA_Mutants_cDNA_P Parameter: Tissue Value: Aerial
  misc_feature: MA Experiment 20000088 PARAMETER Experiment Name: At_100uM_ABA_Mutants_cDNA_P Parameter: Treatment Value: 100uM ABA vs. No Treatment
  misc_feature: MA Experiment ID: 20000089 Result: Up-regulated in Transcription
  misc_feature: MA Experiment ID: 20000090 Result: Up-regulated in Transcription
  misc_feature: MA Experiment ID: 20000111 Result: Down-regulated in Transcription
  misc_feature: MA Experiment 20000111 PARAMETER Experiment Name: At_42deg_Heat_cDNA_P Parameter: Temperature (deg C) Value: 42 vs. 22
  misc_feature: MA Experiment 20000111 PARAMETER Experiment Name: At_42deg_Heat_cDNA_P Parameter: Timepoint (hr) Value: 6
  misc_feature: MA Experiment 20000111 PARAMETER Experiment Name: At_42deg_Heat_cDNA_P Parameter: Tissue Value: Aerial
  misc_feature: MA Experiment ID: 20000112 Result: Down-regulated in Transcription
  misc_feature: MA Experiment 20000112 PARAMETER Experiment Name: At_42deg_Heat_cDNA_P Parameter: Temperature (deg C) Value: 42 vs. 22
  misc_feature: MA Experiment 20000112 PARAMETER Experiment Name: At_42deg_Heat_cDNA_P Parameter: Timepoint (hr) Value: 2
  misc_feature: MA Experiment 20000112 PARAMETER Experiment Name: At_42deg_Heat_cDNA_P Parameter: Tissue Value: Aerial
  misc_feature: MA Experiment ID: 20000117 Result: Up-regulated in Transcription
  misc_feature: MA Experiment 20000117 PARAMETER Experiment Name: At_100uM_ABA_Mutants_cDNA_P Parameter: Plant Line Value: Columbia
  misc_feature: MA Experiment 20000117 PARAMETER Experiment Name: At_100uM_ABA_Mutants_cDNA_P Parameter: Timepoint (hr) Value: 6
  misc_feature: MA Experiment 20000117 PARAMETER Experiment Name: At_100uM_ABA_Mutants_cDNA_P Parameter: Tissue Value: Aerial
  misc_feature: MA Experiment 20000117 PARAMETER Experiment Name: At_100uM_ABA_Mutants_cDNA_P Parameter: Treatment Value: 100uM ABA vs. No Treatment
  misc_feature: MA Experiment ID: 20000173 Result: Down-regulated in Transcription
  misc_feature: MA Experiment 20000173 PARAMETER Experiment Name: At_42deg_Heat_P Parameter: Age (day) Value: 14
  misc_feature: MA Experiment 20000173 PARAMETER Experiment Name: At_42deg_Heat_P Parameter: Organism Value: A. thaliana
  misc_feature: MA Experiment 20000173 PARAMETER Experiment Name: At_42deg_Heat_P Parameter: Plant Line Value: WS
  misc_feature: MA Experiment 20000173 PARAMETER Experiment Name: At_42deg_Heat_P Parameter: Temperature (deg C) Value: 42 vs. 22
  misc_feature: MA Experiment 20000173 PARAMETER Experiment Name: At_42deg_Heat_P Parameter: Timepoint (hr) Value: 6
  misc_feature: MA Experiment 20000173 PARAMETER Experiment Name: At_42deg_Heat_P Parameter: Tissue Value: Aerial
  misc_feature: MA Experiment ID: 20000213 Result: Up-regulated in Transcription
  misc_feature: MA Experiment 20000213 PARAMETER Experiment Name: At_4deg_Cold_P Parameter: Timepoint (hr) Value: 2
  misc_feature: MA Experiment ID: 20000453 Result: Down-regulated in Transcription
  misc_feature: MA Experiment 20000453 PARAMETER Experiment Name: At_100uM_ABA_P Parameter: Age (day) Value: 15
  misc_feature: MA Experiment 20000453 PARAMETER Experiment Name: At_100uM_ABA_P Parameter: Organism Value: A. thaliana
  misc_feature: MA Experiment 20000453 PARAMETER Experiment Name: At_100uM_ABA_P Parameter: Plant Line Value: WS
  misc_feature: MA Experiment 20000453 PARAMETER Experiment Name: At_100uM_ABA_P Parameter: Timepoint (hr) Value: 24
  misc_feature: MA Experiment 20000453 PARAMETER Experiment Name: At_100uM_ABA_P Parameter: Tissue Value: Aerial
  misc_feature: MA Experiment 20000453 PARAMETER Experiment Name: At_100uM_ABA_P Parameter: Treatment Value: 100uM ABA vs. No Treatment
  misc_feature: MA Experiment ID: 20001247 Result: Down-regulated in Transcription
  misc_feature: MA Experiment 20001247 PARAMETER Experiment Name: At_Far-red-induction_P Parameter: Age (day) Value: 7
  misc_feature: MA Experiment 20001247 PARAMETER Experiment Name: At_Far-red-induction_P Parameter: Light Value: Far-red vs. White
  misc_feature: MA Experiment 20001247 PARAMETER Experiment Name: At_Far-red-induction_P Parameter: Organism Value: A. thaliana
  misc_feature: MA Experiment 20001247 PARAMETER Experiment Name: At_Far-red-induction_P Parameter: Plant Line Value: Columbia
  misc_feature: MA Experiment 20001247 PARAMETER Experiment Name: At_Far-red-induction_P Parameter: Timepoint (hr) Value: 1
  misc_feature: MA Experiment 20001247 PARAMETER Experiment Name: At_Far-red-induction_P Parameter: Tissue Value: Whole Plant
  misc_feature: MA Experiment ID: 20001248 Result: Up-regulated in Transcription
  misc_feature: MA Experiment 20001248 PARAMETER Experiment Name: At_Far-red-induction_P Parameter: Age (day) Value: 7
  misc_feature: MA Experiment 20001248 PARAMETER Experiment Name: At_Far-red-induction_P Parameter: Light Value: Far-red vs. White
  misc_feature: MA Experiment 20001248 PARAMETER Experiment Name: At_Far-red-induction_P Parameter: Organism Value: A. thaliana
  misc_feature: MA Experiment 20001248 PARAMETER Experiment Name: At_Far-red-induction_P Parameter: Plant Line Value: Columbia
  misc_feature: MA Experiment 20001248 PARAMETER Experiment Name: At_Far-red-induction_P Parameter: Timepoint (hr) Value: 4
  misc_feature: MA Experiment 20001248 PARAMETER Experiment Name: At_Far-red-induction_P Parameter: Tissue Value: Whole Plant
  misc_feature: MA Experiment ID: 20001557 Result: Up-regulated in Transcription
  misc_feature: MA Experiment 20001557 PARAMETER Experiment Name: At_Drought_Soil_Dry_P Parameter: Age (day) Value: 27
  misc_feature: MA Experiment 20001557 PARAMETER Experiment Name: At_Drought_Soil_Dry_P Parameter: Organism Value: A. thaliana
  misc_feature: MA Experiment 20001557 PARAMETER Experiment Name: At_Drought_Soil_Dry_P Parameter: Plant Line Value: WS
  misc_feature: MA Experiment 20001557 PARAMETER Experiment Name: At_Drought_Soil_Dry_P Parameter: Post Timepoint (hr) Value: 3
  misc_feature: MA Experiment 20001557 PARAMETER Experiment Name: At_Drought_Soil_Dry_P Parameter: Post-Treatment Value: Re-Water vs. No Drought
  misc_feature: MA Experiment 20001557 PARAMETER Experiment Name: At_Drought_Soil_Dry_P Parameter: Timepoint (day) Value: 13
  misc_feature: MA Experiment 20001557 PARAMETER Experiment Name: At_Drought_Soil_Dry_P Parameter: Treatment Value: Drought vs. No Drought
aaatcacataagtctctctcttacattttgaaaccctaatttctcttcttttccccaaaaaaaaatgtctgaagttgagtaccggtgctttgtcggcggccttgcctgggccaccaatgatgaagatcttcaaaggacgttctcacagttcggcgacgttatcgattctaagatcattaacgaccgcgagagtggaagatcaaggggattcggattcgtcaccttcaaggacgagaaagccatgagggatgcgattgaagagatgaacggtaaagagctcgatggacgtgtcatcaccgtgaacgaggctcagtcgagaggtagcggcggtggcggaggaggccgtggtggaagcggtggtggttaccgcagcggaggcggtggtggatactcaggaggcggtggcggcggatactcaggaggaggcggtggtggttacgagagacgtagcggaggttacggatctggtggaggcggtggtggccgaggatacggtggtggtggacgccgtgagggaggtggctacggaggcggtgatggtggaagttacggaggcggtggtggcggctggtaatcaaagatagagttgtttgcgtgctgctgctctgtttttggtttagatttggttttgtgtcaccacttctggtttggttatcgttcgtttggtttacttttttgatgaaacagtttcgtttaagtcttctttgtctggaacgaaatgttaattcgcgtgttgtttactaaatttataacgtttccttttaacc

SEQ ID NO: 103703 - protein, 169 aa, Arabidopsis thaliana; identical to SEQ ID NO: 22059
  peptide (1)..(169): Ceres Seq. ID no. 13613386
  misc_feature (8)..(79): Pfam Name: RNA recognition motif. (a.k.a. RRM, RBD, or RNP domain) Pfam Description: RNA recognition motif. (a.k.a. RRM, RBD, or RNP
  misc_feature (1)..(169): Homolog of NCBI NO: 15235002 NR Description: glycine-rich RNA-binding protein 8 (GRP8) (CCR1)
  misc_feature (3)..(169): Homolog of NCBI NO: 15226605 NR Description: glycine-rich RNA-binding protein (AtGRP7)
  misc_feature (1)..(169): Homolog of NCBI NO: 544416 NR Description: Glycine-rich RNA-binding protein 10
  misc_feature (3)..(169): Homolog of NCBI NO: 1346181 NR Description: Glycine-rich RNA-binding protein GRP2A
  misc_feature (3)..(169): Homolog of NCBI NO: 21553354 NR Description: glycine-rich RNA binding protein 7 [Arabidopsis
  misc_feature (3)..(169): Homolog of NCBI NO: 1346180 NR Description: Glycine-rich RNA-binding protein GRP1A
  misc_feature (1)..(124): Homolog of NCBI NO: 30692254 NR Description: glycine-rich RNA-binding protein 8 (GRP8) (CCR1)
  misc_feature (1)..(161): Homolog of NCBI NO: 544426 NR Description: Glycine-rich RNA-binding protein
  misc_feature (2)..(168): Homolog of NCBI NO: 34851124 NR Description: putative glycine-rich RNA-binding protein [Prunus
  misc_feature (3)..(169): Homolog of NCBI NO: 30681492 NR Description: glycine-rich RNA-binding protein (AtGRP7)

SEQ ID NO: 103704 - protein, 110 aa, Arabidopsis thaliana; identical to SEQ ID NO: 22060
  peptide (1)..(110): Ceres Seq. ID no. 13613387
  misc_feature (30)..(109): Pfam Name: Herpesvirus large structural phosphoprotein UL32 Pfam Description: Herpesvirus large structural phosphoprotein UL32
  misc_feature (1)..(110): Homolog of NCBI NO: 15235002 NR Description: glycine-rich RNA-binding protein 8 (GRP8) (CCR1)
  misc_feature (1)..(110): Homolog of NCBI NO: 15226605 NR Description: glycine-rich RNA-binding protein (AtGRP7)
  misc_feature (1)..(110): Homolog of NCBI NO: 544416 NR Description: Glycine-rich RNA-binding protein 10
  misc_feature (1)..(110): Homolog of NCBI NO: 1346181 NR Description: Glycine-rich RNA-binding protein GRP2A
  misc_feature (1)..(110): Homolog of NCBI NO: 21553354 NR Description: glycine-rich RNA binding protein 7 [Arabidopsis
  misc_feature (1)..(110): Homolog of NCBI NO: 1346180 NR Description: Glycine-rich RNA-binding protein GRP1A
  misc_feature (1)..(65): Homolog of NCBI NO: 30692254 NR Description: glycine-rich RNA-binding protein 8 (GRP8) (CCR1)
  misc_feature (1)..(102): Homolog of NCBI NO: 544426 NR Description: Glycine-rich RNA-binding protein
  misc_feature (1)..(109): Homolog of NCBI NO: 34851124 NR Description: putative glycine-rich RNA-binding protein [Prunus
  misc_feature (1)..(110): Homolog of NCBI NO: 30681492 NR Description: glycine-rich RNA-binding protein (AtGRP7)

SEQ ID NO: 103705 - protein, 103 aa, Arabidopsis thaliana; identical to SEQ ID NO: 22061
  peptide (1)..(103): Ceres Seq. ID no. 13613388
  misc_feature (23)..(102): Pfam Name: Herpesvirus large structural phosphoprotein UL32 Pfam Description: Herpesvirus large structural phosphoprotein UL32
  misc_feature (1)..(103): Homolog of NCBI NO: 15235002 NR Description: glycine-rich RNA-binding protein 8 (GRP8) (CCR1)
  misc_feature (1)..(103): Homolog of NCBI NO: 15226605 NR Description: glycine-rich RNA-binding protein (AtGRP7)
  misc_feature (1)..(103): Homolog of NCBI NO: 544416 NR Description: Glycine-rich RNA-binding protein 10
  misc_feature (1)..(103): Homolog of NCBI NO: 1346181 NR Description: Glycine-rich RNA-binding protein GRP2A
  misc_feature (1)..(103): Homolog of NCBI NO: 21553354 NR Description: glycine-rich RNA binding protein 7 [Arabidopsis
  misc_feature (1)..(103): Homolog of NCBI NO: 1346180 NR Description: Glycine-rich RNA-binding protein GRP1A
  misc_feature (1)..(58): Homolog of NCBI NO: 30692254 NR Description: glycine-rich RNA-binding protein 8 (GRP8) (CCR1)
  misc_feature (1)..(95): Homolog of NCBI NO: 544426 NR Description: Glycine-rich RNA-binding protein
  misc_feature (1)..(102): Homolog of NCBI NO: 34851124 NR Description: putative glycine-rich RNA-binding protein [Prunus
  misc_feature (1)..(103): Homolog of NCBI NO: 30681492 NR Description: glycine-rich RNA-binding protein (AtGRP7)

SEQ ID NO: 103706 - DNA, 686 bp, Arabidopsis thaliana
  misc_feature (1)..(686): Ceres Seq. ID no. 13613393
  misc_feature: MA Experiment ID: 108435 Result: Up-regulated in Transcription
  misc_feature: MA Experiment 108435 PARAMETER Experiment Name: At_stm_Mutants_cDNA_P Parameter: Plant Line Value: wt Landsburg vs stm
  misc_feature: MA Experiment 108435 PARAMETER Experiment Name: At_stm_Mutants_cDNA_P Parameter: Tissue Value: Shoot Apical Meristem Region
  misc_feature: MA Experiment ID: 108572 Result: Down-regulated in Transcription
  misc_feature: MA Experiment 108572 PARAMETER Experiment Name: At_Drought_cDNA_P Parameter: Timepoint (hr) Value: 1
  misc_feature: MA Experiment 108572 PARAMETER Experiment Name: At_Drought_cDNA_P Parameter: Tissue Value: Aerial
  misc_feature: MA Experiment 108572 PARAMETER Experiment Name: At_Drought_cDNA_P Parameter: Treatment Value: Drought vs. No Drought
  misc_feature: MA Experiment ID: 108573 Result: Down-regulated in Transcription
  misc_feature: MA Experiment 108573 PARAMETER Experiment Name: At_Drought_cDNA_P Parameter: Timepoint (hr) Value: 6
  misc_feature: MA Experiment 108573 PARAMETER Experiment Name: At_Drought_cDNA_P Parameter: Tissue Value: Aerial
  misc_feature: MA Experiment 108573 PARAMETER Experiment Name: At_Drought_cDNA_P Parameter: Treatment Value: Drought vs. No Drought
  misc_feature: MA Experiment ID: 108579 Result: Up-regulated in Transcription
  misc_feature: MA Experiment 108579 PARAMETER Experiment Name: At_4deg_Cold_cDNA_P Parameter: Temperature (deg C) Value: 4 vs. 22
  misc_feature: MA Experiment 108579 PARAMETER Experiment Name: At_4deg_Cold_cDNA_P Parameter: Timepoint (hr) Value: 6
  misc_feature: MA Experiment 108579 PARAMETER Experiment Name: At_4deg_Cold_cDNA_P Parameter: Tissue Value: Aerial
  misc_feature: MA Experiment ID: 20000088 Result: Up-regulated in Transcription
  misc_feature: MA Experiment 20000088 PARAMETER Experiment Name: At_100uM_ABA_Mutants_cDNA_P Parameter: Plant Line Value: Landsberg
  misc_feature: MA Experiment 20000088 PARAMETER Experiment Name: At_100uM_ABA_Mutants_cDNA_P Parameter: Timepoint (hr) Value: 6
  misc_feature: MA Experiment 20000088 PARAMETER Experiment Name: At_100uM_ABA_Mutants_cDNA_P Parameter: Tissue Value: Aerial
  misc_feature: MA Experiment 20000088 PARAMETER Experiment Name: At_100uM_ABA_Mutants_cDNA_P Parameter: Treatment Value: 100uM ABA vs. No Treatment
  misc_feature: MA Experiment ID: 20000089 Result: Up-regulated in Transcription
  misc_feature: MA Experiment ID: 20000090 Result: Up-regulated in Transcription
  misc_feature: MA Experiment ID: 20000111 Result: Down-regulated in Transcription
  misc_feature: MA Experiment 20000111 PARAMETER Experiment Name: At_42deg_Heat_cDNA_P Parameter: Temperature (deg C) Value: 42 vs. 22
  misc_feature: MA Experiment 20000111 PARAMETER Experiment Name: At_42deg_Heat_cDNA_P Parameter: Timepoint (hr) Value: 6
  misc_feature: MA Experiment 20000111 PARAMETER Experiment Name: At_42deg_Heat_cDNA_P Parameter: Tissue Value: Aerial
  misc_feature: MA Experiment ID: 20000173 Result: Down-regulated in Transcription
  misc_feature: MA Experiment 20000173 PARAMETER Experiment Name: At_42deg_Heat_P Parameter: Age (day) Value: 14
  misc_feature: MA Experiment 20000173 PARAMETER Experiment Name: At_42deg_Heat_P Parameter: Organism Value: A. thaliana
  misc_feature: MA Experiment 20000173 PARAMETER Experiment Name: At_42deg_Heat_P Parameter: Plant Line Value: WS
  misc_feature: MA Experiment 20000173 PARAMETER Experiment Name: At_42deg_Heat_P Parameter: Temperature (deg C) Value: 42 vs. 22
  misc_feature: MA Experiment 20000173 PARAMETER Experiment Name: At_42deg_Heat_P Parameter: Timepoint (hr) Value: 6
  misc_feature: MA Experiment 20000173 PARAMETER Experiment Name: At_42deg_Heat_P Parameter: Tissue Value: Aerial
  misc_feature: MA Experiment ID: 20000213 Result: Up-regulated in Transcription
  misc_feature: MA Experiment 20000213 PARAMETER Experiment Name: At_4deg_Cold_P Parameter: Timepoint (hr) Value: 2
  misc_feature: MA Experiment ID: 20000453 Result: Down-regulated in Transcription
  misc_feature: MA Experiment 20000453 PARAMETER Experiment Name: At_100uM_ABA_P Parameter: Age (day) Value: 15
  misc_feature: MA Experiment 20000453 PARAMETER Experiment Name: At_100uM_ABA_P Parameter: Organism Value: A. thaliana
  misc_feature: MA Experiment 20000453 PARAMETER Experiment Name: At_100uM_ABA_P Parameter: Plant Line Value: WS
  misc_feature: MA Experiment 20000453 PARAMETER Experiment Name: At_100uM_ABA_P Parameter: Timepoint (hr) Value: 24
  misc_feature: MA Experiment 20000453 PARAMETER Experiment Name: At_100uM_ABA_P Parameter: Tissue Value: Aerial
  misc_feature: MA Experiment 20000453 PARAMETER Experiment Name: At_100uM_ABA_P Parameter: Treatment Value: 100uM ABA vs. No Treatment
  misc_feature: MA Experiment ID: 20001247 Result: Down-regulated in Transcription
  misc_feature: MA Experiment 20001247 PARAMETER Experiment Name: At_Far-red-induction_P Parameter: Age (day) Value: 7
  misc_feature: MA Experiment 20001247 PARAMETER Experiment Name: At_Far-red-induction_P Parameter: Light Value: Far-red vs. White
  misc_feature: MA Experiment 20001247 PARAMETER Experiment Name: At_Far-red-induction_P Parameter: Organism Value: A. thaliana
  misc_feature: MA Experiment 20001247 PARAMETER Experiment Name: At_Far-red-induction_P Parameter: Plant Line Value: Columbia
  misc_feature: MA Experiment 20001247 PARAMETER Experiment Name: At_Far-red-induction_P Parameter: Timepoint (hr) Value: 1
  misc_feature: MA Experiment 20001247 PARAMETER Experiment Name: At_Far-red-induction_P Parameter: Tissue Value: Whole Plant
  misc_feature: MA Experiment ID: 20001248 Result: Up-regulated in Transcription
  misc_feature: MA Experiment 20001248 PARAMETER Experiment Name: At_Far-red-induction_P Parameter: Age (day) Value: 7
  misc_feature: MA Experiment 20001248 PARAMETER Experiment Name: At_Far-red-induction_P Parameter: Light Value: Far-red vs. White
  misc_feature: MA Experiment 20001248 PARAMETER Experiment Name: At_Far-red-induction_P Parameter: Organism Value: A. thaliana
  misc_feature: MA Experiment 20001248 PARAMETER Experiment Name: At_Far-red-induction_P Parameter: Plant Line Value: Columbia
  misc_feature: MA Experiment 20001248 PARAMETER Experiment Name: At_Far-red-induction_P Parameter: Timepoint (hr) Value: 4
  misc_feature: MA Experiment 20001248 PARAMETER Experiment Name: At_Far-red-induction_P Parameter: Tissue Value: Whole Plant
  misc_feature: MA Experiment ID: 20001557 Result: Up-regulated in Transcription
  misc_feature: MA Experiment 20001557 PARAMETER Experiment Name: At_Drought_Soil_Dry_P Parameter: Age (day) Value: 27
  misc_feature: MA Experiment 20001557 PARAMETER Experiment Name: At_Drought_Soil_Dry_P Parameter: Organism Value: A. thaliana
  misc_feature: MA Experiment 20001557 PARAMETER Experiment Name: At_Drought_Soil_Dry_P Parameter: Plant Line Value: WS
  misc_feature: MA Experiment 20001557 PARAMETER Experiment Name: At_Drought_Soil_Dry_P Parameter: Post Timepoint (hr) Value: 3
  misc_feature: MA Experiment 20001557 PARAMETER Experiment Name: At_Drought_Soil_Dry_P Parameter: Post-Treatment Value: Re-Water vs. No Drought
  misc_feature: MA Experiment 20001557 PARAMETER Experiment Name: At_Drought_Soil_Dry_P Parameter: Timepoint (day) Value: 13
  misc_feature: MA Experiment 20001557 PARAMETER Experiment Name: At_Drought_Soil_Dry_P Parameter: Treatment Value: Drought vs. No Drought
acataagtctctctcttacattttgaaaccctaatttctcttcttttccccaaaaaaaaatgtctgaagttgagtaccggtgctttgtcggcggccttgcctgggccaccaatgatgaagatcttcaaaggacgttctcacagttcggcgacgttatcgattctaagatcattaacgaccgcgagagtggaagatcaaggggattcggattcgtcaccttcaaggacgagaaagccatgagggatgcgattgaagagatgaacggtaaagagctcgatggacgtgtcatcaccgtgaacgaggctcagtcgagaggtagcggcggtggcggcggatactcaggaggaggcggtggtggttacgagagacgtagcggaggttacggatctggtggaggcggtggtggccgaggatacggtggtggtggacgccgtgagggaggtggctacggaggcggtgatggtggaagttacggaggcggtggtggcggctggtaatcaaagatagagttgtttgcgtgctgctgctctgtttttggtttagatttggttttgtgtcaccacttctggtttggttatcgttcgtttggtttacttttttgatgaaacagtttcgtttaagtcttctttgtctggaacgaaatgttaattcgcgtgttgtttactaaatttataacgtttcctttt

SEQ ID NO: 103707 - protein, 145 aa, Arabidopsis thaliana; identical to SEQ ID NO: 22120
  peptide (1)..(145): Ceres Seq. ID no. 13613394
  misc_feature (8)..(79): Pfam Name: RNA recognition motif. (a.k.a. RRM, RBD, or RNP domain) Pfam Description: RNA recognition motif. (a.k.a. RRM, RBD, or RNP
  misc_feature (1)..(145): Homolog of NCBI NO: 15235002 NR Description: glycine-rich RNA-binding protein 8 (GRP8) (CCR1)
  misc_feature (1)..(145): Homolog of NCBI NO: 544416 NR Description: Glycine-rich RNA-binding protein 10
  misc_feature (3)..(145): Homolog of NCBI NO: 30681492 NR Description: glycine-rich RNA-binding protein (AtGRP7)
  misc_feature (3)..(145): Homolog of NCBI NO: 1346181 NR Description: Glycine-rich RNA-binding protein GRP2A
  misc_feature (1)..(145): Homolog of NCBI NO: 30692254 NR Description: glycine-rich RNA-binding protein 8 (GRP8) (CCR1)
  misc_feature (1)..(145): Homolog of NCBI NO: 2119042 NR Description: glycine-rich RNA-binding protein RGP-1a - wood
  misc_feature (1)..(144): Homolog of NCBI NO: 544426 NR Description: Glycine-rich RNA-binding protein
  misc_feature (3)..(145): Homolog of NCBI NO: 15226605 NR Description: glycine-rich RNA-binding protein (AtGRP7)
  misc_feature (3)..(145): Homolog of NCBI NO: 21553354 NR Description: glycine-rich RNA binding protein 7 [Arabidopsis
  misc_feature (2)..(145): Homolog of NCBI NO: 20152613 NR Description: putative glycine rich protein [Rumex obtusifolius]

SEQ ID NO: 103708 - protein, 86 aa, Arabidopsis thaliana; identical to SEQ ID NO: 22121
  peptide (1)..(86): Ceres Seq. ID no. 13613395
  misc_feature (25)..(85): Pfam Name: Herpesvirus large structural phosphoprotein UL32 Pfam Description: Herpesvirus large structural phosphoprotein UL32
  misc_feature (1)..(86): Homolog of NCBI NO: 15235002 NR Description: glycine-rich RNA-binding protein 8 (GRP8) (CCR1)
  misc_feature (1)..(86): Homolog of NCBI NO: 544416 NR Description: Glycine-rich RNA-binding protein 10
  misc_feature (1)..(86): Homolog of NCBI NO: 30681492 NR Description: glycine-rich RNA-binding protein (AtGRP7)
  misc_feature (1)..(86): Homolog of NCBI NO: 1346181 NR Description: Glycine-rich RNA-binding protein GRP2A
  misc_feature (1)..(86): Homolog of NCBI NO: 30692254 NR Description: glycine-rich RNA-binding protein 8 (GRP8) (CCR1)
  misc_feature (1)..(86): Homolog of NCBI NO: 2119042 NR Description: glycine-rich RNA-binding protein RGP-1a - wood
  misc_feature (1)..(85): Homolog of NCBI NO: 544426 NR Description: Glycine-rich RNA-binding protein
  misc_feature (1)..(86): Homolog of NCBI NO: 15226605 NR Description: glycine-rich RNA-binding protein (AtGRP7)
  misc_feature (1)..(86): Homolog of NCBI NO: 21553354 NR Description: glycine-rich RNA binding protein 7 [Arabidopsis
  misc_feature (1)..(86): Homolog of NCBI NO: 20152613 NR Description: putative glycine rich protein [Rumex obtusifolius]

SEQ ID NO: 103709 - protein, 79 aa, Arabidopsis thaliana; identical to SEQ ID NO: 22122
  peptide (1)..(79): Ceres Seq. ID no. 13613396
  misc_feature (18)..(78): Pfam Name: Herpesvirus large structural phosphoprotein UL32 Pfam Description: Herpesvirus large structural phosphoprotein UL32
  misc_feature (1)..(79): Homolog of NCBI NO: 15235002 NR Description: glycine-rich RNA-binding protein 8 (GRP8) (CCR1)
  misc_feature (1)..(79): Homolog of NCBI NO: 544416 NR Description: Glycine-rich RNA-binding protein 10
  misc_feature (1)..(79): Homolog of NCBI NO: 30681492 NR Description: glycine-rich RNA-binding protein (AtGRP7)
  misc_feature (1)..(79): Homolog of NCBI NO: 1346181 NR Description: Glycine-rich RNA-binding protein GRP2A
  misc_feature (1)..(79): Homolog of NCBI NO: 30692254 NR Description: glycine-rich RNA-binding protein 8 (GRP8) (CCR1)
  misc_feature (1)..(79): Homolog of NCBI NO: 2119042 NR Description: glycine-rich RNA-binding protein RGP-1a - wood
  misc_feature (1)..(78): Homolog of NCBI NO: 544426 NR Description: Glycine-rich RNA-binding protein
  misc_feature (1)..(79): Homolog of NCBI NO: 15226605 NR Description: glycine-rich RNA-binding protein (AtGRP7)
  misc_feature (1)..(79): Homolog of NCBI NO: 21553354 NR Description: glycine-rich RNA binding protein 7 [Arabidopsis
  misc_feature (1)..(79): Homolog of NCBI NO: 20152613 NR Description: putative glycine rich protein [Rumex obtusifolius]

SEQ ID NO: 103710 - DNA, 729 bp, Arabidopsis thaliana
  misc_feature (1)..(729): Ceres Seq. ID no. 13613397
  misc_feature: MA Experiment ID: 108462 Result: Down-regulated in Transcription
  misc_feature: MA Experiment 108462 PARAMETER Experiment Name: At_Germinating_Seeds_cDNA_P Parameter: Age (day) Value: 2 vs. 0
  misc_feature: MA Experiment 108462 PARAMETER Experiment Name: At_Germinating_Seeds_cDNA_P Parameter: Tissue Value: Germinating Seeds
  misc_feature: MA Experiment ID: 108572 Result: Down-regulated in Transcription
  misc_feature: MA Experiment 108572 PARAMETER Experiment Name: At_Drought_cDNA_P Parameter: Timepoint (hr) Value: 1
  misc_feature: MA Experiment 108572 PARAMETER Experiment Name: At_Drought_cDNA_P Parameter: Tissue Value: Aerial
  misc_feature: MA Experiment 108572 PARAMETER Experiment Name: At_Drought_cDNA_P Parameter: Treatment Value: Drought vs. No Drought
  misc_feature: MA Experiment ID: 108573 Result: Down-regulated in Transcription
  misc_feature: MA Experiment 108573 PARAMETER Experiment Name: At_Drought_cDNA_P Parameter: Timepoint (hr) Value: 6
  misc_feature: MA Experiment 108573 PARAMETER Experiment Name: At_Drought_cDNA_P Parameter: Tissue Value: Aerial
  misc_feature: MA Experiment 108573 PARAMETER Experiment Name: At_Drought_cDNA_P Parameter: Treatment Value: Drought vs. No Drought
  misc_feature: MA Experiment ID: 108577 Result: Down-regulated in Transcription
  misc_feature: MA Experiment 108577 PARAMETER Experiment Name: At_42deg_Heat_cDNA_P Parameter: Temperature (deg C) Value: 42 vs. 22
  misc_feature: MA Experiment 108577 PARAMETER Experiment Name: At_42deg_Heat_cDNA_P Parameter: Timepoint (hr) Value: 6
  misc_feature: MA Experiment 108577 PARAMETER Experiment Name: At_42deg_Heat_cDNA_P Parameter: Tissue Value: Aerial
  misc_feature: MA Experiment ID: 108605 Result: Down-regulated in Transcription
  misc_feature: MA Experiment 108605 PARAMETER Experiment Name: At_100uM_ABA_cDNA_P Parameter: Timepoint (hr) Value: 6
  misc_feature: MA Experiment 108605 PARAMETER Experiment Name: At_100uM_ABA_cDNA_P Parameter: Tissue Value: Aerial
  misc_feature: MA Experiment 108605 PARAMETER Experiment Name: At_100uM_ABA_cDNA_P Parameter: Treatment Value: 100uM ABA vs. No Treatment
  misc_feature: MA Experiment ID: 108607 Result: Down-regulated in Transcription
  misc_feature: MA Experiment 108607 PARAMETER Experiment Name: At_100uM_ABA_cDNA_P Parameter: Timepoint (hr) Value: 4
  misc_feature: MA Experiment 108607 PARAMETER Experiment Name: At_100uM_ABA_cDNA_P Parameter: Tissue Value: Aerial
  misc_feature: MA Experiment 108607 PARAMETER Experiment Name: At_100uM_ABA_cDNA_P Parameter: Treatment Value: 100uM ABA vs. No Treatment
  misc_feature: MA Experiment ID: 20000069 Result: Up-regulated in Transcription
  misc_feature: MA Experiment 20000069 PARAMETER Experiment Name: At_100uM_ABA_Mutants_cDNA_P Parameter: Plant Line Value: CS23
  misc_feature: MA Experiment 20000069 PARAMETER Experiment Name: At_100uM_ABA_Mutants_cDNA_P Parameter: Timepoint (hr) Value: 6
  misc_feature: MA Experiment 20000069 PARAMETER Experiment Name: At_100uM_ABA_Mutants_cDNA_P Parameter: Tissue Value: Aerial
  misc_feature: MA Experiment 20000069 PARAMETER Experiment Name: At_100uM_ABA_Mutants_cDNA_P Parameter: Treatment Value: 100uM ABA vs. No Treatment
  misc_feature: MA Experiment ID: 20000070 Result: Up-regulated in Transcription
  misc_feature: MA Experiment 20000070 PARAMETER Experiment Name: At_100uM_ABA_Mutants_cDNA_P Parameter: Plant Line Value: CS24
  misc_feature: MA Experiment 20000070 PARAMETER Experiment Name: At_100uM_ABA_Mutants_cDNA_P Parameter: Timepoint (hr) Value: 6
  misc_feature: MA Experiment 20000070 PARAMETER Experiment Name: At_100uM_ABA_Mutants_cDNA_P Parameter: Tissue Value: Aerial
  misc_feature: MA Experiment 20000070 PARAMETER Experiment Name: At_100uM_ABA_Mutants_cDNA_P Parameter: Treatment Value: 100uM ABA vs. No Treatment
  misc_feature: MA Experiment ID: 20000071 Result: Up-regulated in Transcription
  misc_feature: MA Experiment 20000071 PARAMETER Experiment Name: At_100uM_ABA_Mutants_cDNA_P Parameter: Plant Line Value: CS8104
  misc_feature: MA Experiment 20000071 PARAMETER Experiment Name: At_100uM_ABA_Mutants_cDNA_P Parameter: Timepoint (hr) Value: 6
  misc_feature: MA Experiment 20000071 PARAMETER Experiment Name: At_100uM_ABA_Mutants_cDNA_P Parameter: Tissue Value: Aerial
  misc_feature: MA Experiment 20000071 PARAMETER Experiment Name: At_100uM_ABA_Mutants_cDNA_P Parameter: Treatment Value: 100uM ABA vs. No Treatment
  misc_feature: MA Experiment ID: 20000086 Result: Up-regulated in Transcription
  misc_feature: MA Experiment 20000086 PARAMETER Experiment Name: At_100uM_ABA_Mutants_cDNA_P Parameter: Plant Line Value: CS22
  misc_feature: MA Experiment 20000086 PARAMETER Experiment Name: At_100uM_ABA_Mutants_cDNA_P Parameter: Timepoint (hr) Value: 6
  misc_feature: MA Experiment 20000086 PARAMETER Experiment Name: At_100uM_ABA_Mutants_cDNA_P Parameter: Tissue Value: Aerial
  misc_feature: MA Experiment 20000086 PARAMETER Experiment Name: At_100uM_ABA_Mutants_cDNA_P Parameter: Treatment Value: 100uM ABA vs. No Treatment
  misc_feature: MA Experiment ID: 20000087 Result: Up-regulated in Transcription
  misc_feature: MA Experiment 20000087 PARAMETER Experiment Name: At_100uM_ABA_Mutants_cDNA_P Parameter: Plant Line Value: WS
  misc_feature: MA Experiment 20000087 PARAMETER Experiment Name: At_100uM_ABA_Mutants_cDNA_P Parameter: Timepoint (hr) Value: 6
  misc_feature: MA Experiment 20000087 PARAMETER Experiment Name: At_100uM_ABA_Mutants_cDNA_P Parameter: Tissue Value: Aerial
  misc_feature: MA Experiment 20000087 PARAMETER Experiment Name: At_100uM_ABA_Mutants_cDNA_P Parameter: Treatment Value: 100uM ABA vs. No Treatment
  misc_feature: MA Experiment ID: 20000088 Result: Up-regulated in Transcription
  misc_feature: MA Experiment 20000088 PARAMETER Experiment Name: At_100uM_ABA_Mutants_cDNA_P Parameter: Plant Line Value: Landsberg
  misc_feature: MA Experiment 20000088 PARAMETER Experiment Name: At_100uM_ABA_Mutants_cDNA_P Parameter: Timepoint (hr) Value: 6
  misc_feature: MA Experiment 20000088 PARAMETER Experiment Name: At_100uM_ABA_Mutants_cDNA_P Parameter: Tissue Value: Aerial
  misc_feature: MA Experiment 20000088 PARAMETER Experiment Name: At_100uM_ABA_Mutants_cDNA_P Parameter: Treatment Value: 100uM ABA vs. No Treatment
  misc_feature: MA Experiment ID: 20000089 Result: Up-regulated in Transcription
  misc_feature: MA Experiment ID: 20000090 Result: Up-regulated in Transcription
  misc_feature: MA Experiment ID: 20000111 Result: Down-regulated in Transcription
  misc_feature: MA Experiment 20000111 PARAMETER Experiment Name: At_42deg_Heat_cDNA_P Parameter: Temperature (deg C) Value: 42 vs. 22
  misc_feature: MA Experiment 20000111 PARAMETER Experiment Name: At_42deg_Heat_cDNA_P Parameter: Timepoint (hr) Value: 6
  misc_feature: MA Experiment 20000111 PARAMETER Experiment Name: At_42deg_Heat_cDNA_P Parameter: Tissue Value: Aerial
  misc_feature: MA Experiment ID: 20000113 Result: Down-regulated in Transcription
  misc_feature: MA Experiment 20000113 PARAMETER Experiment Name: At_42deg_Heat_cDNA_P Parameter: Temperature (deg C) Value: 42 vs. 22
  misc_feature: MA Experiment 20000113 PARAMETER Experiment Name: At_42deg_Heat_cDNA_P Parameter: Timepoint (hr) Value: 8
  misc_feature: MA Experiment 20000113 PARAMETER Experiment Name: At_42deg_Heat_cDNA_P Parameter: Tissue Value: Aerial
  misc_feature: MA Experiment ID: 20000173 Result: Down-regulated in Transcription
  misc_feature: MA Experiment 20000173 PARAMETER Experiment Name: At_42deg_Heat_P Parameter: Age (day) Value: 14
  misc_feature: MA Experiment 20000173 PARAMETER Experiment Name: At_42deg_Heat_P Parameter: Organism Value: A. thaliana
  misc_feature: MA Experiment 20000173 PARAMETER Experiment Name: At_42deg_Heat_P Parameter: Plant Line Value: WS
  misc_feature: MA Experiment 20000173 PARAMETER Experiment Name: At_42deg_Heat_P Parameter: Temperature (deg C) Value: 42 vs. 22
  misc_feature: MA Experiment 20000173 PARAMETER Experiment Name: At_42deg_Heat_P Parameter: Timepoint (hr) Value: 6
  misc_feature: MA Experiment 20000173 PARAMETER Experiment Name: At_42deg_Heat_P Parameter: Tissue Value: Aerial
  misc_feature: MA Experiment ID: 20000213 Result: Up-regulated in Transcription
  misc_feature: MA Experiment 20000213 PARAMETER Experiment Name: At_4deg_Cold_P Parameter: Timepoint (hr) Value: 2
  misc_feature: MA Experiment ID: 20000453 Result: Down-regulated in Transcription
  misc_feature: MA Experiment 20000453 PARAMETER Experiment Name: At_100uM_ABA_P Parameter: Age (day) Value: 15
  misc_feature: MA Experiment 20000453 PARAMETER Experiment Name: At_100uM_ABA_P Parameter: Organism Value: A. thaliana
  misc_feature: MA Experiment 20000453 PARAMETER Experiment Name: At_100uM_ABA_P Parameter: Plant Line Value: WS
  misc_feature: MA Experiment 20000453 PARAMETER Experiment Name: At_100uM_ABA_P Parameter: Timepoint (hr) Value: 24
  misc_feature: MA Experiment 20000453 PARAMETER Experiment Name: At_100uM_ABA_P Parameter: Tissue Value: Aerial
  misc_feature: MA Experiment 20000453 PARAMETER Experiment Name: At_100uM_ABA_P Parameter: Treatment Value: 100uM ABA vs. No Treatment
  misc_feature: MA Experiment ID: 20001247 Result: Down-regulated in Transcription
  misc_feature: MA Experiment 20001247 PARAMETER Experiment Name: At_Far-red-induction_P Parameter: Age (day) Value: 7
  misc_feature: MA Experiment 20001247 PARAMETER Experiment Name: At_Far-red-induction_P Parameter: Light Value: Far-red vs. White
  misc_feature: MA Experiment 20001247 PARAMETER Experiment Name: At_Far-red-induction_P Parameter: Organism Value: A. thaliana
  misc_feature: MA Experiment 20001247 PARAMETER Experiment Name: At_Far-red-induction_P Parameter: Plant Line Value: Columbia
  misc_feature: MA Experiment 20001247 PARAMETER Experiment Name: At_Far-red-induction_P Parameter: Timepoint (hr) Value: 1
  misc_feature: MA Experiment 20001247 PARAMETER Experiment Name: At_Far-red-induction_P Parameter: Tissue Value: Whole Plant
  misc_feature: MA Experiment ID: 20001248 Result: Up-regulated in Transcription
  misc_feature: MA Experiment 20001248 PARAMETER Experiment Name: At_Far-red-induction_P Parameter: Age (day) Value: 7
  misc_feature: MA Experiment 20001248 PARAMETER Experiment Name: At_Far-red-induction_P Parameter: Light Value: Far-red vs. White
  misc_feature: MA Experiment 20001248 PARAMETER Experiment Name: At_Far-red-induction_P Parameter: Organism Value: A. thaliana
  misc_feature: MA Experiment 20001248 PARAMETER Experiment Name: At_Far-red-induction_P Parameter: Plant Line Value: Columbia
  misc_feature: MA Experiment 20001248 PARAMETER Experiment Name: At_Far-red-induction_P Parameter: Timepoint (hr) Value: 4
  misc_feature: MA Experiment 20001248 PARAMETER Experiment Name: At_Far-red-induction_P Parameter: Tissue Value: Whole Plant
  misc_feature: MA Experiment ID: 20001557 Result: Up-regulated in Transcription
  misc_feature: MA Experiment 20001557 PARAMETER Experiment Name: At_Drought_Soil_Dry_P Parameter: Age (day) Value: 27
  misc_feature: MA Experiment 20001557 PARAMETER Experiment Name: At_Drought_Soil_Dry_P Parameter: Organism Value: A. thaliana
  misc_feature: MA Experiment 20001557 PARAMETER Experiment Name: At_Drought_Soil_Dry_P Parameter: Plant Line Value: WS
  misc_feature: MA Experiment 20001557 PARAMETER Experiment Name: At_Drought_Soil_Dry_P Parameter: Post Timepoint (hr) Value: 3
  misc_feature: MA Experiment 20001557 PARAMETER Experiment Name: At_Drought_Soil_Dry_P Parameter: Post-Treatment Value: Re-Water vs. No Drought
  misc_feature: MA Experiment 20001557 PARAMETER Experiment Name: At_Drought_Soil_Dry_P Parameter: Timepoint (day) Value: 13
  misc_feature: MA Experiment 20001557 PARAMETER Experiment Name: At_Drought_Soil_Dry_P Parameter: Treatment Value: Drought vs. No Drought
ataagtctctctcttacattttgaaaccctaatttctcttcttttccccaaaaaaaaatgtctgaagttgagtaccggtgctttgtcggcggccttgcctgggccaccaatgatgaagatcttcaaaggacgttctcacagttcggcgacgttatcgattctaagatcattaacgaccgcgagagtggaagatcaaggggattcggattcgtcaccttcaaggacgagaaagccatgagggatgcgattgaagagatgaacggtaaagagctcgatggacgtgtcatcaccgtgaacgaggctcagtcgagaggtagcggcggtggcggaggaggccgtggtggaagcggtggtggttaccgcagcggaggcggtggtggatactcaggaggcggtggtggttacgagagacgtagcggaggttacggatctggtggaggcggtggtggccgaggatacggtggtggtggacgccgtgagggaggtggctacggaggcggtgatggtggaagttacggaggcggtggtggcggctggtaatcaaagatagagttgtttgcgtgctgctgctctgtttttggtttagatttggttttgtgtcaccacttctggtttggttatcgttcgtttggtttacttttttgatgaaacagtttcgtttaagtcttctttgtctggaacgaaatgttaattcgcgtgttgtttactaaatttataacgtttcctttt

SEQ ID NO: 103711 - protein, 160 aa, Arabidopsis thaliana
  peptide (1)..(160): Ceres Seq. ID no. 13613398
  misc_feature (8)..(79): Pfam Name: RNA recognition motif. (a.k.a. RRM, RBD, or RNP domain) Pfam Description: RNA recognition motif. (a.k.a. RRM, RBD, or RNP
  misc_feature (1)..(160): Homolog of NCBI NO: 15235002 NR Description: glycine-rich RNA-binding protein 8 (GRP8) (CCR1)
  misc_feature (1)..(160): Homolog of NCBI NO: 544416 NR Description: Glycine-rich RNA-binding protein 10
  misc_feature (3)..(160): Homolog of NCBI NO: 15226605 NR Description: glycine-rich RNA-binding protein (AtGRP7)
  misc_feature (3)..(160): Homolog of NCBI NO: 21553354 NR Description: glycine-rich RNA binding protein 7 [Arabidopsis
  misc_feature (3)..(160): Homolog of NCBI NO: 1346181 NR Description: Glycine-rich RNA-binding protein GRP2A
  misc_feature (3)..(160): Homolog of NCBI NO: 1346180 NR Description: Glycine-rich RNA-binding protein GRP1A
  misc_feature (1)..(131): Homolog of NCBI NO: 30692254 NR Description: glycine-rich RNA-binding protein 8 (GRP8) (CCR1)
  misc_feature (3)..(160): Homolog of NCBI NO: 30681492 NR Description: glycine-rich RNA-binding protein (AtGRP7)
  misc_feature (1)..(159): Homolog of NCBI NO: 544426 NR Description: Glycine-rich RNA-binding protein
  misc_feature (1)..(160): Homolog of NCBI NO: 2119042 NR Description: glycine-rich RNA-binding protein RGP-1a - wood
MSEVEYRCFVGGLAWATNDEDLQRTFSQFGDVIDSKIINDRESGRSRGFGFVTFKDEKAMRDAIEEMNGKELDGRVITVNEAQSRGSGGGGGGRGGSGGGYRSGGGGGYSGGGGGYERRSGGYGSGGGGGGRGYGGGGRREGGGYGGGDGGSYGGGGGGW

SEQ ID NO: 103712 - protein, 101 aa, Arabidopsis thaliana; identical to SEQ ID NO: 36932
  peptide (1)..(101): Ceres Seq. ID no. 13613399
  misc_feature (15)..(100): Pfam Name: Herpesvirus large structural phosphoprotein UL32 Pfam Description: Herpesvirus large structural phosphoprotein UL32
  misc_feature (1)..(101): Homolog of NCBI NO: 15235002 NR Description: glycine-rich RNA-binding protein 8 (GRP8) (CCR1)
  misc_feature (1)..(101): Homolog of NCBI NO: 544416 NR Description: Glycine-rich RNA-binding protein 10
  misc_feature (1)..(101): Homolog of NCBI NO: 15226605 NR Description: glycine-rich RNA-binding protein (AtGRP7)
  misc_feature (1)..(101): Homolog of NCBI NO: 21553354 NR Description: glycine-rich RNA binding protein 7 [Arabidopsis
  misc_feature (1)..(101): Homolog of NCBI NO: 1346181 NR Description: Glycine-rich RNA-binding protein GRP2A
  misc_feature (1)..(101): Homolog of NCBI NO: 1346180 NR Description: Glycine-rich RNA-binding protein GRP1A
  misc_feature (1)..(72): Homolog of NCBI NO: 30692254 NR Description: glycine-rich RNA-binding protein 8 (GRP8) (CCR1)
  misc_feature (1)..(101): Homolog of NCBI NO: 30681492 NR Description: glycine-rich RNA-binding protein (AtGRP7)
  misc_feature (1)..(100): Homolog of NCBI NO: 544426 NR Description: Glycine-rich RNA-binding protein
  misc_feature (1)..(101): Homolog of NCBI NO: 2119042 NR Description: glycine-rich RNA-binding protein RGP-1a - wood

SEQ ID NO: 103713 - protein, 94 aa, Arabidopsis thaliana; identical to SEQ ID NO: 36933
  peptide (1)..(94): Ceres Seq. ID no. 13613400
  misc_feature (8)..(93): Pfam Name: Herpesvirus large structural phosphoprotein UL32 Pfam Description: Herpesvirus large structural phosphoprotein UL32
  misc_feature (1)..(94): Homolog of NCBI NO: 15235002 NR Description: glycine-rich RNA-binding protein 8 (GRP8) (CCR1)
  misc_feature (1)..(94): Homolog of NCBI NO: 544416 NR Description: Glycine-rich RNA-binding protein 10
  misc_feature (1)..(94): Homolog of NCBI NO: 15226605 NR Description: glycine-rich RNA-binding protein (AtGRP7)
  misc_feature (1)..(94): Homolog of NCBI NO: 21553354 NR Description: glycine-rich RNA binding protein 7 [Arabidopsis
  misc_feature (1)..(94): Homolog of NCBI NO: 1346181 NR Description: Glycine-rich RNA-binding protein GRP2A
  misc_feature (1)..(94): Homolog of NCBI NO: 1346180 NR Description: Glycine-rich RNA-binding protein GRP1A
  misc_feature (1)..(65): Homolog of NCBI NO: 30692254 NR Description: glycine-rich RNA-binding protein 8 (GRP8) (CCR1)
  misc_feature (1)..(94): Homolog of NCBI NO: 30681492 NR Description: glycine-rich RNA-binding protein (AtGRP7)
  misc_feature (1)..(93): Homolog of NCBI NO: 544426 NR Description: Glycine-rich RNA-binding protein
  misc_feature (1)..(94): Homolog of NCBI NO: 2119042 NR Description: glycine-rich RNA-binding protein RGP-1a - wood

SEQ ID NO: 103714 - DNA, 680 bp, Arabidopsis thaliana
  misc_feature (1)..(680): Ceres Seq. ID no. 13613401
  misc_feature: MA Experiment ID: 108464 Result: Down-regulated in Transcription
  misc_feature: MA Experiment 108464 PARAMETER Experiment Name: At_Germinating_Seeds_cDNA_P Parameter: Age (day) Value: 4 vs. 0
  misc_feature: MA Experiment 108464 PARAMETER Experiment Name: At_Germinating_Seeds_cDNA_P Parameter: Tissue Value: Germinating Seeds
  misc_feature: MA Experiment ID: 108488 Result: Down-regulated in Transcription
  misc_feature: MA Experiment ID: 108572 Result: Down-regulated in Transcription
  misc_feature: MA Experiment 108572 PARAMETER Experiment Name: At_Drought_cDNA_P Parameter: Timepoint (hr) Value: 1
  misc_feature: MA Experiment 108572 PARAMETER Experiment Name: At_Drought_cDNA_P Parameter: Tissue Value: Aerial
  misc_feature: MA Experiment 108572 PARAMETER Experiment Name: At_Drought_cDNA_P Parameter: Treatment Value: Drought vs. No Drought
  misc_feature: MA Experiment ID: 108573 Result: Down-regulated in Transcription
  misc_feature: MA Experiment 108573 PARAMETER Experiment Name: At_Drought_cDNA_P Parameter: Timepoint (hr) Value: 6
  misc_feature: MA Experiment 108573 PARAMETER Experiment Name: At_Drought_cDNA_P Parameter: Tissue Value: Aerial
  misc_feature: MA Experiment 108573 PARAMETER Experiment Name: At_Drought_cDNA_P Parameter: Treatment Value: Drought vs. No Drought
  misc_feature: MA Experiment ID: 108576 Result: Down-regulated in Transcription
  misc_feature: MA Experiment 108576 PARAMETER Experiment Name: At_42deg_Heat_cDNA_P Parameter: Temperature (deg C) Value: 42 vs. 22
  misc_feature: MA Experiment 108576 PARAMETER Experiment Name: At_42deg_Heat_cDNA_P Parameter: Timepoint (hr) Value: 1
  misc_feature: MA Experiment 108576 PARAMETER Experiment Name: At_42deg_Heat_cDNA_P Parameter: Tissue Value: Aerial
  misc_feature: MA Experiment ID: 108577 Result: Down-regulated in Transcription
  misc_feature: MA Experiment 108577 PARAMETER Experiment Name: At_42deg_Heat_cDNA_P Parameter: Temperature (deg C) Value: 42 vs. 22
  misc_feature: MA Experiment 108577 PARAMETER Experiment Name: At_42deg_Heat_cDNA_P Parameter: Timepoint (hr) Value: 6
  misc_feature: MA Experiment 108577 PARAMETER Experiment Name: At_42deg_Heat_cDNA_P Parameter: Tissue Value: Aerial
  misc_feature: MA Experiment ID: 108579 Result: Up-regulated in Transcription
  misc_feature: MA Experiment 108579 PARAMETER Experiment Name: At_4deg_Cold_cDNA_P Parameter: Temperature (deg C) Value: 4 vs. 22
  misc_feature: MA Experiment 108579 PARAMETER Experiment Name: At_4deg_Cold_cDNA_P Parameter: Timepoint (hr) Value: 6
  misc_feature: MA Experiment 108579 PARAMETER Experiment Name: At_4deg_Cold_cDNA_P Parameter: Tissue Value: Aerial
  misc_feature: MA Experiment ID: 108605 Result: Down-regulated in Transcription
  misc_feature: MA Experiment 108605 PARAMETER Experiment Name: At_100uM_ABA_cDNA_P Parameter: Timepoint (hr) Value: 6
  misc_feature: MA Experiment 108605 PARAMETER Experiment Name: At_100uM_ABA_cDNA_P Parameter: Tissue Value: Aerial
  misc_feature: MA Experiment 108605 PARAMETER Experiment Name: At_100uM_ABA_cDNA_P Parameter: Treatment Value: 100uM ABA vs. No Treatment
  misc_feature: MA Experiment ID: 108607 Result: Down-regulated in Transcription
  misc_feature: MA Experiment 108607 PARAMETER Experiment Name: At_100uM_ABA_cDNA_P Parameter: Timepoint (hr) Value: 4
  misc_feature: MA Experiment 108607 PARAMETER Experiment Name: At_100uM_ABA_cDNA_P Parameter: Tissue Value: Aerial
  misc_feature: MA Experiment 108607 PARAMETER Experiment Name: At_100uM_ABA_cDNA_P Parameter: Treatment Value: 100uM ABA vs. No Treatment
  misc_feature: MA Experiment ID: 20000069 Result: Up-regulated in Transcription
  misc_feature: MA Experiment 20000069 PARAMETER Experiment Name: At_100uM_ABA_Mutants_cDNA_P Parameter: Plant Line Value: CS23
  misc_feature: MA Experiment 20000069 PARAMETER Experiment Name: At_100uM_ABA_Mutants_cDNA_P Parameter: Timepoint (hr) Value: 6
  misc_feature: MA Experiment 20000069 PARAMETER Experiment Name: At_100uM_ABA_Mutants_cDNA_P Parameter: Tissue Value: Aerial
  misc_feature: MA Experiment 20000069 PARAMETER Experiment Name: At_100uM_ABA_Mutants_cDNA_P Parameter: Treatment Value: 100uM ABA vs. No Treatment
  misc_feature: MA Experiment ID: 20000070 Result: Up-regulated in Transcription
  misc_feature: MA Experiment 20000070 PARAMETER Experiment Name: At_100uM_ABA_Mutants_cDNA_P Parameter: Plant Line Value: CS24
  misc_feature: MA Experiment 20000070 PARAMETER Experiment Name: At_100uM_ABA_Mutants_cDNA_P Parameter: Timepoint (hr) Value: 6
  misc_feature: MA Experiment 20000070 PARAMETER Experiment Name: At_100uM_ABA_Mutants_cDNA_P Parameter: Tissue Value: Aerial
  misc_feature: MA Experiment 20000070 PARAMETER Experiment Name: At_100uM_ABA_Mutants_cDNA_P Parameter: Treatment Value: 100uM ABA vs. No Treatment
  misc_feature: MA Experiment ID: 20000071 Result: Up-regulated in Transcription
  misc_feature: MA Experiment 20000071 PARAMETER Experiment Name: At_100uM_ABA_Mutants_cDNA_P Parameter: Plant Line Value: CS8104
  misc_feature: MA Experiment 20000071 PARAMETER Experiment Name: At_100uM_ABA_Mutants_cDNA_P Parameter: Timepoint (hr) Value: 6
  misc_feature: MA Experiment 20000071 PARAMETER Experiment Name: At_100uM_ABA_Mutants_cDNA_P Parameter: Tissue Value: Aerial
  misc_feature: MA Experiment 20000071 PARAMETER Experiment Name: At_100uM_ABA_Mutants_cDNA_P Parameter: Treatment Value: 100uM ABA vs. No Treatment
  misc_feature: MA Experiment ID: 20000072 Result: Up-regulated in Transcription
  misc_feature: MA Experiment 20000072 PARAMETER Experiment Name: At_100uM_ABA_Mutants_cDNA_P Parameter: Plant Line Value: CS8105
  misc_feature: MA Experiment 20000072 PARAMETER Experiment Name: At_100uM_ABA_Mutants_cDNA_P Parameter: Timepoint (hr) Value: 6
  misc_feature: MA Experiment 20000072 PARAMETER Experiment Name: At_100uM_ABA_Mutants_cDNA_P Parameter: Tissue Value: Aerial
  misc_feature: MA Experiment 20000072 PARAMETER Experiment Name: At_100uM_ABA_Mutants_cDNA_P Parameter: Treatment Value: 100uM ABA vs. No Treatment
  misc_feature: MA Experiment ID: 20000086 Result: Up-regulated in Transcription
  misc_feature: MA Experiment 20000086 PARAMETER Experiment Name: At_100uM_ABA_Mutants_cDNA_P Parameter: Plant Line Value: CS22
  misc_feature: MA Experiment 20000086 PARAMETER Experiment Name: At_100uM_ABA_Mutants_cDNA_P Parameter: Timepoint (hr) Value: 6
  misc_feature: MA Experiment 20000086 PARAMETER Experiment Name: At_100uM_ABA_Mutants_cDNA_P Parameter: Tissue Value: Aerial
  misc_feature: MA Experiment 20000086 PARAMETER Experiment Name: At_100uM_ABA_Mutants_cDNA_P Parameter: Treatment Value: 100uM ABA vs. No Treatment
  misc_feature: MA Experiment ID: 20000087 Result: Up-regulated in Transcription
  misc_feature: MA Experiment 20000087 PARAMETER Experiment Name: At_100uM_ABA_Mutants_cDNA_P Parameter: Plant Line Value: WS
  misc_feature: MA Experiment 20000087 PARAMETER Experiment Name: At_100uM_ABA_Mutants_cDNA_P Parameter: Timepoint (hr) Value: 6
  misc_feature: MA Experiment 20000087 PARAMETER Experiment Name: At_100uM_ABA_Mutants_cDNA_P Parameter: Tissue Value: Aerial
  misc_feature: MA Experiment 20000087 PARAMETER Experiment Name: At_100uM_ABA_Mutants_cDNA_P Parameter: Treatment Value: 100uM ABA vs. No Treatment
  misc_feature: MA Experiment ID: 20000088 Result: Up-regulated in Transcription
  misc_feature: MA Experiment 20000088 PARAMETER Experiment Name: At_100uM_ABA_Mutants_cDNA_P Parameter: Plant Line Value: Landsberg
  misc_feature: MA Experiment 20000088 PARAMETER Experiment Name: At_100uM_ABA_Mutants_cDNA_P Parameter: Timepoint (hr) Value: 6
  misc_feature: MA Experiment 20000088 PARAMETER Experiment Name: At_100uM_ABA_Mutants_cDNA_P Parameter: Tissue Value: Aerial
  misc_feature: MA Experiment 20000088 PARAMETER Experiment Name: At_100uM_ABA_Mutants_cDNA_P Parameter: Treatment Value: 100uM ABA vs. No Treatment
  misc_feature: MA Experiment ID: 20000089 Result: Up-regulated in Transcription
  misc_feature: MA Experiment ID: 20000090 Result: Up-regulated in Transcription
  misc_feature: MA Experiment ID: 20000111 Result: Down-regulated in Transcription
  misc_feature: MA Experiment 20000111 PARAMETER Experiment Name: At_42deg_Heat_cDNA_P Parameter: Temperature (deg C) Value: 42 vs. 22
  misc_feature: MA Experiment 20000111 PARAMETER Experiment Name: At_42deg_Heat_cDNA_P Parameter: Timepoint (hr) Value: 6
  misc_feature: MA Experiment 20000111 PARAMETER Experiment Name: At_42deg_Heat_cDNA_P Parameter: Tissue Value: Aerial
  misc_feature: MA Experiment ID: 20000112 Result: Down-regulated in Transcription
  misc_feature: MA Experiment 20000112 PARAMETER Experiment Name: At_42deg_Heat_cDNA_P Parameter: Temperature (deg C) Value: 42 vs. 22
  misc_feature: MA Experiment 20000112 PARAMETER Experiment Name: At_42deg_Heat_cDNA_P Parameter: Timepoint (hr) Value: 2
  misc_feature: MA Experiment 20000112 PARAMETER Experiment Name: At_42deg_Heat_cDNA_P Parameter: Tissue Value: Aerial
  misc_feature: MA Experiment ID: 20000113 Result: Down-regulated in Transcription
  misc_feature: MA Experiment 20000113 PARAMETER Experiment Name: At_42deg_Heat_cDNA_P Parameter: Temperature (deg C) Value: 42 vs. 22
  misc_feature: MA Experiment 20000113 PARAMETER Experiment Name: At_42deg_Heat_cDNA_P Parameter: Timepoint (hr) Value: 8
  misc_feature: MA Experiment 20000113 PARAMETER Experiment Name: At_42deg_Heat_cDNA_P Parameter: Tissue Value: Aerial
  misc_feature: MA Experiment ID: 20000117 Result: Up-regulated in Transcription
  misc_feature: MA Experiment 20000117 PARAMETER Experiment Name: At_100uM_ABA_Mutants_cDNA_P Parameter: Plant Line Value: Columbia
  misc_feature: MA Experiment 20000117 PARAMETER Experiment Name: At_100uM_ABA_Mutants_cDNA_P Parameter: Timepoint (hr) Value: 6
  misc_feature: MA Experiment 20000117 PARAMETER Experiment Name: At_100uM_ABA_Mutants_cDNA_P Parameter: Tissue Value: Aerial
  misc_feature: MA Experiment 20000117 PARAMETER Experiment Name: At_100uM_ABA_Mutants_cDNA_P Parameter: Treatment Value: 100uM ABA vs. No Treatment
  misc_feature: MA Experiment ID: 20000173 Result: Down-regulated in Transcription
  misc_feature: MA Experiment 20000173 PARAMETER Experiment Name: At_42deg_Heat_P Parameter: Age (day) Value: 14
  misc_feature: MA Experiment 20000173 PARAMETER Experiment Name: At_42deg_Heat_P Parameter: Organism Value: A. thaliana
  misc_feature: MA Experiment 20000173 PARAMETER Experiment Name: At_42deg_Heat_P Parameter: Plant Line Value: WS
  misc_feature: MA Experiment 20000173 PARAMETER Experiment Name: At_42deg_Heat_P Parameter: Temperature (deg C) Value: 42 vs. 22
  misc_feature: MA Experiment 20000173 PARAMETER Experiment Name: At_42deg_Heat_P Parameter: Timepoint (hr) Value: 6
  misc_feature: MA Experiment 20000173 PARAMETER Experiment Name: At_42deg_Heat_P Parameter: Tissue Value: Aerial
  misc_feature: MA Experiment ID: 20000213 Result: Up-regulated in Transcription
  misc_feature: MA Experiment 20000213 PARAMETER Experiment Name: At_4deg_Cold_P Parameter: Timepoint (hr) Value: 2
  misc_feature: MA Experiment ID: 20000224 Result: Down-regulated in Transcription
  misc_feature: MA Experiment ID: 20000453 Result: Down-regulated in Transcription
  misc_feature: MA Experiment 20000453 PARAMETER Experiment Name: At_100uM_ABA_P Parameter: Age (day) Value: 15
  misc_feature: MA Experiment 20000453 PARAMETER Experiment Name: At_100uM_ABA_P Parameter: Organism Value: A. thaliana
  misc_feature: MA Experiment 20000453 PARAMETER Experiment Name: At_100uM_ABA_P Parameter: Plant Line Value: WS
  misc_feature: MA Experiment 20000453 PARAMETER Experiment Name: At_100uM_ABA_P Parameter: Timepoint (hr) Value: 24
  misc_feature: MA Experiment 20000453 PARAMETER Experiment Name: At_100uM_ABA_P Parameter: Tissue Value: Aerial
  misc_feature: MA Experiment 20000453 PARAMETER Experiment Name: At_100uM_ABA_P Parameter: Treatment Value: 100uM ABA vs. No Treatment
  misc_feature: MA Experiment ID: 20001247 Result: Down-regulated in Transcription
  misc_feature: MA Experiment 20001247 PARAMETER Experiment Name: At_Far-red-induction_P Parameter: Age (day) Value: 7
  misc_feature: MA Experiment 20001247 PARAMETER Experiment Name: At_Far-red-induction_P Parameter: Light Value: Far-red vs. White
  misc_feature: MA Experiment 20001247 PARAMETER Experiment Name: At_Far-red-induction_P Parameter: Organism Value: A. thaliana
  misc_feature: MA Experiment 20001247 PARAMETER Experiment Name: At_Far-red-induction_P Parameter: Plant Line Value: Columbia
  misc_feature: MA Experiment 20001247 PARAMETER Experiment Name: At_Far-red-induction_P Parameter: Timepoint (hr) Value: 1
  misc_feature: MA Experiment 20001247 PARAMETER Experiment Name: At_Far-red-induction_P Parameter: Tissue Value: Whole Plant
  misc_feature: MA Experiment ID: 20001248 Result: Up-regulated in Transcription
  misc_feature: MA Experiment 20001248 PARAMETER Experiment Name: At_Far-red-induction_P Parameter: Age (day) Value: 7
  misc_feature: MA Experiment 20001248 PARAMETER Experiment Name: At_Far-red-induction_P Parameter: Light Value: Far-red vs. White
  misc_feature: MA Experiment 20001248 PARAMETER Experiment Name: At_Far-red-induction_P Parameter: Organism Value: A. thaliana
  misc_feature: MA Experiment 20001248 PARAMETER Experiment Name: At_Far-red-induction_P Parameter: Plant Line Value: Columbia
  misc_feature: MA Experiment 20001248 PARAMETER Experiment Name: At_Far-red-induction_P Parameter: Timepoint (hr) Value: 4
  misc_feature: MA Experiment 20001248 PARAMETER Experiment Name: At_Far-red-induction_P Parameter: Tissue Value: Whole Plant
  misc_feature: MA Experiment ID: 20001557 Result: Up-regulated in Transcription
  misc_feature: MA Experiment 20001557 PARAMETER Experiment Name: At_Drought_Soil_Dry_P Parameter: Age (day) Value: 27
  misc_feature: MA Experiment 20001557 PARAMETER Experiment Name: At_Drought_Soil_Dry_P Parameter: Organism Value: A. thaliana
  misc_feature: MA Experiment 20001557 PARAMETER Experiment Name: At_Drought_Soil_Dry_P Parameter: Plant Line Value: WS
  misc_feature: MA Experiment 20001557 PARAMETER Experiment Name: At_Drought_Soil_Dry_P Parameter: Post Timepoint (hr) Value: 3
  misc_feature: MA Experiment 20001557 PARAMETER Experiment Name: At_Drought_Soil_Dry_P Parameter: Post-Treatment Value: Re-Water vs. No Drought
  misc_feature: MA Experiment 20001557 PARAMETER Experiment Name: At_Drought_Soil_Dry_P Parameter: Timepoint (day) Value: 13
  misc_feature: MA Experiment 20001557 PARAMETER Experiment Name: At_Drought_Soil_Dry_P Parameter: Treatment Value: Drought vs. No Drought
acataagtctctctcttacattttgaaaccctaatttctcttcttttccccaaaaaaaaatgtctgaagttgagtaccggtgctttgtcggcggccttgcctgggccaccaatgatgaagatcttcaaaggacgttctcacagttcggcgacgttatcgattctaagatcattaacgaccgcgagagtggaagatcaaggggattcggattcgtcaccttcaaggacgagaaagccatgagggatgcgattgaagagatgaacggtaaagagctcgatggacgtgtcatcaccgtgaacgaggctcagtcgagaggtagcggcggtggcggaggaggccgtggtggaagcggtggtggttaccgcagcggaggttacggatctggtggaggcggtggtggccgaggatacggtggtggtggacgccgtgagggaggtggctacggaggcggtgatggtggaagttacggaggcggtggtggcggctggtaatcaaagatagagttgtttgcgtgctgctgctctgtttttggtttagatttggttttgtgtcaccacttctggtttggttatcgttcgtttggtttacttttttgatgaaacagtttcgtttaagtcttctttgtctggaacgaaatgttaattcgcgtgttgtttactaaatttataacgtttcctttt

SEQ ID NO: 103715 - protein, 143 aa, Arabidopsis thaliana
  peptide (1)..(143): Ceres Seq. ID no. 13613402
  misc_feature (8)..(79): Pfam Name: RNA recognition motif. (a.k.a. RRM, RBD, or RNP domain) Pfam Description: RNA recognition motif. (a.k.a. RRM, RBD, or RNP
  misc_feature (1)..(143): Homolog of NCBI NO: 15235002 NR Description: glycine-rich RNA-binding protein 8 (GRP8) (CCR1)
  misc_feature (1)..(128): Homolog of NCBI NO: 30692254 NR Description: glycine-rich RNA-binding protein 8 (GRP8) (CCR1)
  misc_feature (1)..(143): Homolog of NCBI NO: 544416 NR Description: Glycine-rich RNA-binding protein 10
  misc_feature (1)..(143): Homolog of NCBI NO: 2119042 NR Description: glycine-rich RNA-binding protein RGP-1a - wood
  misc_feature (3)..(143): Homolog of NCBI NO: 15226605 NR Description: glycine-rich RNA-binding protein (AtGRP7)
  misc_feature (3)..(143): Homolog of NCBI NO: 1346180 NR Description: Glycine-rich RNA-binding protein GRP1A
  misc_feature (3)..(143): Homolog of NCBI NO: 30681492 NR Description: glycine-rich RNA-binding protein (AtGRP7)
  misc_feature (3)..(143): Homolog of NCBI NO: 1346181 NR Description: Glycine-rich RNA-binding protein GRP2A
  misc_feature (1)..(142): Homolog of NCBI NO: 544426 NR Description: Glycine-rich RNA-binding protein
  misc_feature (3)..(142): Homolog of NCBI NO: 21553354 NR Description: glycine-rich RNA binding protein 7 [Arabidopsis
MSEVEYRCFVGGLAWATNDEDLQRTFSQFGDVIDSKIINDRESGRSRGFGFVTFKDEKAMRDAIEEMNGKELDGRVITVNEAQSRGSGGGGGGRGGSGGGYRSGGYGSGGGGGGRGYGGGGRREGGGYGGGDGGSYGGGGGGW

SEQ ID NO: 103716 - protein, 84 aa, Arabidopsis thaliana
  peptide (1)..(84): Ceres Seq. ID no. 13613403
  misc_feature (30)..(83): Pfam Name: Herpesvirus large structural phosphoprotein UL32 Pfam Description: Herpesvirus large structural phosphoprotein UL32
  misc_feature (1)..(84): Homolog of NCBI NO: 15235002 NR Description: glycine-rich RNA-binding protein 8 (GRP8) (CCR1)
  misc_feature (1)..(69): Homolog of NCBI NO: 30692254 NR Description: glycine-rich RNA-binding protein 8 (GRP8) (CCR1)
  misc_feature (1)..(84): Homolog of NCBI NO: 544416 NR Description: Glycine-rich RNA-binding protein 10
  misc_feature (1)..(84): Homolog of NCBI NO: 2119042 NR Description: glycine-rich RNA-binding protein RGP-1a - wood
  misc_feature (1)..(84): Homolog of NCBI NO: 15226605 NR Description: glycine-rich RNA-binding protein (AtGRP7)
  misc_feature (1)..(84): Homolog of NCBI NO: 1346180 NR Description: Glycine-rich RNA-binding protein GRP1A
  misc_feature (1)..(84): Homolog of NCBI NO: 30681492 NR Description: glycine-rich RNA-binding protein (AtGRP7)
  misc_feature (1)..(84): Homolog of NCBI NO: 1346181 NR Description: Glycine-rich RNA-binding protein GRP2A
  misc_feature (1)..(83): Homolog of NCBI NO: 544426 NR Description: Glycine-rich RNA-binding protein
  misc_feature (1)..(83): Homolog of NCBI NO: 21553354 NR Description: glycine-rich RNA binding protein 7 [Arabidopsis
MRDAIEEMNGKELDGRVITVNEAQSRGSGGGGGGRGGSGGGYRSGGYGSGGGGGGRGYGGGGRREGGGYGGGDGGSYGGGGGGW

SEQ ID NO: 103717 - protein, 77 aa, Arabidopsis thaliana
  peptide (1)..(77): Ceres Seq. ID no. 13613404
  misc_feature (23)..(76): Pfam Name: Herpesvirus large structural phosphoprotein UL32 Pfam Description: Herpesvirus large structural phosphoprotein UL32
  misc_feature (1)..(77): Homolog of NCBI NO: 15235002 NR Description: glycine-rich RNA-binding protein 8 (GRP8) (CCR1)
  misc_feature (1)..(62): Homolog of NCBI NO: 30692254 NR Description: glycine-rich RNA-binding protein 8 (GRP8) (CCR1)
  misc_feature (1)..(77): Homolog of NCBI NO: 544416 NR Description: Glycine-rich RNA-binding protein 10
  misc_feature (1)..(77): Homolog of NCBI NO: 2119042 NR Description: glycine-rich RNA-binding protein RGP-1a - wood
  misc_feature (1)..(77): Homolog of NCBI NO: 15226605 NR Description: glycine-rich RNA-binding protein (AtGRP7)
  misc_feature (1)..(77): Homolog of NCBI NO: 1346180 NR Description: Glycine-rich RNA-binding protein GRP1A
  misc_feature (1)..(77): Homolog of NCBI NO: 30681492 NR Description: glycine-rich RNA-binding protein (AtGRP7)
  misc_feature (1)..(77): Homolog of NCBI NO: 1346181 NR Description: Glycine-rich RNA-binding protein GRP2A
  misc_feature (1)..(76): Homolog of NCBI NO: 544426 NR Description: Glycine-rich RNA-binding protein
  misc_feature (1)..(76): Homolog of NCBI NO: 21553354 NR Description: glycine-rich RNA binding protein 7 [Arabidopsis
MNGKELDGRVITVNEAQSRGSGGGGGGRGGSGGGYRSGGYGSGGGGGGRGYGGGGRREGGGYGGGDGGSYGGGGGGW

SEQ ID NO: 103718 - DNA, 698 bp, Arabidopsis thaliana
  misc_feature (1)..(698): Ceres Seq. ID no. 13613409
  misc_feature: MA Experiment ID: 20000173 Result: Down-regulated in Transcription
  misc_feature: MA Experiment 20000173 PARAMETER Experiment Name: At_42deg_Heat_P Parameter: Age (day) Value: 14
  misc_feature: MA Experiment 20000173 PARAMETER Experiment Name: At_42deg_Heat_P Parameter: Organism Value: A. thaliana
  misc_feature: MA Experiment 20000173 PARAMETER Experiment Name: At_42deg_Heat_P Parameter: Plant Line Value: WS
  misc_feature: MA Experiment 20000173 PARAMETER Experiment Name: At_42deg_Heat_P Parameter: Temperature (deg C) Value: 42 vs. 22
  misc_feature: MA Experiment 20000173 PARAMETER Experiment Name: At_42deg_Heat_P Parameter: Timepoint (hr) Value: 6
  misc_feature: MA Experiment 20000173 PARAMETER Experiment Name: At_42deg_Heat_P Parameter: Tissue Value: Aerial
  misc_feature: MA Experiment ID: 20000213 Result: Up-regulated in Transcription
  misc_feature: MA Experiment 20000213 PARAMETER Experiment Name: At_4deg_Cold_P Parameter: Timepoint (hr) Value: 2
  misc_feature: MA Experiment ID: 20000453 Result: Down-regulated in Transcription
  misc_feature: MA Experiment 20000453 PARAMETER Experiment Name: At_100uM_ABA_P Parameter: Age (day) Value: 15
  misc_feature: MA Experiment 20000453 PARAMETER Experiment Name: At_100uM_ABA_P Parameter: Organism Value: A. thaliana
  misc_feature: MA Experiment 20000453 PARAMETER Experiment Name: At_100uM_ABA_P Parameter: Plant Line Value: WS
  misc_feature: MA Experiment 20000453 PARAMETER Experiment Name: At_100uM_ABA_P Parameter: Timepoint (hr) Value: 24
  misc_feature: MA Experiment 20000453 PARAMETER Experiment Name: At_100uM_ABA_P Parameter: Tissue Value: Aerial
  misc_feature: MA Experiment 20000453 PARAMETER Experiment Name: At_100uM_ABA_P Parameter: Treatment Value: 100uM ABA vs. No Treatment
  misc_feature: MA Experiment ID: 20001247 Result: Down-regulated in Transcription
  misc_feature: MA Experiment 20001247 PARAMETER Experiment Name: At_Far-red-induction_P Parameter: Age (day) Value: 7
  misc_feature: MA Experiment 20001247 PARAMETER Experiment Name: At_Far-red-induction_P Parameter: Light Value: Far-red vs. White
  misc_feature: MA Experiment 20001247 PARAMETER Experiment Name: At_Far-red-induction_P Parameter: Organism Value: A. thaliana
  misc_feature: MA Experiment 20001247 PARAMETER Experiment Name: At_Far-red-induction_P Parameter: Plant Line Value: Columbia
  misc_feature: MA Experiment 20001247 PARAMETER Experiment Name: At_Far-red-induction_P Parameter: Timepoint (hr) Value: 1
  misc_feature: MA Experiment 20001247 PARAMETER Experiment Name: At_Far-red-induction_P Parameter: Tissue Value: Whole Plant
  misc_feature: MA Experiment ID: 20001248 Result: Up-regulated in Transcription
  misc_feature: MA Experiment 20001248 PARAMETER Experiment Name: At_Far-red-induction_P Parameter: Age (day) Value: 7
  misc_feature: MA Experiment 20001248 PARAMETER Experiment Name: At_Far-red-induction_P Parameter: Light Value: Far-red vs. White
  misc_feature: MA Experiment 20001248 PARAMETER Experiment Name: At_Far-red-induction_P Parameter: Organism Value: A. thaliana
  misc_feature: MA Experiment 20001248 PARAMETER Experiment Name: At_Far-red-induction_P Parameter: Plant Line Value: Columbia
  misc_feature: MA Experiment 20001248 PARAMETER Experiment Name: At_Far-red-induction_P Parameter: Timepoint (hr) Value: 4
  misc_feature: MA Experiment 20001248 PARAMETER Experiment Name: At_Far-red-induction_P Parameter: Tissue Value: Whole Plant
  misc_feature: MA Experiment ID: 20001557 Result: Up-regulated in Transcription
  misc_feature: MA Experiment 20001557 PARAMETER Experiment Name: At_Drought_Soil_Dry_P Parameter: Age (day) Value: 27
  misc_feature: MA Experiment 20001557 PARAMETER Experiment Name: At_Drought_Soil_Dry_P Parameter: Organism Value: A. thaliana
  misc_feature: MA Experiment 20001557 PARAMETER Experiment Name: At_Drought_Soil_Dry_P Parameter: Plant Line Value: WS
  misc_feature: MA Experiment 20001557 PARAMETER Experiment Name: At_Drought_Soil_Dry_P Parameter: Post Timepoint (hr) Value: 3
  misc_feature: MA Experiment 20001557 PARAMETER Experiment Name: At_Drought_Soil_Dry_P Parameter: Post-Treatment Value: Re-Water vs. No Drought
  misc_feature: MA Experiment 20001557 PARAMETER Experiment Name: At_Drought_Soil_Dry_P Parameter: Timepoint (day) Value: 13
  misc_feature: MA Experiment 20001557 PARAMETER Experiment Name: At_Drought_Soil_Dry_P Parameter: Treatment Value: Drought vs. No Drought
atcacataagtctctctcttacattttgaaaccctaatttctcttcttttccccaaaaaaaaatgtctgaagttgagtaccggtgctttgtcggcggccttgcctgggccaccaatgatgaagatcttcaaaggacgttctcacagttcggcgacgttatcgattctaagatcattaacgaccgcgagagtggaagatcaaggggattcggattcgtcaccttcaaggacgagaaagccatgagggatgcgattgaagagatgaacggtaaagagctcgatggacgtgtcatcaccgtgaacgaggctcagtcgagaggtagcggcggtggcggaggaggccgtggtggaagcggtggtggttaccgcagcggaggcggtggtggatactcaggaggcggtggcggcggatactcaggaggaggcggtggtggttacgagaggcggtgatggtggaagttacggaggcggtggtggcggctggtaatcaaagatagagttgtttgcgtgctgctgctctgtttttggtttagatttggttttgtgtcaccacttctggtttggttatcgttcgtttggtttacttttttgatgaaacagtttcgtttaagtcttctttgtctggaacgaaatgttaattcgcgtgttgtttactaaatttataacgtttccttttaaccagattcgagattttccctc

SEQ ID NO: 103719 - protein, 128 aa, Arabidopsis thaliana; identical to SEQ ID NO: 44013
  peptide (1)..(128): Ceres Seq. ID no. 13613410
  misc_feature (8)..(79): Pfam Name: RNA recognition motif. (a.k.a. RRM, RBD, or RNP domain) Pfam Description: RNA recognition motif. (a.k.a. RRM, RBD, or RNP
  misc_feature (1)..(128): Homolog of NCBI NO: 15235002 NR Description: glycine-rich RNA-binding protein 8 (GRP8) (CCR1)
  misc_feature (1)..(124): Homolog of NCBI NO: 30692254 NR Description: glycine-rich RNA-binding protein 8 (GRP8) (CCR1)
  misc_feature (1)..(125): Homolog of NCBI NO: 544426 NR Description: Glycine-rich RNA-binding protein
  misc_feature (3)..(125): Homolog of NCBI NO: 1346180 NR Description: Glycine-rich RNA-binding protein GRP1A
  misc_feature (3)..(125): Homolog of NCBI NO: 15226605 NR Description: glycine-rich RNA-binding protein (AtGRP7)
  misc_feature (3)..(125): Homolog of NCBI NO: 21553354 NR Description: glycine-rich RNA binding protein 7 [Arabidopsis
  misc_feature (1)..(125): Homolog of NCBI NO: 544416 NR Description: Glycine-rich RNA-binding protein 10
  misc_feature (1)..(125): Homolog of NCBI NO: 2119042 NR Description: glycine-rich RNA-binding protein RGP-1a - wood
  misc_feature (2)..(127): Homolog of NCBI NO: 112994 NR Description: Glycine-rich RNA-binding, abscisic acid-inducible
  misc_feature (3)..(125): Homolog of NCBI NO: 30681492 NR Description: glycine-rich RNA-binding protein (AtGRP7)

SEQ ID NO: 103720 - protein, 69 aa, Arabidopsis thaliana; identical to SEQ ID NO: 44014
  peptide (1)..(69): Ceres Seq. ID no. 13613411
  misc_feature (1)..(69): Homolog of NCBI NO: 15235002 NR Description: glycine-rich RNA-binding protein 8 (GRP8) (CCR1)
  misc_feature (1)..(65): Homolog of NCBI NO: 30692254 NR Description: glycine-rich RNA-binding protein 8 (GRP8) (CCR1)
  misc_feature (1)..(66): Homolog of NCBI NO: 544426 NR Description: Glycine-rich RNA-binding protein
  misc_feature (1)..(66): Homolog of NCBI NO: 1346180 NR Description: Glycine-rich RNA-binding protein GRP1A
  misc_feature (1)..(66): Homolog of NCBI NO: 15226605 NR Description: glycine-rich RNA-binding protein (AtGRP7)
  misc_feature (1)..(66): Homolog of NCBI NO: 21553354 NR Description: glycine-rich RNA binding protein 7 [Arabidopsis
  misc_feature (1)..(66): Homolog of NCBI NO: 544416 NR Description: Glycine-rich RNA-binding protein 10
  misc_feature (1)..(66): Homolog of NCBI NO: 2119042 NR Description: glycine-rich RNA-binding protein RGP-1a - wood
  misc_feature (1)..(68): Homolog of NCBI NO: 112994 NR Description: Glycine-rich RNA-binding, abscisic acid-inducible
  misc_feature (1)..(66): Homolog of NCBI NO: 30681492 NR Description: glycine-rich RNA-binding protein (AtGRP7)

SEQ ID NO: 103721 - DNA, 1592 bp, Arabidopsis thaliana
  misc_feature (1)..(1592): Ceres Seq. ID no. 13613412
  misc_feature: MA Experiment ID: 108573 Result: Up-regulated in Transcription
  misc_feature: MA Experiment 108573 PARAMETER Experiment Name: At_Drought_cDNA_P Parameter: Timepoint (hr) Value: 6
  misc_feature: MA Experiment 108573 PARAMETER Experiment Name: At_Drought_cDNA_P Parameter: Tissue Value: Aerial
  misc_feature: MA Experiment 108573 PARAMETER Experiment Name: At_Drought_cDNA_P Parameter: Treatment Value: Drought vs. No Drought
  misc_feature: MA Experiment ID: 20000072 Result: Up-regulated in Transcription
  misc_feature: MA Experiment 20000072 PARAMETER Experiment Name: At_100uM_ABA_Mutants_cDNA_P Parameter: Plant Line Value: CS8105
  misc_feature: MA Experiment 20000072 PARAMETER Experiment Name: At_100uM_ABA_Mutants_cDNA_P Parameter: Timepoint (hr) Value: 6
  misc_feature: MA Experiment 20000072 PARAMETER Experiment Name: At_100uM_ABA_Mutants_cDNA_P Parameter: Tissue Value: Aerial
  misc_feature: MA Experiment 20000072 PARAMETER Experiment Name: At_100uM_ABA_Mutants_cDNA_P Parameter: Treatment Value: 100uM ABA vs. No Treatment
  misc_feature: MA Experiment ID: 20000184 Result: Down-regulated in Transcription
  misc_feature: MA Experiment 20000184 PARAMETER Experiment Name: At_Shoots__P Parameter: Age (day) Value: 7
  misc_feature: MA Experiment 20000184 PARAMETER Experiment Name: At_Shoots__P Parameter: Tissue Value: Shoots vs. Whole Plant
ataacgagaaccctttaccataaaaatctcaactttatcccttattcttatctgcaaaattcgttctcgtcccttggattatgggtttttttgttcctcgagaaagttgattgctttcttggaatccatgcgtgccctttctctttgttgttttaaaggatgcgtctgcgttagattgttttagtaactttgtgaattgattaagcacttcttcaccataatcaagtttatagcttttgcttctgatcagatcctgttatggaatctccacattctgaggcatcaatcgtgaatggtagtatccatttgaatggcagtggtgaaaccaaaacaaagaatatagtcatgtcgtctgattcagacagtttcatcggtgtgcttgaggtttttgttcaccaagctagggacatccacaacatctgtatctatcataagcaagatgtgtatgctaagctttgtctcacaaatgatcccgaaaactccttgtccacaaagatcatcaatggtggagggcaaaaccctgtcttcgacgatacccttcagttcgacgttaagaacctggattgttcgcttaagtgtgagatatttatgatgagccgcgtgaagaattatcttgaggatcagttacttggattctctcttgtacctttgtctgaagtgattgtgaggaatgggaaattggagaaagagttctccctttcttcaaccgatttgtatcactctcctgcaggttttgtcgagttgtctctctcgtacgcaggagattcgcctgacgtgatgcatattcctgcggttccaactgcggatgagaccgagttggctcctatcgagtttgatgagagtgagtttttggatccaaagattgtctgtgaaaacaatcaaatggtgtctaagtacttctccactacgtgttctgattctgatgattttgcaagctctgaaactggctttgtggaagtaaacagcatcctgtctgcagttgttgaaactgctgttgacgaagcagcaccggccaattctgtctcaacaaatggaatctcatctccatcaactgcagttagctctggctcctcgggaactcatgatgtttcaaagcaatctagtgaaggaaacaactcagattcagaacaagaagcgaagaagccaacagatatcatcaagagtggtgatttagataagactgatgaagaagcagttgtgaaaccggttctgacagtgaacattgaaccagagcaaaaggtagtgcaacaagatattgttgacatgtacacaaaaagcttgcagcaattcactgagtcactggctaagatgaaacttcctttggacatcgatagcccaacccaatcagagaactcaagctcctcccagcagacgccaaagagtgctagctcccgtgttttctacgggagtagagccttcttctgaagctcagaaatcatctcaagtttggcatcagaagtagcgagcatgtagtgaaagtgtaataagttaaaagtagacactatctaaaatgtgtaactatcttcctttgaagcctttagcttttcttgttatctgcaacttttccaatttagtactaaagtttcataatc

SEQ ID NO: 103722 - protein, 388 aa, Arabidopsis thaliana; identical to SEQ ID NO: 75377
  peptide (1)..(388): Ceres Seq. ID no. 13613413
  misc_feature (41)..(128): Pfam Name: C2 domain Pfam Description: C2 domain
  misc_feature (1)..(388): Homolog of NCBI NO: 25405379 NR Description: unknown protein [imported] - Arabidopsis thaliana
  misc_feature (1)..(388): Homolog of NCBI NO: 18403117 NR Description: C2 domain-containing protein [Arabidopsis >gi|9454555|gb|AAF87878.1|AC012561_11 Unknown protein
  misc_feature (1)..(388): Homolog of NCBI NO: 21593485 NR Description: unknown [Arabidopsis thaliana]
  misc_feature (2)..(388): Homolog of NCBI NO: 9758185 NR Description: gene_id:MTE17.25~pir||T07080~similar to unknown
  misc_feature (2)..(388): Homolog of NCBI NO: 30696612 NR Description: C2 domain-containing protein [Arabidopsis
  misc_feature (2)..(388): Homolog of NCBI NO: 28393796 NR Description: unknown protein [Arabidopsis thaliana]
  misc_feature (1)..(388): Homolog of NCBI NO: 24414275 NR Description: Unknown protein [Oryza sativa (japonica
  misc_feature (37)..(388): Homolog of NCBI NO: 18416832 NR Description: C2 domain-containing protein [Arabidopsis >gi|14586360|emb|CAC42891.1| putative protein [Arabidopsis
  misc_feature (41)..(388): Homolog of NCBI NO: 34906644 NR Description: P0431G06.18 [Oryza sativa (japonica
  misc_feature (38)..(282): Homolog of NCBI NO: 34901084 NR Description: contains ESTs

SEQ ID NO: 103723 - protein, 359 aa, Arabidopsis thaliana; identical to SEQ ID NO: 75378
  peptide (1)..(359): Ceres Seq. ID no. 13613414
  misc_feature (12)..(99): Pfam Name: C2 domain Pfam Description: C2 domain
  misc_feature (1)..(359): Homolog of NCBI NO: 25405379 NR Description: unknown protein [imported] - Arabidopsis thaliana
  misc_feature (1)..(359): Homolog of NCBI NO: 18403117 NR Description: C2 domain-containing protein [Arabidopsis >gi|9454555|gb|AAF87878.1|AC012561_11 Unknown protein
  misc_feature (1)..(359): Homolog of NCBI NO: 21593485 NR Description: unknown [Arabidopsis thaliana]
  misc_feature (1)..(359): Homolog of NCBI NO: 9758185 NR Description: gene_id:MTE17.25~pir||T07080~similar to unknown
  misc_feature (1)..(359): Homolog of NCBI NO: 30696612 NR Description: C2 domain-containing protein [Arabidopsis
  misc_feature (1)..(359): Homolog of NCBI NO: 28393796 NR Description: unknown protein [Arabidopsis thaliana]
  misc_feature (1)..(359): Homolog of NCBI NO: 24414275 NR Description: Unknown protein [Oryza sativa (japonica
  misc_feature (8)..(359): Homolog of NCBI NO: 18416832 NR Description: C2 domain-containing protein [Arabidopsis >gi|14586360|emb|CAC42891.1| putative protein [Arabidopsis
  misc_feature (12)..(359): Homolog of NCBI NO: 34906644 NR Description: P0431G06.18 [Oryza sativa (japonica
  misc_feature (9)..(253): Homolog of NCBI NO: 34901084 NR Description: contains ESTs

SEQ ID NO: 103724 - protein, 278 aa, Arabidopsis thaliana; identical to SEQ ID NO: 75379
  peptide (1)..(278): Ceres Seq. ID no. 13613415
  misc_feature (1)..(278): Homolog of NCBI NO: 25405379 NR Description: unknown protein [imported] - Arabidopsis thaliana
  misc_feature (1)..(278): Homolog of NCBI NO: 18403117 NR Description: C2 domain-containing protein [Arabidopsis >gi|9454555|gb|AAF87878.1|AC012561_11 Unknown protein
  misc_feature (1)..(278): Homolog of NCBI NO: 21593485 NR Description: unknown [Arabidopsis thaliana]
  misc_feature (1)..(278): Homolog of NCBI NO: 9758185 NR Description: gene_id:MTE17.25~pir||T07080~similar to unknown
  misc_feature (1)..(278): Homolog of NCBI NO: 30696612 NR Description: C2 domain-containing protein [Arabidopsis
  misc_feature (1)..(278): Homolog of NCBI NO: 28393796 NR Description: unknown protein [Arabidopsis thaliana]
  misc_feature (1)..(278): Homolog of NCBI NO: 24414275 NR Description: Unknown protein [Oryza sativa (japonica
  misc_feature (1)..(278): Homolog of NCBI NO: 18416832 NR Description: C2 domain-containing protein [Arabidopsis >gi|14586360|emb|CAC42891.1| putative protein [Arabidopsis
  misc_feature (1)..(278): Homolog of NCBI NO: 34906644 NR Description: P0431G06.18 [Oryza sativa (japonica
  misc_feature (1)..(172): Homolog of NCBI NO: 34901084 NR Description: contains ESTs

SEQ ID NO: 103725 - DNA, 1282 bp, Arabidopsis thaliana
  misc_feature (1)..(1282): Ceres Seq. ID no. 13613420
  misc_feature: MA Experiment ID: 108434 Result: Down-regulated in Transcription
  misc_feature: MA Experiment 108434 PARAMETER Experiment Name: At_Root_Tips_cDNA_P Parameter: Tissue Value: Root Tips
  misc_feature: MA Experiment ID: 108572 Result: Up-regulated in Transcription
  misc_feature: MA Experiment 108572 PARAMETER Experiment Name: At_Drought_cDNA_P Parameter: Timepoint (hr) Value: 1
  misc_feature: MA Experiment 108572 PARAMETER Experiment Name: At_Drought_cDNA_P Parameter: Tissue Value: Aerial
  misc_feature: MA Experiment 108572 PARAMETER Experiment Name: At_Drought_cDNA_P Parameter: Treatment Value: Drought vs. No Drought
  misc_feature: MA Experiment ID: 108573 Result: Up-regulated in Transcription
  misc_feature: MA Experiment 108573 PARAMETER Experiment Name: At_Drought_cDNA_P Parameter: Timepoint (hr) Value: 6
  misc_feature: MA Experiment 108573 PARAMETER Experiment Name: At_Drought_cDNA_P Parameter: Tissue Value: Aerial
  misc_feature: MA Experiment 108573 PARAMETER Experiment Name: At_Drought_cDNA_P Parameter: Treatment Value: Drought vs. No Drought
  misc_feature: MA Experiment ID: 108585 Result: Up-regulated in Transcription
  misc_feature: MA Experiment 108585 PARAMETER Experiment Name: At_5mM_NaNP_cDNA_P Parameter: Timepoint (hr) Value: 6
  misc_feature: MA Experiment 108585 PARAMETER Experiment Name: At_5mM_NaNP_cDNA_P Parameter: Tissue Value: Aerial
  misc_feature: MA Experiment 108585 PARAMETER Experiment Name: At_5mM_NaNP_cDNA_P Parameter: Treatment Value: null
  misc_feature: MA Experiment ID: 20000111 Result: Up-regulated in Transcription
  misc_feature: MA Experiment 20000111 PARAMETER Experiment Name: At_42deg_Heat_cDNA_P Parameter: Temperature (deg C) Value: 42 vs. 22
  misc_feature: MA Experiment 20000111 PARAMETER Experiment Name: At_42deg_Heat_cDNA_P Parameter: Timepoint (hr) Value: 6
  misc_feature: MA Experiment 20000111 PARAMETER Experiment Name: At_42deg_Heat_cDNA_P Parameter: Tissue Value: Aerial
  misc_feature: MA Experiment ID: 20000113 Result: Up-regulated in Transcription
  misc_feature: MA Experiment 20000113 PARAMETER Experiment Name: At_42deg_Heat_cDNA_P Parameter: Temperature (deg C) Value: 42 vs. 22
  misc_feature: MA Experiment 20000113 PARAMETER Experiment Name: At_42deg_Heat_cDNA_P Parameter: Timepoint (hr) Value: 8
  misc_feature: MA Experiment 20000113 PARAMETER Experiment Name: At_42deg_Heat_cDNA_P Parameter: Tissue Value: Aerial
  misc_feature: MA Experiment ID: 20000173 Result: Up-regulated in Transcription
  misc_feature: MA Experiment 20000173 PARAMETER Experiment Name: At_42deg_Heat_P Parameter: Age (day) Value: 14
  misc_feature: MA Experiment 20000173 PARAMETER Experiment Name: At_42deg_Heat_P Parameter: Organism Value: A. thaliana
  misc_feature: MA Experiment 20000173 PARAMETER Experiment Name: At_42deg_Heat_P Parameter: Plant Line Value: WS
  misc_feature: MA Experiment 20000173 PARAMETER Experiment Name: At_42deg_Heat_P Parameter: Temperature (deg C) Value: 42 vs. 22
  misc_feature: MA Experiment 20000173 PARAMETER Experiment Name: At_42deg_Heat_P Parameter: Timepoint (hr) Value: 6
  misc_feature: MA Experiment 20000173 PARAMETER Experiment Name: At_42deg_Heat_P Parameter: Tissue Value: Aerial
  misc_feature: MA Experiment ID: 20000179 Result: Up-regulated in Transcription
  misc_feature: MA Experiment 20000179 PARAMETER Experiment Name: At_Germinating_Seeds_P Parameter: Age (hr) Value: 6 vs. 0
  misc_feature: MA Experiment 20000179 PARAMETER Experiment Name: At_Germinating_Seeds_P Parameter: Tissue Value: Germinating Seeds
  misc_feature: MA Experiment ID: 20000227 Result: Down-regulated in Transcription
  misc_feature: MA Experiment 20000227 PARAMETER Experiment Name: At_Root-Tips-vs-Tops_P Parameter: Tissue Value: Root Tips vs. Root Tops
  misc_feature: MA Experiment ID: 20001451 Result: Up-regulated in Transcription
  misc_feature: MA Experiment 20001451 PARAMETER Experiment Name: At_Far-red-induction_P Parameter: Age (day) Value: 7
  misc_feature: MA Experiment 20001451 PARAMETER Experiment Name: At_Far-red-induction_P Parameter: Light Value: Far-red vs. White
  misc_feature: MA Experiment 20001451 PARAMETER Experiment Name: At_Far-red-induction_P Parameter: Organism Value: A. thaliana
  misc_feature: MA Experiment 20001451 PARAMETER Experiment Name: At_Far-red-induction_P Parameter: Plant Line Value: Columbia
  misc_feature: MA Experiment 20001451 PARAMETER Experiment Name: At_Far-red-induction_P Parameter: Timepoint (hr) Value: 24
  misc_feature: MA Experiment 20001451 PARAMETER Experiment Name: At_Far-red-induction_P Parameter: Tissue Value: Whole Plant
  misc_feature: MA Experiment ID: 20001905 Result: Up-regulated in Transcription
  misc_feature: MA Experiment 20001905 PARAMETER Experiment Name: At_Drought_Reproduction_P Parameter: Age (day) Value: 40
  misc_feature: MA Experiment 20001905 PARAMETER Experiment Name: At_Drought_Reproduction_P Parameter: Organism Value: A. thaliana
  misc_feature: MA Experiment 20001905 PARAMETER Experiment Name: At_Drought_Reproduction_P Parameter: Plant Line Value: WS
  misc_feature: MA Experiment 20001905 PARAMETER Experiment Name: At_Drought_Reproduction_P Parameter: Timepoint (day) Value: 10
  misc_feature: MA Experiment 20001905 PARAMETER Experiment Name: At_Drought_Reproduction_P Parameter: Tissue Value: Rosettes
  misc_feature: MA Experiment 20001905 PARAMETER Experiment Name: At_Drought_Reproduction_P Parameter: Treatment Value: Drought vs. No Drought
  misc_feature: MA Experiment ID: 20001911 Result: Up-regulated in Transcription
  misc_feature: MA Experiment 20001911 PARAMETER Experiment Name: At_Drought_Reproduction_P Parameter: Age (day) Value: 40
  misc_feature: MA Experiment 20001911 PARAMETER Experiment Name: At_Drought_Reproduction_P Parameter: Organism Value: A. thaliana
  misc_feature: MA Experiment 20001911 PARAMETER Experiment Name: At_Drought_Reproduction_P Parameter: Plant Line Value: WS
  misc_feature: MA Experiment 20001911 PARAMETER Experiment Name: At_Drought_Reproduction_P Parameter: Timepoint (day) Value: 10
  misc_feature: MA Experiment 20001911 PARAMETER Experiment Name: At_Drought_Reproduction_P Parameter: Tissue Value: Flowers
  misc_feature: MA Experiment 20001911 PARAMETER Experiment Name: At_Drought_Reproduction_P Parameter: Treatment Value: Drought vs. No Drought
gctttttgtgttgaagagagagtttcctatcttctccattcctcccaccatctccctcatcttcatcttcctctctctttctctctttctcaacaatctctattagatctttctccattaccattacctctggctttctcttaaatccaccatcatgaggagaggaagaggctcttccgccgtcgccggacctaccgtcgttgccgccatcaacggatctgtaaaagaaatcagattcagaggcgtaaggaagagaccttggggacgattcgcagctgagatccgtgatccatggaaaaaagctcgtgtttggttaggtactttcgattccgccgaagaagctgctcgcgcttacgactccgccgctcgtaacctccgtggtcctaaagccaaaactaatttccccatcgattcttcttctcctcctcctcctaatctccgatttaatcagattcgtaatcaaaatcaaaaccaagtcgatccgtttatggaccaccggttattcaccgaccatcaacaacagttcccgattgttaaccggcctactagtagcagcatgagcagcaccgttgaatcgtttagcggacccagacctacgacgatgaaaccggccacgacgaagagatatcctagaactccaccggttgttccggaggattgtcacagcgattgcgattcgtcgtcgtctgtaatcgacgacgacgacgatatcgcatcgtcttcacggcgacggaatccgccgtttcaattcgatcttaattttccaccgttggattgtgttgacttgttcaatggcgctgatgatcttcactgtaccgatctacgtctctaatgaattggtaaaatcaaaatcaaaatcacagatccgtgatcggtttgattttaatcgaaaacacacaacaaaatcctttttttttttttttttaaattttctgtttcgttgatctcatataatttttactatgcgggagaaatagaaagacaaagaaacgaagaagaagaagaagatggtgatgagcttgagagagcttgagctggttctgtgtttcttctgtgatgatattgtaagagtattattattttactattattactaaatcttcaaaaccaagaagaagaagaccgaacacgatgatctgttgtgtctgtttgttttactgtaagaaaaacgcagatctgggtttcgtttttttcttgagatagatcaaacaacccccatctttgtaacatatacatttggaacactcatgattctaaataaaaaatctagaatctttttttc

SEQ ID NO: 103726 - protein, 225 aa, Arabidopsis thaliana; identical to SEQ ID NO: 29620
  peptide (1)..(225): Ceres Seq. ID no. 13613421
  misc_feature (25)..(89): Pfam Name: AP2 domain Pfam Description: AP2 domain
  misc_feature (1)..(225): Homolog of NCBI NO: 15223609 NR Description: ethylene responsive element binding factor 3 [Arabidopsis thaliana] >gi|7531109|sp|O80339|ERF3_ARATH Ethylene element binding factor 3 (AtERF3) >gi|25453551|pir||T52011
  misc_feature (1)..(225): Homolog of NCBI NO: 4587373 NR Description: ethylene responsive element binding factor
  misc_feature (1)..(175): Homolog of NCBI NO: 15231110 NR Description: ethylene responsive element binding factor 7 [Arabidopsis thaliana] >gi|8467962|dbj|BAA96653.1| ERF factor 7 [Arabidopsis thaliana] >gi|9294548|dbj|BAB02811.1|
  misc_feature (105)..(225): Homolog of NCBI NO: 15231110 NR Description: ethylene responsive element binding factor 7 [Arabidopsis thaliana] >gi|8467962|dbj|BAA96653.1| ERF factor 7 [Arabidopsis thaliana] >gi|9294548|dbj|BAB02811.1|
  misc_feature (27)..(225): Homolog of NCBI NO: 32488388 NR Description: OSJNBa0043A12.18 [Oryza sativa (japonica
  misc_feature (14)..(106): Homolog of NCBI NO: 4099921 NR Description: EREBP-3 homolog [Stylosanthes hamata]
  misc_feature (20)..(106): Homolog of NCBI NO: 4099914 NR Description: ethylene-responsive element binding protein
  misc_feature (20)..(89): Homolog of NCBI NO: 8809573 NR Description: ethylene-responsive element binding factor
  misc_feature (7)..(93): Homolog of NCBI NO: 38345793 NR Description: OSJNBa0085I10.10 [Oryza sativa (japonica
  misc_feature (23)..(92): Homolog of NCBI NO: 7489114 NR Description: DNA binding protein EREBP-3 - common tobacco

SEQ ID NO: 103727 - protein, 114 aa, Arabidopsis thaliana; identical to SEQ ID NO: 29621
  peptide (1)..(114): Ceres Seq. ID no. 13613422
  misc_feature (1)..(114): Homolog of NCBI NO: 15223609 NR Description: ethylene responsive element binding factor 3 [Arabidopsis thaliana] >gi|7531109|sp|O80339|ERF3_ARATH Ethylene element binding factor 3 (AtERF3) >gi|25453551|pir||T52011
  misc_feature (1)..(114): Homolog of NCBI NO: 4587373 NR Description: ethylene responsive element binding factor
  misc_feature (1)..(64): Homolog of NCBI NO: 15231110 NR Description: ethylene responsive element binding factor 7 [Arabidopsis thaliana] >gi|8467962|dbj|BAA96653.1| ERF factor 7 [Arabidopsis thaliana] >gi|9294548|dbj|BAB02811.1|
  misc_feature (1)..(114): Homolog of NCBI NO: 15231110 NR Description: ethylene responsive element binding factor 7 [Arabidopsis thaliana] >gi|8467962|dbj|BAA96653.1| ERF factor 7 [Arabidopsis thaliana] >gi|9294548|dbj|BAB02811.1|
  misc_feature (1)..(114): Homolog of NCBI NO: 32488388 NR Description: OSJNBa0043A12.18 [Oryza sativa (japonica
  misc_feature (1)..(94): Homolog of NCBI NO: 20340233 NR Description: ethylene responsive element binding factor 4-like
  misc_feature (1)..(111): Homolog of NCBI NO: 34904146 NR Description: unnamed protein product [Oryza sativa (japonica group)] >gi|8096469|dbj|BAA94514.2| unnamed protein product
  misc_feature (1)..(48): Homolog of NCBI NO: 6560760 NR Description: F3M18.21 [Arabidopsis thaliana]
  misc_feature (1)..(55): Homolog of NCBI NO: 15240610 NR Description: putative protein; protein id: At5g50080.1 thaliana] >gi|10177219|dbj|BAB10294.1| contains similarity to AP2
  misc_feature (1)..(78): Homolog of NCBI NO: 15236595 NR Description: AP2 domain transcription factor, putative

SEQ ID NO: 103728 - DNA, 723 bp, Arabidopsis thaliana
  misc_feature (1)..(723): Ceres Seq. ID no. 13613426
  misc_feature: MA Experiment ID: 108434 Result: Up-regulated in Transcription
  misc_feature: MA Experiment 108434 PARAMETER Experiment Name: At_Root_Tips_cDNA_P Parameter: Tissue Value: Root Tips
  misc_feature: MA Experiment ID: 108461 Result: Up-regulated in Transcription
  misc_feature: MA Experiment 108461 PARAMETER Experiment Name: At_Germinating_Seeds_cDNA_P Parameter: Age (day) Value: 1 vs. 0
  misc_feature: MA Experiment 108461 PARAMETER Experiment Name: At_Germinating_Seeds_cDNA_P Parameter: Tissue Value: Germinating Seeds
  misc_feature: MA Experiment ID: 108573 Result: Down-regulated in Transcription
  misc_feature: MA Experiment 108573 PARAMETER Experiment Name: At_Drought_cDNA_P Parameter: Timepoint (hr) Value: 6
  misc_feature: MA Experiment 108573 PARAMETER Experiment Name: At_Drought_cDNA_P Parameter: Tissue Value: Aerial
  misc_feature: MA Experiment 108573 PARAMETER Experiment Name: At_Drought_cDNA_P Parameter: Treatment Value: Drought vs. No Drought
  misc_feature: MA Experiment ID: 108585 Result: Down-regulated in Transcription
  misc_feature: MA Experiment 108585 PARAMETER Experiment Name: At_5mM_NaNP_cDNA_P Parameter: Timepoint (hr) Value: 6
  misc_feature: MA Experiment 108585 PARAMETER Experiment Name: At_5mM_NaNP_cDNA_P Parameter: Tissue Value: Aerial
  misc_feature: MA Experiment 108585 PARAMETER Experiment Name: At_5mM_NaNP_cDNA_P Parameter: Treatment Value: null
  misc_feature: MA Experiment ID: 108595 Result: Down-regulated in Transcription
  misc_feature: MA Experiment 108595 PARAMETER Experiment Name: At_Ler-pi_Ovule_cDNA_P Parameter: Plant Line Value: null
  misc_feature: MA Experiment ID: 20000069 Result: Down-regulated in Transcription
  misc_feature: MA Experiment 20000069 PARAMETER Experiment Name: At_100uM_ABA_Mutants_cDNA_P Parameter: Plant Line Value: CS23
  misc_feature: MA Experiment 20000069 PARAMETER Experiment Name: At_100uM_ABA_Mutants_cDNA_P Parameter: Timepoint (hr) Value: 6
  misc_feature: MA Experiment 20000069 PARAMETER Experiment Name: At_100uM_ABA_Mutants_cDNA_P Parameter: Tissue Value: Aerial
  misc_feature: MA Experiment 20000069 PARAMETER Experiment Name: At_100uM_ABA_Mutants_cDNA_P Parameter: Treatment Value: 100uM ABA vs. No Treatment
  misc_feature: MA Experiment ID: 20000070 Result: Down-regulated in Transcription
  misc_feature: MA Experiment 20000070 PARAMETER Experiment Name: At_100uM_ABA_Mutants_cDNA_P Parameter: Plant Line Value: CS24
  misc_feature: MA Experiment 20000070 PARAMETER Experiment Name: At_100uM_ABA_Mutants_cDNA_P Parameter: Timepoint (hr) Value: 6
  misc_feature: MA Experiment 20000070 PARAMETER Experiment Name: At_100uM_ABA_Mutants_cDNA_P Parameter: Tissue Value: Aerial
  misc_feature: MA Experiment 20000070 PARAMETER Experiment Name: At_100uM_ABA_Mutants_cDNA_P Parameter: Treatment Value: 100uM ABA vs. No Treatment
  misc_feature: MA Experiment ID: 20000071 Result: Down-regulated in Transcription
  misc_feature: MA Experiment 20000071 PARAMETER Experiment Name: At_100uM_ABA_Mutants_cDNA_P Parameter: Plant Line Value: CS8104
  misc_feature: MA Experiment 20000071 PARAMETER Experiment Name: At_100uM_ABA_Mutants_cDNA_P Parameter: Timepoint (hr) Value: 6
  misc_feature: MA Experiment 20000071 PARAMETER Experiment Name: At_100uM_ABA_Mutants_cDNA_P Parameter: Tissue Value: Aerial
  misc_feature: MA Experiment 20000071 PARAMETER Experiment Name: At_100uM_ABA_Mutants_cDNA_P Parameter: Treatment Value: 100uM ABA vs. No Treatment
  misc_feature: MA Experiment ID: 20000072 Result: Down-regulated in Transcription
  misc_feature: MA Experiment 20000072 PARAMETER Experiment Name: At_100uM_ABA_Mutants_cDNA_P Parameter: Plant Line Value: CS8105
  misc_feature: MA Experiment 20000072 PARAMETER Experiment Name: At_100uM_ABA_Mutants_cDNA_P Parameter: Timepoint (hr) Value: 6
  misc_feature: MA Experiment 20000072 PARAMETER Experiment Name: At_100uM_ABA_Mutants_cDNA_P Parameter: Tissue Value: Aerial
  misc_feature: MA Experiment 20000072 PARAMETER Experiment Name: At_100uM_ABA_Mutants_cDNA_P Parameter: Treatment Value: 100uM ABA vs. No Treatment
  misc_feature: MA Experiment ID: 20000180 Result: Up-regulated in Transcription
  misc_feature: MA Experiment 20000180 PARAMETER Experiment Name: At_Germinating_Seeds_P Parameter: Age (hr) Value: 24 vs. 0
  misc_feature: MA Experiment 20000180 PARAMETER Experiment Name: At_Germinating_Seeds_P Parameter: Tissue Value: Germinating Seeds
  misc_feature: MA Experiment ID: 20000184 Result: Up-regulated in Transcription
  misc_feature: MA Experiment 20000184 PARAMETER Experiment Name: At_Shoots__P Parameter: Age (day) Value: 7
  misc_feature: MA Experiment 20000184 PARAMETER Experiment Name: At_Shoots__P Parameter: Tissue Value: Shoots vs. Whole Plant
  misc_feature: MA Experiment ID: 20000185 Result: Down-regulated in Transcription
  misc_feature: MA Experiment 20000185 PARAMETER Experiment Name: At_Roots__P Parameter: Age (day) Value: 7 vs. 21
  misc_feature: MA Experiment 20000185 PARAMETER Experiment Name: At_Roots__P Parameter: Organism Value: A. thaliana
  misc_feature: MA Experiment 20000185 PARAMETER Experiment Name: At_Roots__P Parameter: Tissue Value: Roots vs. Whole Plant
  misc_feature: MA Experiment ID: 20000234 Result: Up-regulated in Transcription
  misc_feature: MA Experiment 20000234 PARAMETER Experiment Name: At_Siliques_P Parameter: Age (day) Value: 21
  misc_feature: MA Experiment 20000234 PARAMETER Experiment Name: At_Siliques_P Parameter: Organism Value: A. thaliana
  misc_feature: MA Experiment 20000234 PARAMETER Experiment Name: At_Siliques_P Parameter: Plant Line Value: WS
  misc_feature: MA Experiment 20000234 PARAMETER Experiment Name: At_Siliques_P Parameter: Tissue Value: Less Than 5mm Siliques vs. Whole Plant
  misc_feature: MA Experiment ID: 20000235 Result: Up-regulated in Transcription
  misc_feature: MA Experiment 20000235 PARAMETER Experiment Name: At_Siliques_P Parameter: Age (day) Value: 21
  misc_feature: MA Experiment 20000235 PARAMETER Experiment Name: At_Siliques_P Parameter: Organism Value: A. thaliana
  misc_feature: MA Experiment 20000235 PARAMETER Experiment Name: At_Siliques_P Parameter: Plant Line Value: WS
  misc_feature: MA Experiment 20000235 PARAMETER Experiment Name: At_Siliques_P Parameter: Tissue Value: 5-10mm Siliques vs. Whole Plant
  misc_feature: MA Experiment ID: 20000437 Result: Down-regulated in Transcription
  misc_feature: MA Experiment 20000437 PARAMETER Experiment Name: At_Drought_P Parameter: Age (day) Value: 8
  misc_feature: MA Experiment 20000437 PARAMETER Experiment Name: At_Drought_P Parameter: Organism Value: A. thaliana
  misc_feature: MA Experiment 20000437 PARAMETER Experiment Name: At_Drought_P Parameter: Plant Line Value: WS
  misc_feature: MA Experiment 20000437 PARAMETER Experiment Name: At_Drought_P Parameter: Timepoint (hr) Value: 24
  misc_feature: MA Experiment 20000437 PARAMETER Experiment Name: At_Drought_P Parameter: Tissue Value: Whole Plant
  misc_feature: MA Experiment 20000437 PARAMETER Experiment Name: At_Drought_P Parameter: Treatment Value: Drought vs. No Drought
  misc_feature: MA Experiment ID: 20000438 Result: Up-regulated in Transcription
  misc_feature: MA Experiment 20000438 PARAMETER Experiment Name: At_Shoots__P Parameter: Age (day) Value: 14
  misc_feature: MA Experiment 20000438 PARAMETER Experiment Name: At_Shoots__P Parameter: Tissue Value: Shoots vs. Whole Plant
  misc_feature: MA Experiment ID: 20000439 Result: Down-regulated in Transcription
  misc_feature: MA Experiment 20000439 PARAMETER Experiment Name: At_Roots__P Parameter: Age (day) Value: 14 vs. 21
  misc_feature: MA Experiment 20000439 PARAMETER Experiment Name: At_Roots__P Parameter: Organism Value: A. thaliana
  misc_feature: MA Experiment 20000439 PARAMETER Experiment Name: At_Roots__P Parameter: Tissue Value: Roots vs. Whole Plant
  misc_feature: MA Experiment ID: 20000794 Result: Down-regulated in Transcription
  misc_feature: MA Experiment 20000794 PARAMETER Experiment Name: At_Petals_P Parameter: Age (day) Value: 23-25 days
  misc_feature: MA Experiment 20000794 PARAMETER Experiment Name: At_Petals_P Parameter: Plant Line Value: WS
  misc_feature: MA Experiment 20000794 PARAMETER Experiment Name: At_Petals_P Parameter: Tissue Value: Petals vs. Whole plant
  misc_feature: MA Experiment ID: 20001248 Result: Down-regulated in Transcription
  misc_feature: MA Experiment 20001248 PARAMETER Experiment Name: At_Far-red-induction_P Parameter: Age (day) Value: 7
  misc_feature: MA Experiment 20001248 PARAMETER Experiment Name: At_Far-red-induction_P Parameter: Light Value: Far-red vs. White
  misc_feature: MA Experiment 20001248 PARAMETER Experiment Name: At_Far-red-induction_P Parameter: Organism Value: A. thaliana
  misc_feature: MA Experiment 20001248 PARAMETER Experiment Name: At_Far-red-induction_P Parameter: Plant Line Value: Columbia
  misc_feature: MA Experiment 20001248 PARAMETER Experiment Name: At_Far-red-induction_P Parameter: Timepoint (hr) Value: 4
  misc_feature: MA Experiment 20001248 PARAMETER Experiment Name: At_Far-red-induction_P Parameter: Tissue Value: Whole Plant
  misc_feature: MA Experiment ID: 20001757 Result: Up-regulated in Transcription
  misc_feature: MA Experiment 20001757 PARAMETER Experiment Name: At_50mM_NH4NO3_L-to-H_P Parameter: Timepoint (hr) Value: 6
  misc_feature: MA Experiment 20001757 PARAMETER Experiment Name: At_50mM_NH4NO3_L-to-H_P Parameter: Tissue Value: Leaf
  misc_feature: MA Experiment 20001757 PARAMETER Experiment Name: At_50mM_NH4NO3_L-to-H_P Parameter: Treatment Value: 50mM NH4NO3 vs 100mM Mannitol
  misc_feature: MA Experiment ID: 20001904 Result: Down-regulated in Transcription
  misc_feature: MA Experiment 20001904 PARAMETER Experiment Name: At_Drought_Reproduction_P Parameter: Age (day) Value: 37
  misc_feature: MA Experiment 20001904 PARAMETER Experiment Name: At_Drought_Reproduction_P Parameter: Organism Value: A. thaliana
  misc_feature: MA Experiment 20001904 PARAMETER Experiment Name: At_Drought_Reproduction_P Parameter: Plant Line Value: WS
  misc_feature: MA Experiment 20001904 PARAMETER Experiment Name: At_Drought_Reproduction_P Parameter: Timepoint (day) Value: 7
  misc_feature: MA Experiment 20001904 PARAMETER Experiment Name: At_Drought_Reproduction_P Parameter: Tissue Value: Rosettes
  misc_feature: MA Experiment 20001904 PARAMETER Experiment Name: At_Drought_Reproduction_P Parameter: Treatment Value: Drought vs. No Drought
  misc_feature: MA Experiment ID: 20001906 Result: Down-regulated in Transcription
  misc_feature: MA Experiment 20001906 PARAMETER Experiment Name: At_Drought_Reproduction_P Parameter: Age (day) Value: 35
  misc_feature: MA Experiment 20001906 PARAMETER Experiment Name: At_Drought_Reproduction_P Parameter: Organism Value: A. thaliana
  misc_feature: MA Experiment 20001906 PARAMETER Experiment Name: At_Drought_Reproduction_P Parameter: Plant Line Value: WS
  misc_feature: MA Experiment 20001906 PARAMETER Experiment Name: At_Drought_Reproduction_P Parameter: Timepoint (day) Value: 5
  misc_feature: MA Experiment 20001906 PARAMETER Experiment Name: At_Drought_Reproduction_P Parameter: Tissue Value: Siliques
  misc_feature: MA Experiment 20001906 PARAMETER Experiment Name: At_Drought_Reproduction_P Parameter: Treatment Value: Drought vs. No Drought
aaaatgagtggataatacaaccactgaatctgttttgctttagttggaagcattaagagaacagccatggcttcttcttcaatctcattctcctgtgcaccttctttggccacctcactcttctccaccacttcttcttccccaaggctgctctcctctagatttctcggaacccgaaacttaaagcttcggatccgacctgccagactaggaccctccaatggttcaagaaccacttgctggttcaagttcggcaagaatggtgtcgatgctgaaaatgccggaatctatggcagccagtctcgagatgatttcgacagagacgacgtcgaacagtatttcaactacatgggtatgcttgcagtagaaggaacctattcaaagatggaagctcttcttaacctaaacattcacccagttgatatcttgttgatgttagccgctacagaaggtgacagacctaagatcgaggagcttctcaaagccggtgctgattattcggtcaaggacgctgatggaagaaccgctatcgacagagccaacagtgaagagatccgtgatttgatccttggctactcgactcaaaaggcttgactccgcttggttttaatacacaggaacaacacaagttatgttcttgagttttgaaatgtttgtgtttgctagaacaaactgtctttctgtgttccgcggatgagtagattataaaatccatcttcttcc

SEQ ID NO: 103729 - protein, 175 aa, Arabidopsis thaliana; identical to SEQ ID NO: 30737
  peptide (1)..(175): Ceres Seq. ID no. 13613427
  misc_feature (1)..(175): Homolog of NCBI NO: 25373264 NR Description: unknown protein [imported] - Arabidopsis thaliana
  misc_feature (1)..(175): Homolog of NCBI NO: 18403267 NR Description: expressed protein [Arabidopsis thaliana] unknown protein [Arabidopsis thaliana] unknown protein [Arabidopsis thaliana]
  misc_feature (1)..(175): Homolog of NCBI NO: 34901972 NR Description: hypothetical protein~similar to Arabidopsis
  misc_feature (95)..(175): Homolog of NCBI NO: 33146521 NR Description: unknown protein [Oryza sativa (japonica

SEQ ID NO: 103730 - DNA, 1259 bp, Arabidopsis thaliana
  misc_feature (1)..(1259): Ceres Seq. ID no. 13613452
  misc_feature: MA Experiment ID: 108434 Result: Down-regulated in Transcription
  misc_feature: MA Experiment 108434 PARAMETER Experiment Name: At_Root_Tips_cDNA_P Parameter: Tissue Value: Root Tips
  misc_feature: MA Experiment ID: 108569 Result: Up-regulated in Transcription
  misc_feature: MA Experiment 108569 PARAMETER Experiment Name: At_0.001%_MeJA__cDNA_P Parameter: Timepoint (hr) Value: 6
  misc_feature: MA Experiment 108569 PARAMETER Experiment Name: At_0.001%_MeJA__cDNA_P Parameter: Tissue Value: Aerial
  misc_feature: MA Experiment 108569 PARAMETER Experiment Name: At_0.001%_MeJA__cDNA_P Parameter: Treatment Value: 0.001% MeJA vs. No Treatment
  misc_feature: MA Experiment ID: 108579 Result: Up-regulated in Transcription
  misc_feature: MA Experiment 108579 PARAMETER Experiment Name: At_4deg_Cold_cDNA_P Parameter: Temperature (deg C) Value: 4 vs. 22
  misc_feature: MA Experiment 108579 PARAMETER Experiment Name: At_4deg_Cold_cDNA_P Parameter: Timepoint (hr) Value: 6
  misc_feature: MA Experiment 108579 PARAMETER Experiment Name: At_4deg_Cold_cDNA_P Parameter: Tissue Value: Aerial
  misc_feature: MA Experiment ID: 108595 Result: Down-regulated in Transcription
  misc_feature: MA Experiment 108595 PARAMETER Experiment Name: At_Ler-pi_Ovule_cDNA_P Parameter: Plant Line Value: null
  misc_feature: MA Experiment ID: 20000090 Result: Up-regulated in Transcription
  misc_feature: MA Experiment ID: 20000111 Result: Down-regulated in Transcription
  misc_feature: MA Experiment 20000111 PARAMETER Experiment Name: At_42deg_Heat_cDNA_P Parameter: Temperature (deg C) Value: 42 vs. 22
  misc_feature: MA Experiment 20000111 PARAMETER Experiment Name: At_42deg_Heat_cDNA_P Parameter: Timepoint (hr) Value: 6
  misc_feature: MA Experiment 20000111 PARAMETER Experiment Name: At_42deg_Heat_cDNA_P Parameter: Tissue Value: Aerial
  misc_feature: MA Experiment ID: 20000112 Result: Down-regulated in Transcription
  misc_feature: MA Experiment 20000112 PARAMETER Experiment Name: At_42deg_Heat_cDNA_P Parameter: Temperature (deg C) Value: 42 vs. 22
  misc_feature: MA Experiment 20000112 PARAMETER Experiment Name: At_42deg_Heat_cDNA_P Parameter: Timepoint (hr) Value: 2
  misc_feature: MA Experiment 20000112 PARAMETER Experiment Name: At_42deg_Heat_cDNA_P Parameter: Tissue Value: Aerial
  misc_feature: MA Experiment ID: 20000113 Result: Down-regulated in Transcription
  misc_feature: MA Experiment 20000113 PARAMETER Experiment Name: At_42deg_Heat_cDNA_P Parameter: Temperature (deg C) Value: 42 vs. 22
  misc_feature: MA Experiment 20000113 PARAMETER Experiment Name: At_42deg_Heat_cDNA_P Parameter: Timepoint (hr) Value: 8
  misc_feature: MA Experiment 20000113 PARAMETER Experiment Name: At_42deg_Heat_cDNA_P Parameter: Tissue Value: Aerial
  misc_feature: MA Experiment ID: 20000794 Result: Down-regulated in Transcription
  misc_feature: MA Experiment 20000794 PARAMETER Experiment Name: At_Petals_P Parameter: Age (day) Value: 23-25 days
  misc_feature: MA Experiment 20000794 PARAMETER Experiment Name: At_Petals_P Parameter: Plant Line Value: WS
  misc_feature: MA Experiment 20000794 PARAMETER Experiment Name: At_Petals_P Parameter: Tissue Value: Petals vs. Whole plant
  misc_feature: MA Experiment ID: 20001451 Result: Down-regulated in Transcription
  misc_feature: MA Experiment 20001451 PARAMETER Experiment Name: At_Far-red-induction_P Parameter: Age (day) Value: 7
  misc_feature: MA Experiment 20001451 PARAMETER Experiment Name: At_Far-red-induction_P Parameter: Light Value: Far-red vs. White
  misc_feature: MA Experiment 20001451 PARAMETER Experiment Name: At_Far-red-induction_P Parameter: Organism Value: A. thaliana
  misc_feature: MA Experiment 20001451 PARAMETER Experiment Name: At_Far-red-induction_P Parameter: Plant Line Value: Columbia
  misc_feature: MA Experiment 20001451 PARAMETER Experiment Name: At_Far-red-induction_P Parameter: Timepoint (hr) Value: 24
  misc_feature: MA Experiment 20001451 PARAMETER Experiment Name: At_Far-red-induction_P Parameter: Tissue Value: Whole Plant
  misc_feature: MA Experiment ID: 20001905 Result: Down-regulated in Transcription
  misc_feature: MA Experiment 20001905 PARAMETER Experiment Name: At_Drought_Reproduction_P Parameter: Age (day) Value: 40
  misc_feature: MA Experiment 20001905 PARAMETER Experiment Name: At_Drought_Reproduction_P Parameter: Organism Value: A. thaliana
  misc_feature: MA Experiment 20001905 PARAMETER Experiment Name: At_Drought_Reproduction_P Parameter: Plant Line Value: WS
  misc_feature: MA Experiment 20001905 PARAMETER Experiment Name: At_Drought_Reproduction_P Parameter: Timepoint (day) Value: 10
  misc_feature: MA Experiment 20001905 PARAMETER Experiment Name: At_Drought_Reproduction_P Parameter: Tissue Value: Rosettes
  misc_feature: MA Experiment 20001905 PARAMETER Experiment Name: At_Drought_Reproduction_P Parameter: Treatment Value: Drought vs. No Drought
  misc_feature: MA Experiment ID: 20001911 Result: Down-regulated in Transcription
  misc_feature: MA Experiment 20001911 PARAMETER Experiment Name: At_Drought_Reproduction_P Parameter: Age (day) Value: 40
  misc_feature: MA Experiment 20001911 PARAMETER Experiment Name: At_Drought_Reproduction_P Parameter: Organism Value: A. thaliana
  misc_feature: MA Experiment 20001911 PARAMETER Experiment Name: At_Drought_Reproduction_P Parameter: Plant Line Value: WS
  misc_feature: MA Experiment 20001911 PARAMETER Experiment Name: At_Drought_Reproduction_P Parameter: Timepoint (day) Value: 10
  misc_feature: MA Experiment 20001911 PARAMETER Experiment Name: At_Drought_Reproduction_P Parameter: Tissue Value: Flowers
  misc_feature: MA Experiment 20001911 PARAMETER Experiment Name: At_Drought_Reproduction_P Parameter: Treatment Value: Drought vs. No Drought
gatttttacaaaacaaagatggaagagcaagtcagaagtcaaaatagctcgaagatgtaagtgacggcgcctgaatactcttggctggtagatttcacctacctcatttttttcatatatctcaaacgtggaatcgctgttactcagtttttatatataaaaataaacactcgctcttcttcaaccaaactcatttccaaaattccacaaagtttttcaaatggcgattgctttcaaatccggcgtcttcttcctccaatccccaaaatctcaaattggattccgccattcttctcctcctgattcatcgctttctttcaagagattcactcccatggcttctctctccacctcttctcctactctcggtctcgctgatactttcacacagctcaaaaaacaaggcaaagtagcattcataccatatatcacagctggtgatccggatctctctactactgctgaagcattgaaagttcttgatgcttgtggttctgacataatcgaattgggtgttccttactctgaccctttagctgatggacctgttattcaggctgcggcaacaaggtcgttggagaggggaacaaacctcgatagcatccttgagatgttggataaggttgttccacaaatatcttgtccgatttcgttgttcacgtattacaacccgattcttaaacgtgggttggggaagttcatgtccagcatcagagctgttggtgtacagggacttgtggttcccgatgttcctcttgaggaaactgagatgctgagaaaagaagccctcaacaacgacattgagctggtcctactcactacaccaaccacaccaacagagcgaatgaagctaattgttgatgcgtcagaaggatttatttaccttgtgagctcaattggagtgactggtgcacgatcatctgtaagcggaaaggttcagtcgctcttgaaggatatcaaagaggcgacagacaagccggtggcagtcggttttggaatatcaaagccggagcatgtgaaacagatagctggatggggagctgatggagtgatcgtaggcagtgcaatggtaaagctattgggtgatgcaaagtcgccaactgaaggacttaaggagcttgagaaactaaccaagtctcttaaatctgctcttctttgaaacacaaacatttgcagacaacatctttagattgtgtttttgattattatcggtgtgtgacaatgatgtctcaatcttttgatacatttcaagtatgatt

SEQ ID NO: 103731 - protein, 312 aa, Arabidopsis thaliana
  peptide (1)..(312): Ceres Seq. ID no. 13613453
  misc_feature (55)..(312): Pfam Name: Tryptophan synthase alpha chain Pfam Description: Tryptophan synthase alpha chain
  misc_feature (1)..(312): Homolog of NCBI NO: 18410104 NR Description: tryptophan synthase, alpha subunit (TSA1) thaliana] >gi|2129755|pir||S59519 tryptophan synthase (EC
  misc_feature (1)..(312): Homolog of NCBI NO: 21593559 NR Description: tryptophan synthase alpha chain [Arabidopsis
  misc_feature (87)..(312): Homolog of NCBI NO: 32441888 NR Description: putative tryptophan synthase alpha chain
  misc_feature (39)..(312): Homolog of NCBI NO: 15235430 NR Description: tryptophan synthase, alpha subunit (TSA1), [Arabidopsis thaliana] >gi|7436987|pir||T01088 tryptophan
  misc_feature (31)..(311): Homolog of NCBI NO: 34393530 NR Description: putative tryptophan synthase alpha chain [Oryza
  misc_feature (50)..(311): Homolog of NCBI NO: 34897224 NR Description: putative indole-3-glycerol phosphate lyase [Oryza
  misc_feature (39)..(311): Homolog of NCBI NO: 11993328 NR Description: putative tryptophan synthase alpha [Zea mays]
  misc_feature (49)..(311): Homolog of NCBI NO: 11993325 NR Description: indole-3-glycerol phosphate lyase [Zea mays]
  misc_feature (29)..(311): Homolog of NCBI NO: 34897212 NR Description: putative indole-3-glycerol phosphate lyase [Oryza
  misc_feature (38)..(311): Homolog of NCBI NO: 34897218 NR Description: putative indole-3-glycerol phosphate lyase [Oryza
MAIAFKSGVFFLQSPKSQIGFRHSSPPDSSLSFKRFTPMASLSTSSPTLGLADTFTQLKKQGKVAFIPYITAGDPDLSTTAEALKVLDACGSDIIELGVPYSDPLADGPVIQAAATRSLERGTNLDSILEMLDKVVPQISCPISLFTYYNPILKRGLGKFMSSIRAVGVQGLVVPDVPLEETEMLRKEALNNDIELVLLTTPTTPTERMKLIVDASEGFIYLVSSIGVTGARSSVSGKVQSLLKDIKEATDKPVAVGFGISKPEHVKQIAGWGADGVIVGSAMVKLLGDAKSPTEGLKELEKLTKSLKSALL

SEQ ID NO: 103732 - protein, 274 aa, Arabidopsis thaliana
  peptide (1)..(274): Ceres Seq. ID no. 13613454
  misc_feature (17)..(274): Pfam Name: Tryptophan synthase alpha chain Pfam Description: Tryptophan synthase alpha chain
  misc_feature (1)..(274): Homolog of NCBI NO: 18410104 NR Description: tryptophan synthase, alpha subunit (TSA1) thaliana] >gi|2129755|pir||S59519 tryptophan synthase (EC
  misc_feature (1)..(274): Homolog of NCBI NO: 21593559 NR Description: tryptophan synthase alpha chain [Arabidopsis
  misc_feature (49)..(274): Homolog of NCBI NO: 32441888 NR Description: putative tryptophan synthase alpha chain
  misc_feature (1)..(274): Homolog of NCBI NO: 15235430 NR Description: tryptophan synthase, alpha subunit (TSA1), [Arabidopsis thaliana] >gi|7436987|pir||T01088 tryptophan
  misc_feature (1)..(273): Homolog of NCBI NO: 34393530 NR Description: putative tryptophan synthase alpha chain [Oryza
  misc_feature (12)..(273): Homolog of NCBI NO: 34897224 NR Description: putative indole-3-glycerol phosphate lyase [Oryza
  misc_feature (1)..(273): Homolog of NCBI NO: 11993328 NR Description: putative tryptophan synthase alpha [Zea mays]
  misc_feature (11)..(273): Homolog of NCBI NO: 11993325 NR Description: indole-3-glycerol phosphate lyase [Zea mays]
  misc_feature (1)..(273): Homolog of NCBI NO: 34897212 NR Description: putative indole-3-glycerol phosphate lyase [Oryza
  misc_feature (1)..(273): Homolog of NCBI NO: 34897218 NR Description: putative indole-3-glycerol phosphate lyase [Oryza
MASLSTSSPTLGLADTFTQLKKQGKVAFIPYITAGDPDLSTTAEALKVLDACGSDIIELGVPYSDPLADGPVIQAAATRSLERGTNLDSILEMLDKVVPQISCPISLFTYYNPILKRGLGKFMSSIRAVGVQGLVVPDVPLEETEMLRKEALNNDIELVLLTTPTTPTERMKLIVDASEGFIYLVSSIGVTGARSSVSGKVQSLLKDIKEATDKPVAVGFGISKPEHVKQIAGWGADGVIVGSAMVKLLGDAKSPTEGLKELEKLTKSLKSALL

SEQ ID NO: 103733 - protein, 182 aa, Arabidopsis thaliana
  peptide (1)..(182): Ceres Seq. ID no. 13613455
  misc_feature (1)..(182): Pfam Name: Tryptophan synthase alpha chain Pfam Description: Tryptophan synthase alpha chain
  misc_feature (1)..(182): Homolog of NCBI NO: 18410104 NR Description: tryptophan synthase, alpha subunit (TSA1) thaliana] >gi|2129755|pir||S59519 tryptophan synthase (EC
  misc_feature (1)..(182): Homolog of NCBI NO: 21593559 NR Description: tryptophan synthase alpha chain [Arabidopsis
  misc_feature (1)..(182): Homolog of NCBI NO: 32441888 NR Description: putative tryptophan synthase alpha chain
  misc_feature (1)..(182): Homolog of NCBI NO: 15235430 NR Description: tryptophan synthase, alpha subunit (TSA1), [Arabidopsis thaliana] >gi|7436987|pir||T01088 tryptophan
  misc_feature (1)..(181): Homolog of NCBI NO: 34393530 NR Description: putative tryptophan synthase alpha chain [Oryza
  misc_feature (1)..(181): Homolog of NCBI NO: 34897224 NR Description: putative indole-3-glycerol phosphate lyase [Oryza
  misc_feature (1)..(181): Homolog of NCBI NO: 11993328 NR Description: putative tryptophan synthase alpha [Zea mays]
  misc_feature (1)..(181): Homolog of NCBI NO: 11993325 NR Description: indole-3-glycerol phosphate lyase [Zea mays]
  misc_feature (1)..(181): Homolog of NCBI NO: 34897212 NR Description: putative indole-3-glycerol phosphate lyase [Oryza
  misc_feature (1)..(181): Homolog of NCBI NO: 34897218 NR Description: putative indole-3-glycerol phosphate lyase [Oryza
MLDKVVPQISCPISLFTYYNPILKRGLGKFMSSIRAVGVQGLVVPDVPLEETEMLRKEALNNDIELVLLTTPTTPTERMKLIVDASEGFIYLVSSIGVTGARSSVSGKVQSLLKDIKEATDKPVAVGFGISKPEHVKQIAGWGADGVIVGSAMVKLLGDAKSPTEGLKELEKLTKSLKSALL

SEQ ID NO: 103734 - DNA, 2040 bp, Arabidopsis thaliana
  misc_feature (1)..(2040): Ceres Seq. ID no. 13613456
  misc_feature: MA Experiment ID: 20000069 Result: Down-regulated in Transcription
  misc_feature: MA Experiment 20000069 PARAMETER Experiment Name: At_100uM_ABA_Mutants_cDNA_P Parameter: Plant Line Value: CS23
  misc_feature: MA Experiment 20000069 PARAMETER Experiment Name: At_100uM_ABA_Mutants_cDNA_P Parameter: Timepoint (hr) Value: 6
  misc_feature: MA Experiment 20000069 PARAMETER Experiment Name: At_100uM_ABA_Mutants_cDNA_P Parameter: Tissue Value: Aerial
  misc_feature: MA Experiment 20000069 PARAMETER Experiment Name: At_100uM_ABA_Mutants_cDNA_P Parameter: Treatment Value: 100uM ABA vs. No Treatment
  misc_feature: MA Experiment ID: 20000070 Result: Down-regulated in Transcription
  misc_feature: MA Experiment 20000070 PARAMETER Experiment Name: At_100uM_ABA_Mutants_cDNA_P Parameter: Plant Line Value: CS24
  misc_feature: MA Experiment 20000070 PARAMETER Experiment Name: At_100uM_ABA_Mutants_cDNA_P Parameter: Timepoint (hr) Value: 6
  misc_feature: MA Experiment 20000070 PARAMETER Experiment Name: At_100uM_ABA_Mutants_cDNA_P Parameter: Tissue Value: Aerial
  misc_feature: MA Experiment 20000070 PARAMETER Experiment Name: At_100uM_ABA_Mutants_cDNA_P Parameter: Treatment Value: 100uM ABA vs. No Treatment
  misc_feature: MA Experiment ID: 20000071 Result: Down-regulated in Transcription
  misc_feature: MA Experiment 20000071 PARAMETER Experiment Name: At_100uM_ABA_Mutants_cDNA_P Parameter: Plant Line Value: CS8104
  misc_feature: MA Experiment 20000071 PARAMETER Experiment Name: At_100uM_ABA_Mutants_cDNA_P Parameter: Timepoint (hr) Value: 6
  misc_feature: MA Experiment 20000071 PARAMETER Experiment Name: At_100uM_ABA_Mutants_cDNA_P Parameter: Tissue Value: Aerial
  misc_feature: MA Experiment 20000071 PARAMETER Experiment Name: At_100uM_ABA_Mutants_cDNA_P Parameter: Treatment Value: 100uM ABA vs. No Treatment
  misc_feature: MA Experiment ID: 20000086 Result: Down-regulated in Transcription
  misc_feature: MA Experiment 20000086 PARAMETER Experiment Name: At_100uM_ABA_Mutants_cDNA_P Parameter: Plant Line Value: CS22
  misc_feature: MA Experiment 20000086 PARAMETER Experiment Name: At_100uM_ABA_Mutants_cDNA_P Parameter: Timepoint (hr) Value: 6
  misc_feature: MA Experiment 20000086 PARAMETER Experiment Name: At_100uM_ABA_Mutants_cDNA_P Parameter: Tissue Value: Aerial
  misc_feature: MA Experiment 20000086 PARAMETER Experiment Name: At_100uM_ABA_Mutants_cDNA_P Parameter: Treatment Value: 100uM ABA vs. No Treatment
  misc_feature: MA Experiment ID: 20000089 Result: Down-regulated in Transcription
  misc_feature: MA Experiment ID: 20000090 Result: Down-regulated in Transcription
  misc_feature: MA Experiment ID: 20000117 Result: Down-regulated in Transcription
  misc_feature: MA Experiment 20000117 PARAMETER Experiment Name: At_100uM_ABA_Mutants_cDNA_P Parameter: Plant Line Value: Columbia
  misc_feature: MA Experiment 20000117 PARAMETER Experiment Name: At_100uM_ABA_Mutants_cDNA_P Parameter: Timepoint (hr) Value: 6
  misc_feature: MA Experiment 20000117 PARAMETER Experiment Name: At_100uM_ABA_Mutants_cDNA_P Parameter: Tissue Value: Aerial
  misc_feature: MA Experiment 20000117 PARAMETER Experiment Name: At_100uM_ABA_Mutants_cDNA_P Parameter: Treatment Value: 100uM ABA vs. No Treatment
  misc_feature: MA Experiment ID: 20000438 Result: Up-regulated in Transcription
  misc_feature: MA Experiment 20000438 PARAMETER Experiment Name: At_Shoots__P Parameter: Age (day) Value: 14
  misc_feature: MA Experiment 20000438 PARAMETER Experiment Name: At_Shoots__P Parameter: Tissue Value: Shoots vs. Whole Plant
  misc_feature: MA Experiment ID: 20001911 Result: Up-regulated in Transcription
  misc_feature: MA Experiment 20001911 PARAMETER Experiment Name: At_Drought_Reproduction_P Parameter: Age (day) Value: 40
  misc_feature: MA Experiment 20001911 PARAMETER Experiment Name: At_Drought_Reproduction_P Parameter: Organism Value: A. thaliana
  misc_feature: MA Experiment 20001911 PARAMETER Experiment Name: At_Drought_Reproduction_P Parameter: Plant Line Value: WS
  misc_feature: MA Experiment 20001911 PARAMETER Experiment Name: At_Drought_Reproduction_P Parameter: Timepoint (day) Value: 10
  misc_feature: MA Experiment 20001911 PARAMETER Experiment Name: At_Drought_Reproduction_P Parameter: Tissue Value: Flowers
  misc_feature: MA Experiment 20001911 PARAMETER Experiment Name: At_Drought_Reproduction_P Parameter: Treatment Value: Drought vs. No Drought
aaaaagaaagagagagagagaagaagaatcgtggagatggcttcgaccccgaagcttaccagtacaatttcatcatcttctccatctcttcaattcctctgcaaaaaactcccaatcgcaattcatctaccatcatcttcttcctctagctttctctcgcttcctaaaaccctaacctctctctattctctccgtccccgtatcgccctactctcaaaccaccgctattaccactctcgccggttttctgtttgtgccagtaccgataatggagctgaatcagaccgccactacgattttgatctcttcactatcggtgccggaagcggcggcgtccgcgcctctcgcttcgccactagcttcggtgcatccgccgccgtttgcgagcttcctttttccactatctcttccgatactgctggaggcgttggaggaacgtgtgtattgagaggatgtgtaccaaagaagttacttgtgtatgcatccaaatacagtcatgagtttgaagacagtcatggatttggttggaagtatgagactgagccttctcatgattggactactttgattgctaacaagaatgctgagttacagcggttgactggtatttataagaatatactgagcaaagctaatgtcaagttgattgaaggtcgtggaaaggttatagacccacacactgttgatgtagatgggaaaatctatactacgaggaatattctgattgcagttggtggacgtcctttcattcctgacattccaggaaaagagtttgctattgattctgatgccgcgcttgatttgccttccaagcctaagaaaattgcaatagttggtggtggctacatagccctggagtttgcggggatcttcaatggtcttaactgtgaagttcatgtatttataaggcaaaagaaggtgctgaggggatttgatgaagatgtcagggatttcgttggagagcagatgtctttaagaggtattgagtttcacactgaagaatcccctgaagccatcatcaaagctggagatggctcgttctctctgaagaccagcaagggaactgttgagggattttcgcatgttatgtttgcaactggtcgcaagcccaacacaaagaacttagggttggagaatgttggcgttaaaatggcgaaaaatggagcaatagaggttgacgaatattcacagacatctgttccatccatctgggctgttggggatgttactgaccgaatcaatttgactccagttgctttgatggagggaggtgcattggctaaaactttgtttcaaaatgagccaacaaagcctgattatagagctgttccctgcgccgttttctcccagccacctattggaacagttggtctaactgaagagcaggccatagaacaatatggtgatgtggatgtttacacatcgaactttaggccattaaaggctaccctttcaggacttccagaccgagtatttatgaaactcattgtctgtgcaaacaccaataaagttctcggtgttcacatgtgtggagaagattcaccagaaatcatccagggatttggggttgcagttaaagctggtttaactaaggccgactttgatgctacagtgggtgttcaccccacagcagctgaggagtttgtcactatgagggctccaaccaggaaattccgcaaagactcctctgagggaaaggcaagtcctgaagctaaaacagctgctggggtgtagagaaggttgcaaaaaagattgtatttacggcattggagccccctgataaggagaacattgtgtctgtgaagaagaagcttttcttttggcagagaatattttttcataatgtcgtgtgaagatatgatcgctgtcctgcaatacttttgatcgtttgacacacgaccaaattcctcgagagagagaggttgtaactattccgaaagagctctaaaactgaagctttcagttcttgtgacatcataatgaaggctgtatagatataacagtttcgagttttatttggatttgtagtatttttgtttt

SEQ ID NO: 103735 - protein, 577 aa, Arabidopsis thaliana
  peptide (1)..(577): Ceres Seq. ID no. 13613457
  misc_feature (101)..(418): Pfam Name: Pyridine nucleotide-disulphide oxidoreductase Pfam Description: Pyridine nucleotide-disulphide oxidoreductase
  misc_feature (13)..(577): Homolog of NCBI NO: 15232559 NR Description: gluthatione reductase, chloroplast [Arabidopsis >gi|1170040|sp|P42770|GSHC_ARATH Glutathione reductase,
  misc_feature (13)..(577): Homolog of NCBI NO: 15451194 NR Description: Gluthatione reductase, chloroplast precursor
  misc_feature (13)..(574): Homolog of NCBI NO: 13448672 NR Description: glutathione reductase [Brassica juncea]
  misc_feature (13)..(574): Homolog of NCBI NO: 4704611 NR Description: glutathione reductase [Brassica juncea]
  misc_feature (15)..(577): Homolog of NCBI NO: 2425107 NR Description: glutathione reductase (NADPH) [Vitis vinifera]
  misc_feature (15)..(577): Homolog of NCBI NO: 1708059 NR Description: Glutathione reductase, chloroplast precursor (GR)
KKKERERRRIVEMASTPKLTSTISSSSPSLQFLCKKLPIAIHLPSSSSSSFLSLPKTLTSLYSLRPRIALLSNHRYYHSRRFSVCASTDNGAESDRHYDFDLFTIGAGSGGVRASRFATSFGASAAVCELPFSTISSDTAGGVGGTCVLRGCVPKKLLVYASKYSHEFEDSHGFGWKYETEPSHDWTTLIANKNAELQRLTGIYKNILSKANVKLIEGRGKVIDPHTVDVDGKIYTTRNILIAVGGRPFIPDIPGKEFAIDSDAALDLPSKPKKIAIVGGGYIALEFAGIFNGLNCEVHVFIRQKKVLRGFDEDVRDFVGEQMSLRGIEFHTEESPEAIIKAGDGSFSLKTSKGTVEGFSHVMFATGRKPNTKNLGLENVGVKMAKNGAIEVDEYSQTSVPSIWAVGDVTDRINLTPVALMEGGALAKTLFQNEPTKPDYRAVPCAVFSQPPIGTVGLTEEQAIEQYGDVDVYTSNFRPLKATLSGLPDRVFMKLIVCANTNKVLGVHMCGEDSPEIIQGFGVAVKAGLTKADFDATVGVHPTAAEEFVTMRAPTRKFRKDSSEGKASPEAKTAAGV

SEQ ID NO: 103736 - protein, 565 aa, Arabidopsis thaliana; identical to SEQ ID NO: 44131
  peptide (1)..(565): Ceres Seq. ID no. 13613458
  misc_feature (89)..(406): Pfam Name: Pyridine nucleotide-disulphide oxidoreductase Pfam Description: Pyridine nucleotide-disulphide oxidoreductase
  misc_feature (1)..(565): Homolog of NCBI NO: 15232559 NR Description: gluthatione reductase, chloroplast [Arabidopsis >gi|1170040|sp|P42770|GSHC_ARATH Glutathione reductase,
  misc_feature (1)..(565): Homolog of NCBI NO: 15451194 NR Description: Gluthatione reductase, chloroplast precursor
  misc_feature (1)..(562): Homolog of NCBI NO: 13448672 NR Description: glutathione reductase [Brassica juncea]
  misc_feature (1)..(562): Homolog of NCBI NO: 4704611 NR Description: glutathione reductase [Brassica juncea]
  misc_feature (3)..(565): Homolog of NCBI NO: 2425107 NR Description: glutathione reductase (NADPH) [Vitis vinifera]
  misc_feature (3)..(565): Homolog of NCBI NO: 1708059 NR Description: Glutathione reductase, chloroplast precursor (GR)

SEQ ID NO: 103737 - DNA, 998 bp, Arabidopsis thaliana
  misc_feature (1)..(998): Ceres Seq. ID no. 13613467
  misc_feature: MA Experiment ID: 108461 Result: Up-regulated in Transcription
  misc_feature: MA Experiment 108461 PARAMETER Experiment Name: At_Germinating_Seeds_cDNA_P Parameter: Age (day) Value: 1 vs. 0
  misc_feature: MA Experiment 108461 PARAMETER Experiment Name: At_Germinating_Seeds_cDNA_P Parameter: Tissue Value: Germinating Seeds
  misc_feature: MA Experiment ID: 108464 Result: Up-regulated in Transcription
  misc_feature: MA Experiment 108464 PARAMETER Experiment Name: At_Germinating_Seeds_cDNA_P Parameter: Age (day) Value: 4 vs. 0
  misc_feature: MA Experiment 108464 PARAMETER Experiment Name: At_Germinating_Seeds_cDNA_P Parameter: Tissue Value: Germinating Seeds
  misc_feature: MA Experiment ID: 108594 Result: Down-regulated in Transcription
  misc_feature: MA Experiment 108594 PARAMETER Experiment Name: At_Ler-rhl_Root_cDNA_P Parameter: Plant Line Value: null
  misc_feature: MA Experiment ID: 20000180 Result: Up-regulated in Transcription
  misc_feature: MA Experiment 20000180 PARAMETER Experiment Name: At_Germinating_Seeds_P Parameter: Age (hr) Value: 24 vs. 0
  misc_feature: MA Experiment 20000180 PARAMETER Experiment Name: At_Germinating_Seeds_P Parameter: Tissue Value: Germinating Seeds
  misc_feature: MA Experiment ID: 20000185 Result: Up-regulated in Transcription
  misc_feature: MA Experiment 20000185 PARAMETER Experiment Name: At_Roots__P Parameter: Age (day) Value: 7 vs. 21
  misc_feature: MA Experiment 20000185 PARAMETER Experiment Name: At_Roots__P Parameter: Organism Value: A. thaliana
  misc_feature: MA Experiment 20000185 PARAMETER Experiment Name: At_Roots__P Parameter: Tissue Value: Roots vs. Whole Plant
  misc_feature: MA Experiment ID: 20000227 Result: Up-regulated in Transcription
  misc_feature: MA Experiment 20000227 PARAMETER Experiment Name: At_Root-Tips-vs-Tops_P Parameter: Tissue Value: Root Tips vs. Root Tops
  misc_feature: MA Experiment ID: 20001910 Result: Down-regulated in Transcription
  misc_feature: MA Experiment 20001910 PARAMETER Experiment Name: At_Drought_Reproduction_P Parameter: Age (day) Value: 37
  misc_feature: MA Experiment 20001910 PARAMETER Experiment Name: At_Drought_Reproduction_P Parameter: Organism Value: A. thaliana
  misc_feature: MA Experiment 20001910 PARAMETER Experiment Name: At_Drought_Reproduction_P Parameter: Plant Line Value: WS
  misc_feature: MA Experiment 20001910 PARAMETER Experiment Name: At_Drought_Reproduction_P Parameter: Timepoint (day) Value: 7
  misc_feature: MA Experiment 20001910 PARAMETER Experiment Name: At_Drought_Reproduction_P Parameter: Tissue Value: Flowers
  misc_feature: MA Experiment 20001910 PARAMETER Experiment Name: At_Drought_Reproduction_P Parameter: Treatment Value: Drought vs. No Drought
ataattcaattcgctctccttctctctctatctctgccctttctttctctctcacacacaaacacgatccaatgacgacgagcaacaacgtgaacggatgtttcggagacacgaagctgaccaaagtgttcgtaggaggattggcttgggatactcacaaagaagcaatgtatgatcatttcatcaagtatggggacatcttggaggcagtcattatctccgacaaactcactcgccgttccaaaggatatggctttgtgactttcaaagatgcgaaagctgccacgagagcttgcgaagactctactccgatcatcaatggccgccgtgccaactgcaatctcgcctccctcggtggccgtcttcgtaaatcccctaccatgacctctcctcaacaaggaccaaaaaatgggaacagggccacgccaccacatgttggaaatcattctcagtggtactacccgtccggattcacaaaccagcaacatcaacaacaaaatcatcaagccgttcctttctatgggtacccttccgcctacgttgccccgaacatgaccttcaatcaaaaagttggatatgtcggaggaacctatatgaacggatactatgcacaaatgcaaccacaaccgcaatcgcagccacaaccgcaatattaccaccatcacatgtatggtggaggacgagttatggttggggcagcaagtccaatggtgcctttctacactgtctatccttatcatcaatctcaagccatcgggtttccacaaccttcattttcgaaacctctttctttttccactcctcctatatcaggcacagttggaggagagagcatacagaagaaggccatacattgataggctagaagctgttaatcaaacgattgactcagcccaaaattattcattttatccatctcactaagctttatttttttctagagacttgtatttgtaataatttaatttcgttacatttaataatttattcattgaagc

SEQ ID NO: 103738 - protein, 284 aa, Arabidopsis thaliana
  peptide (1)..(284): Ceres Seq. ID no. 13613468
  misc_feature (42)..(97): Pfam Name: RNA recognition motif. (a.k.a. RRM, RBD, or RNP domain) Pfam Description: RNA recognition motif. (a.k.a. RRM, RBD, or RNP
  misc_feature (24)..(284): Homolog of NCBI NO: 15232579 NR Description: RNA recognition motif (RRM)-containing protein
  misc_feature (24)..(284): Homolog of NCBI NO: 21536939 NR Description: RNA binding protein-like [Arabidopsis thaliana]
  misc_feature (23)..(268): Homolog of NCBI NO: 15010636 NR Description: At1g20880/F9H16_14 [Arabidopsis thaliana]
  misc_feature (23)..(268): Homolog of NCBI NO: 18394923 NR Description: RNA recognition motif (RRM)-containing protein
  misc_feature (23)..(268): Homolog of NCBI NO: 23505939 NR Description: At1g20880/F9H16_14 [Arabidopsis thaliana]
  misc_feature (30)..(283): Homolog of NCBI NO: 22330665 NR Description: RNA recognition motif (RRM)-containing protein
  misc_feature (23)..(188): Homolog of NCBI NO: 25518498 NR Description: hypothetical protein F9H16.14 - Arabidopsis >gi|4836901|gb|AAD30604.1|AC007369_14 Unknown protein
  misc_feature (24)..(266): Homolog of NCBI NO: 25518109 NR Description: T16E15.6 protein - Arabidopsis thaliana Contains similarity to seb4D protein from Mus musculus gb|X75316
  misc_feature (36)..(184): Homolog of NCBI NO: 15226439 NR Description: RNA recognition motif (RRM)-containing protein
  misc_feature (29)..(197): Homolog of NCBI NO: 34907334 NR Description: P0698A10.29 [Oryza sativa (japonica
NSIRSPSLSISALSFSLTHKHDPMTTSNNVNGCFGDTKLTKVFVGGLAWDTHKEAMYDHFIKYGDILEAVIISDKLTRRSKGYGFVTFKDAKAATRACEDSTPIINGRRANCNLASLGGRLRKSPTMTSPQQGPKNGNRATPPHVGNHSQWYYPSGFTNQQHQQQNHQAVPFYGYPSAYVAPNMTFNQKVGYVGGTYMNGYYAQMQPQPQSQPQPQYYHHHMYGGGRVMVGAASPMVPFYTVYPYHQSQAIGFPQPSFSKPLSFSTPPISGTVGGESIQKKAIH

SEQ ID NO: 103739 - protein, 261 aa, Arabidopsis thaliana
  peptide (1)..(261): Ceres Seq. ID no. 13613469
  misc_feature (19)..(74): Pfam Name: RNA recognition motif. (a.k.a. RRM, RBD, or RNP domain) Pfam Description: RNA recognition motif. (a.k.a. RRM, RBD, or RNP
  misc_feature (1)..(261): Homolog of NCBI NO: 15232579 NR Description: RNA recognition motif (RRM)-containing protein
  misc_feature (1)..(261): Homolog of NCBI NO: 21536939 NR Description: RNA binding protein-like [Arabidopsis thaliana]
  misc_feature (1)..(245): Homolog of NCBI NO: 15010636 NR Description: At1g20880/F9H16_14 [Arabidopsis thaliana]
  misc_feature (1)..(245): Homolog of NCBI NO: 18394923 NR Description: RNA recognition motif (RRM)-containing protein
  misc_feature (1)..(245): Homolog of NCBI NO: 23505939 NR Description: At1g20880/F9H16_14 [Arabidopsis thaliana]
  misc_feature (7)..(260): Homolog of NCBI NO: 22330665 NR Description: RNA recognition motif (RRM)-containing protein
  misc_feature (1)..(165): Homolog of NCBI NO: 25518498 NR Description: hypothetical protein F9H16.14 - Arabidopsis >gi|4836901|gb|AAD30604.1|AC007369_14 Unknown protein
  misc_feature (1)..(243): Homolog of NCBI NO: 25518109 NR Description: T16E15.6 protein - Arabidopsis thaliana Contains similarity to seb4D protein from Mus musculus gb|X75316
  misc_feature (13)..(161): Homolog of NCBI NO: 15226439 NR Description: RNA recognition motif (RRM)-containing protein
  misc_feature (6)..(174): Homolog of NCBI NO: 34907334 NR Description: P0698A10.29 [Oryza sativa (japonica
MTTSNNVNGCFGDTKLTKVFVGGLAWDTHKEAMYDHFIKYGDILEAVIISDKLTRRSKGYGFVTFKDAKAATRACEDSTPIINGRRANCNLASLGGRLRKSPTMTSPQQGPKNGNRATPPHVGNHSQWYYPSGFTNQQHQQQNHQAVPFYGYPSAYVAPNMTFNQKVGYVGGTYMNGYYAQMQPQPQSQPQPQYYHHHMYGGGRVMVGAASPMVPFYTVYPYHQSQAIGFPQPSFSKPLSFSTPPISGTVGGESIQKKAIH

SEQ ID NO: 103740 - protein, 229 aa, Arabidopsis thaliana
  peptide (1)..(229): Ceres Seq. ID no. 13613470
  misc_feature (1)..(42): Pfam Name: RNA recognition motif. (a.k.a. RRM, RBD, or RNP domain) Pfam Description: RNA recognition motif. (a.k.a. RRM, RBD, or RNP
  misc_feature (1)..(229): Homolog of NCBI NO: 15232579 NR Description: RNA recognition motif (RRM)-containing protein
  misc_feature (1)..(229): Homolog of NCBI NO: 21536939 NR Description: RNA binding protein-like [Arabidopsis thaliana]
  misc_feature (1)..(213): Homolog of NCBI NO: 15010636 NR Description: At1g20880/F9H16_14 [Arabidopsis thaliana]
  misc_feature (1)..(213): Homolog of NCBI NO: 23505939 NR Description: At1g20880/F9H16_14 [Arabidopsis thaliana]
  misc_feature (1)..(213): Homolog of NCBI NO: 18394923 NR Description: RNA recognition motif (RRM)-containing protein
  misc_feature (1)..(228): Homolog of NCBI NO: 22330665 NR Description: RNA recognition motif (RRM)-containing protein
  misc_feature (1)..(133): Homolog of NCBI NO: 25518498 NR Description: hypothetical protein F9H16.14 - Arabidopsis >gi|4836901|gb|AAD30604.1|AC007369_14 Unknown protein
  misc_feature (1)..(211): Homolog of NCBI NO: 25518109 NR Description: T16E15.6 protein - Arabidopsis thaliana Contains similarity to seb4D protein from Mus musculus gb|X75316
  misc_feature (1)..(129): Homolog of NCBI NO: 15226439 NR Description: RNA recognition motif (RRM)-containing protein
  misc_feature (1)..(142): Homolog of NCBI NO: 34907334 NR Description: P0698A10.29 [Oryza sativa (japonica
MYDHFIKYGDILEAVIISDKLTRRSKGYGFVTFKDAKAATRACEDSTPIINGRRANCNLASLGGRLRKSPTMTSPQQGPKNGNRATPPHVGNHSQWYYPSGFTNQQHQQQNHQAVPFYGYPSAYVAPNMTFNQKVGYVGGTYMNGYYAQMQPQPQSQPQPQYYHHHMYGGGRVMVGAASPMVPFYTVYPYHQSQAIGFPQPSFSKPLSFSTPPISGTVGGESIQKKAIH

SEQ ID NO: 103741 - DNA, 784 bp, Arabidopsis thaliana
  misc_feature (1)..(784): Ceres Seq. ID no. 13613471
  misc_feature: MA Experiment ID: 108561 Result: Up-regulated in Transcription
  misc_feature: MA Experiment 108561 PARAMETER Experiment Name: At_100uM_ABA_cDNA_P Parameter: Timepoint (hr) Value: 6
  misc_feature: MA Experiment 108561 PARAMETER Experiment Name: At_100uM_ABA_cDNA_P Parameter: Tissue Value: Aerial
  misc_feature: MA Experiment 108561 PARAMETER Experiment Name: At_100uM_ABA_cDNA_P Parameter: Treatment Value: 100uM ABA vs. No Treatment
  misc_feature: MA Experiment ID: 20000069 Result: Up-regulated in Transcription
  misc_feature: MA Experiment 20000069 PARAMETER Experiment Name: At_100uM_ABA_Mutants_cDNA_P Parameter: Plant Line Value: CS23
  misc_feature: MA Experiment 20000069 PARAMETER Experiment Name: At_100uM_ABA_Mutants_cDNA_P Parameter: Timepoint (hr) Value: 6
  misc_feature: MA Experiment 20000069 PARAMETER Experiment Name: At_100uM_ABA_Mutants_cDNA_P Parameter: Tissue Value: Aerial
  misc_feature: MA Experiment 20000069 PARAMETER Experiment Name: At_100uM_ABA_Mutants_cDNA_P Parameter: Treatment Value: 100uM ABA vs. No Treatment
  misc_feature: MA Experiment ID: 20000087 Result: Up-regulated in Transcription
  misc_feature: MA Experiment 20000087 PARAMETER Experiment Name: At_100uM_ABA_Mutants_cDNA_P Parameter: Plant Line Value: WS
  misc_feature: MA Experiment 20000087 PARAMETER Experiment Name: At_100uM_ABA_Mutants_cDNA_P Parameter: Timepoint (hr) Value: 6
  misc_feature: MA Experiment 20000087 PARAMETER Experiment Name: At_100uM_ABA_Mutants_cDNA_P Parameter: Tissue Value: Aerial
  misc_feature: MA Experiment 20000087 PARAMETER Experiment Name: At_100uM_ABA_Mutants_cDNA_P Parameter: Treatment Value: 100uM ABA vs. No Treatment
  misc_feature: MA Experiment ID: 20000179 Result: Down-regulated in Transcription
  misc_feature: MA Experiment 20000179 PARAMETER Experiment Name: At_Germinating_Seeds_P Parameter: Age (hr) Value: 6 vs. 0
  misc_feature: MA Experiment 20000179 PARAMETER Experiment Name: At_Germinating_Seeds_P Parameter: Tissue Value: Germinating Seeds
  misc_feature: MA Experiment ID: 20000180 Result: Down-regulated in Transcription
  misc_feature: MA Experiment 20000180 PARAMETER Experiment Name: At_Germinating_Seeds_P Parameter: Age (hr) Value: 24 vs. 0
  misc_feature: MA Experiment 20000180 PARAMETER Experiment Name: At_Germinating_Seeds_P Parameter: Tissue Value: Germinating Seeds
aaaatttcacggaaaatagaagcgtcgagttcctcctctccctcaggttgtcaatggccgctaggttacttgctttgagacgcgctttgtctcttttcagcaaccaacaacatcgttttcctttgtctcaagtctcaacagagcagttgtcgctatcaaactcactcttcagcagaagtcatgtttatggaagattatttcagagacagttatctgtaatccgtgaggcaaatgaagcttctgtaaccaatgtctgcaactcgtcaaactctgctactgaatcggccaaagttccctcccctgcgacgccctctgaggaaatgatggtgaagtacaagtcccagttaaaaataaacccgaggcatgacttcatgatggtcttcacttgcaaggtctgtgatacaagatctatgaagatggcgagccgagaatcatatgaaaacggcgttgtggtggtacgatgtggagggtgtgataatctacatttgattgcagaccgtcgtggttggtttggagaaccaggaagcgtggaggacttccttgcttctcaaggggaagaattcaagaaaggatccatggattctcttaacctaactcctgaagatttagctggaggaaagatttctactgaataaggagtgatcttctttgcttttgctacttaaccattatggaacagaacttcaccttatgttccagtattataattgtttcttgtagttcactgtttggtaacatttaaatgcagaagatgtttaatacaattatgtgtttggaatgttcc

SEQ ID NO: 103742 - protein, 210 aa, Arabidopsis thaliana
  peptide (1)..(210): Ceres Seq. ID no. 13613472
  misc_feature (123)..(186): Pfam Name: DNL zinc finger Pfam Description: DNL zinc finger
  misc_feature (18)..(210): Homolog of NCBI NO: 29028810 NR Description: At3g54830 [Arabidopsis thaliana]
  misc_feature (31)..(202): Homolog of NCBI NO: 23485607 NR Description: Drosophila melanogaster CG12379 gene product
  misc_feature (116)..(200): Homolog of NCBI NO: 12835133 NR Description: unnamed protein product [Mus musculus]
  misc_feature (116)..(189): Homolog of NCBI NO: 31212801 NR Description: ENSANGP00000021116 [Anopheles gambiae]
  misc_feature (116)..(189): Homolog of NCBI NO: 34853079 NR Description: similar to CG12379-PA [Rattus norvegicus]
  misc_feature (80)..(196): Homolog of NCBI NO: 19113862 NR Description: hypothetical protein [Schizosaccharomyces pombe]
  misc_feature (104)..(202): Homolog of NCBI NO: 23509418 NR Description: hypothetical protein [Plasmodium falciparum 3D7]
  misc_feature (125)..(186): Homolog of NCBI NO: 24642261 NR Description: CG12379-PA [Drosophila melanogaster]
  misc_feature (127)..(189): Homolog of NCBI NO: 17553552 NR Description: Protein required for cell viability like elegans] >gi|6042159|gb|AAF02170.1|AF025460_6 Hypothetical
  misc_feature (92)..(192): Homolog of NCBI NO: 32422509 NR Description: hypothetical protein [Neurospora crassa]
NFTENRSVEFLLSLRLSMAARLLALRRALSLFSNQQHRFPLSQVSTEQLSLSNSLFSRSHVYGRLFQRQLSVIREANEASVTNVCNSSNSATESAKVPSPATPSEEMMVKYKSQLKINPRHDFMMVFTCKVCDTRSMKMASRESYENGVVVVRCGGCDNLHLIADRRGWFGEPGSVEDFLASQGEEFKKGSMDSLNLTPEDLAGGKISTE

SEQ ID NO: 103743 - protein, 193 aa, Arabidopsis thaliana
  peptide (1)..(193): Ceres Seq. ID no. 13613473
  misc_feature (106)..(169): Pfam Name: DNL zinc finger Pfam Description: DNL zinc finger
  misc_feature (1)..(193): Homolog of NCBI NO: 29028810 NR Description: At3g54830 [Arabidopsis thaliana]
  misc_feature (14)..(185): Homolog of NCBI NO: 23485607 NR Description: Drosophila melanogaster CG12379 gene product
  misc_feature (99)..(183): Homolog of NCBI NO: 12835133 NR Description: unnamed protein product [Mus musculus]
  misc_feature (99)..(172): Homolog of NCBI NO: 31212801 NR Description: ENSANGP00000021116 [Anopheles gambiae]
  misc_feature (99)..(172): Homolog of NCBI NO: 34853079 NR Description: similar to CG12379-PA [Rattus norvegicus]
  misc_feature (63)..(179): Homolog of NCBI NO: 19113862 NR Description: hypothetical protein [Schizosaccharomyces pombe]
  misc_feature (87)..(185): Homolog of NCBI NO: 23509418 NR Description: hypothetical protein [Plasmodium falciparum 3D7]
  misc_feature (108)..(169): Homolog of NCBI NO: 24642261 NR Description: CG12379-PA [Drosophila melanogaster]
  misc_feature (110)..(172): Homolog of NCBI NO: 17553552 NR Description: Protein required for cell viability like elegans] >gi|6042159|gb|AAF02170.1|AF025460_6 Hypothetical
  misc_feature (75)..(175): Homolog of NCBI NO: 32422509 NR Description: hypothetical protein [Neurospora crassa]
MAARLLALRRALSLFSNQQHRFPLSQVSTEQLSLSNSLFSRSHVYGRLFQRQLSVIREANEASVTNVCNSSNSATESAKVPSPATPSEEMMVKYKSQLKINPRHDFMMVFTCKVCDTRSMKMASRESYENGVVVVRCGGCDNLHLIADRRGWFGEPGSVEDFLASQGEEFKKGSMDSLNLTPEDLAGGKISTE

SEQ ID NO: 103744 - DNA, 2071 bp, Arabidopsis thaliana
  misc_feature (1)..(2071): Ceres Seq. ID no. 13613477
  misc_feature: MA Experiment ID: 108434 Result: Down-regulated in Transcription
  misc_feature: MA Experiment 108434 PARAMETER Experiment Name: At_Root_Tips_cDNA_P Parameter: Tissue Value: Root Tips
  misc_feature: MA Experiment ID: 108488 Result: Down-regulated in Transcription
  misc_feature: MA Experiment ID: 108572 Result: Up-regulated in Transcription
  misc_feature: MA Experiment 108572 PARAMETER Experiment Name: At_Drought_cDNA_P Parameter: Timepoint (hr) Value: 1
  misc_feature: MA Experiment 108572 PARAMETER Experiment Name: At_Drought_cDNA_P Parameter: Tissue Value: Aerial
  misc_feature: MA Experiment 108572 PARAMETER Experiment Name: At_Drought_cDNA_P Parameter: Treatment Value: Drought vs. No Drought
  misc_feature: MA Experiment ID: 108573 Result: Up-regulated in Transcription
  misc_feature: MA Experiment 108573 PARAMETER Experiment Name: At_Drought_cDNA_P Parameter: Timepoint (hr) Value: 6
  misc_feature: MA Experiment 108573 PARAMETER Experiment Name: At_Drought_cDNA_P Parameter: Tissue Value: Aerial
  misc_feature: MA Experiment 108573 PARAMETER Experiment Name: At_Drought_cDNA_P Parameter: Treatment Value: Drought vs. No Drought
  misc_feature: MA Experiment ID: 108574 Result: Up-regulated in Transcription
  misc_feature: MA Experiment 108574 PARAMETER Experiment Name: At_Wounding__cDNA_P Parameter: Timepoint (hr) Value: 1
  misc_feature: MA Experiment 108574 PARAMETER Experiment Name: At_Wounding__cDNA_P Parameter: Tissue Value: Aerial
  misc_feature: MA Experiment 108574 PARAMETER Experiment Name: At_Wounding__cDNA_P Parameter: Treatment Value: Wounding vs. No Wounding
  misc_feature: MA Experiment ID: 108579 Result: Up-regulated in Transcription
  misc_feature: MA Experiment 108579 PARAMETER Experiment Name: At_4deg_Cold_cDNA_P Parameter: Temperature (deg C) Value: 4 vs. 22
  misc_feature: MA Experiment 108579 PARAMETER Experiment Name: At_4deg_Cold_cDNA_P Parameter: Timepoint (hr) Value: 6
  misc_feature: MA Experiment 108579 PARAMETER Experiment Name: At_4deg_Cold_cDNA_P Parameter: Tissue Value: Aerial
  misc_feature: MA Experiment ID: 108585 Result: Up-regulated in Transcription
  misc_feature: MA Experiment 108585 PARAMETER Experiment Name: At_5mM_NaNP_cDNA_P Parameter: Timepoint (hr) Value: 6
  misc_feature: MA Experiment 108585 PARAMETER Experiment Name: At_5mM_NaNP_cDNA_P Parameter: Tissue Value: Aerial
  misc_feature: MA Experiment 108585 PARAMETER Experiment Name: At_5mM_NaNP_cDNA_P Parameter: Treatment Value: null
  misc_feature: MA Experiment ID: 108595 Result: Up-regulated in Transcription
  misc_feature: MA Experiment 108595 PARAMETER Experiment Name: At_Ler-pi_Ovule_cDNA_P Parameter: Plant Line Value: null
  misc_feature: MA Experiment ID: 108608 Result: Up-regulated in Transcription
  misc_feature: MA Experiment 108608 PARAMETER Experiment Name: At_100uM_ABA_cDNA_P Parameter: Timepoint (hr) Value: 1
  misc_feature: MA Experiment 108608 PARAMETER Experiment Name: At_100uM_ABA_cDNA_P Parameter: Tissue Value: Aerial
  misc_feature: MA Experiment 108608 PARAMETER Experiment Name: At_100uM_ABA_cDNA_P Parameter: Treatment Value: 100uM ABA vs. No Treatment
  misc_feature: MA Experiment ID: 108668 Result: Up-regulated in Transcription
  misc_feature: MA Experiment 108668 PARAMETER Experiment Name: At_2mM_SA_cDNA_P Parameter: Plant Line Value: WS
  misc_feature: MA Experiment 108668 PARAMETER Experiment Name: At_2mM_SA_cDNA_P Parameter: Timepoint (hr) Value: 6
  misc_feature: MA Experiment 108668 PARAMETER Experiment Name: At_2mM_SA_cDNA_P Parameter: Treatment Value: 2mM SA vs. No Treatment
  misc_feature: MA Experiment ID: 20000111 Result: Up-regulated in Transcription
  misc_feature: MA Experiment 20000111 PARAMETER Experiment Name: At_42deg_Heat_cDNA_P Parameter: Temperature (deg C) Value: 42 vs. 22
  misc_feature: MA Experiment 20000111 PARAMETER Experiment Name: At_42deg_Heat_cDNA_P Parameter: Timepoint (hr) Value: 6
  misc_feature: MA Experiment 20000111 PARAMETER Experiment Name: At_42deg_Heat_cDNA_P Parameter: Tissue Value: Aerial
  misc_feature: MA Experiment ID: 20000112 Result: Up-regulated in Transcription
  misc_feature: MA Experiment 20000112 PARAMETER Experiment Name: At_42deg_Heat_cDNA_P Parameter: Temperature (deg C) Value: 42 vs. 22
  misc_feature: MA Experiment 20000112 PARAMETER Experiment Name: At_42deg_Heat_cDNA_P Parameter: Timepoint (hr) Value: 2
  misc_feature: MA Experiment 20000112 PARAMETER Experiment Name: At_42deg_Heat_cDNA_P Parameter: Tissue Value: Aerial
  misc_feature: MA Experiment ID: 20000113 Result: Up-regulated in Transcription
  misc_feature: MA Experiment 20000113 PARAMETER Experiment Name: At_42deg_Heat_cDNA_P Parameter: Temperature (deg C) Value: 42 vs. 22
  misc_feature: MA Experiment 20000113 PARAMETER Experiment Name: At_42deg_Heat_cDNA_P Parameter: Timepoint (hr) Value: 8
  misc_feature: MA Experiment 20000113 PARAMETER Experiment Name: At_42deg_Heat_cDNA_P Parameter: Tissue Value: Aerial
  misc_feature: MA Experiment ID: 20000166 Result: Up-regulated in Transcription
  misc_feature: MA Experiment 20000166 PARAMETER Experiment Name: At_100uM_ABA_P Parameter: Age (day) Value: 14
  misc_feature: MA Experiment 20000166 PARAMETER Experiment Name: At_100uM_ABA_P Parameter: Organism Value: A. thaliana
  misc_feature: MA Experiment 20000166 PARAMETER Experiment Name: At_100uM_ABA_P Parameter: Plant Line Value: WS
  misc_feature: MA Experiment 20000166 PARAMETER Experiment Name: At_100uM_ABA_P Parameter: Timepoint (hr) Value: 1
  misc_feature: MA Experiment 20000166 PARAMETER Experiment Name: At_100uM_ABA_P Parameter: Tissue Value: Aerial
  misc_feature: MA Experiment 20000166 PARAMETER Experiment Name: At_100uM_ABA_P Parameter: Treatment Value: 100uM ABA vs. No Treatment
  misc_feature: MA Experiment ID: 20000173 Result: Up-regulated in Transcription
  misc_feature: MA Experiment 20000173 PARAMETER Experiment Name: At_42deg_Heat_P Parameter: Age (day) Value: 14
  misc_feature: MA Experiment 20000173 PARAMETER Experiment Name: At_42deg_Heat_P Parameter: Organism Value: A. thaliana
  misc_feature: MA Experiment 20000173 PARAMETER Experiment Name: At_42deg_Heat_P Parameter: Plant Line Value: WS
  misc_feature: MA Experiment 20000173 PARAMETER Experiment Name: At_42deg_Heat_P Parameter: Temperature (deg C) Value: 42 vs. 22
  misc_feature: MA Experiment 20000173 PARAMETER Experiment Name: At_42deg_Heat_P Parameter: Timepoint (hr) Value: 6
  misc_feature: MA Experiment 20000173 PARAMETER Experiment Name: At_42deg_Heat_P Parameter: Tissue Value: Aerial
  misc_feature: MA Experiment ID: 20000182 Result: Up-regulated in Transcription
  misc_feature: MA Experiment 20000182 PARAMETER Experiment Name: At_2mM_SA_P Parameter: Age (day) Value: 14
  misc_feature: MA Experiment 20000182 PARAMETER Experiment Name: At_2mM_SA_P Parameter: Organism Value: A. thaliana
  misc_feature: MA Experiment 20000182 PARAMETER Experiment Name: At_2mM_SA_P Parameter: Plant Line Value: WS
  misc_feature: MA Experiment 20000182 PARAMETER Experiment Name: At_2mM_SA_P Parameter: Timepoint (hr) Value: 6
  misc_feature: MA Experiment 20000182 PARAMETER Experiment Name: At_2mM_SA_P Parameter: Tissue Value: Aerial
  misc_feature: MA Experiment 20000182 PARAMETER Experiment Name: At_2mM_SA_P Parameter: Treatment Value: 2mM SA vs. No Treatment
  misc_feature: MA Experiment ID: 20000185 Result: Up-regulated in Transcription
  misc_feature: MA Experiment 20000185 PARAMETER Experiment Name: At_Roots__P Parameter: Age (day) Value: 7 vs. 21
  misc_feature: MA Experiment 20000185 PARAMETER Experiment Name: At_Roots__P Parameter: Organism Value: A. thaliana
  misc_feature: MA Experiment 20000185 PARAMETER Experiment Name: At_Roots__P Parameter: Tissue Value: Roots vs. Whole Plant
  misc_feature: MA Experiment ID: 20000234 Result: Down-regulated in Transcription
  misc_feature: MA Experiment 20000234 PARAMETER Experiment Name: At_Siliques_P Parameter: Age (day) Value: 21
  misc_feature: MA Experiment 20000234 PARAMETER Experiment Name: At_Siliques_P Parameter: Organism Value: A. thaliana
  misc_feature: MA Experiment 20000234 PARAMETER Experiment Name: At_Siliques_P Parameter: Plant Line Value: WS
  misc_feature: MA Experiment 20000234 PARAMETER Experiment Name: At_Siliques_P Parameter: Tissue Value: Less Than 5mm Siliques vs. Whole Plant
  misc_feature: MA Experiment ID: 20000235 Result: Down-regulated in Transcription
  misc_feature: MA Experiment 20000235 PARAMETER Experiment Name: At_Siliques_P Parameter: Age (day) Value: 21
  misc_feature: MA Experiment 20000235 PARAMETER Experiment Name: At_Siliques_P Parameter: Organism Value: A. thaliana
  misc_feature: MA Experiment 20000235 PARAMETER Experiment Name: At_Siliques_P Parameter: Plant Line Value: WS
  misc_feature: MA Experiment 20000235 PARAMETER Experiment Name: At_Siliques_P Parameter: Tissue Value: 5-10mm Siliques vs. Whole Plant
  misc_feature: MA Experiment ID: 20000437 Result: Up-regulated in Transcription
  misc_feature: MA Experiment 20000437 PARAMETER Experiment Name: At_Drought_P Parameter: Age (day) Value: 8
  misc_feature: MA Experiment 20000437 PARAMETER Experiment Name: At_Drought_P Parameter: Organism Value: A. thaliana
  misc_feature: MA Experiment 20000437 PARAMETER Experiment Name: At_Drought_P Parameter: Plant Line Value: WS
  misc_feature: MA Experiment 20000437 PARAMETER Experiment Name: At_Drought_P Parameter: Timepoint (hr) Value: 24
  misc_feature: MA Experiment 20000437 PARAMETER Experiment Name: At_Drought_P Parameter: Tissue Value: Whole Plant
  misc_feature: MA Experiment 20000437 PARAMETER Experiment Name: At_Drought_P Parameter: Treatment Value: Drought vs. No Drought
  misc_feature: MA Experiment ID: 20000438 Result: Down-regulated in Transcription
  misc_feature: MA Experiment 20000438 PARAMETER Experiment Name: At_Shoots__P Parameter: Age (day) Value: 14
  misc_feature: MA Experiment 20000438 PARAMETER Experiment Name: At_Shoots__P Parameter: Tissue Value: Shoots vs. Whole Plant
  misc_feature: MA Experiment ID: 20000445 Result: Up-regulated in Transcription
  misc_feature: MA Experiment 20000445 PARAMETER Experiment Name: At_100uM_NAA__P Parameter: Age (day) Value: 14
  misc_feature: MA Experiment 20000445 PARAMETER Experiment Name: At_100uM_NAA__P Parameter: Organism Value: A. thaliana
  misc_feature: MA Experiment 20000445 PARAMETER Experiment Name: At_100uM_NAA__P Parameter: Plant Line Value: WS
  misc_feature: MA Experiment 20000445 PARAMETER Experiment Name: At_100uM_NAA__P Parameter: Timepoint (hr) Value: 6
  misc_feature: MA Experiment 20000445 PARAMETER Experiment Name: At_100uM_NAA__P Parameter: Tissue Value: Aerial
  misc_feature: MA Experiment 20000445 PARAMETER Experiment Name: At_100uM_NAA__P Parameter: Treatment Value: 100uM NAA vs. No Treatment
  misc_feature: MA Experiment ID: 20001905 Result: Up-regulated in Transcription
  misc_feature: MA Experiment 20001905 PARAMETER Experiment Name: At_Drought_Reproduction_P Parameter: Age (day) Value: 40
  misc_feature: MA Experiment 20001905 PARAMETER Experiment Name: At_Drought_Reproduction_P Parameter: Organism Value: A. thaliana
  misc_feature: MA Experiment 20001905 PARAMETER Experiment Name: At_Drought_Reproduction_P Parameter: Plant Line Value: WS
  misc_feature: MA Experiment 20001905 PARAMETER Experiment Name: At_Drought_Reproduction_P Parameter: Timepoint (day) Value: 10
  misc_feature: MA Experiment 20001905 PARAMETER Experiment Name: At_Drought_Reproduction_P Parameter: Tissue Value: Rosettes
  misc_feature: MA Experiment 20001905 PARAMETER Experiment Name: At_Drought_Reproduction_P Parameter: Treatment Value: Drought vs. No Drought
gcctcttcttcttcttcttcttcttcatcttcttctatatattggtgtttcatttgttctgctttaaaagtacacaaagattcatcttttttcggtcctctgattgggcaaaagactagctcggtcgtgttttgaacaagagatacatgttttgaaaaattcctcgcaaaagaagagaaagaaagactcaaacttttgtttgaatttgataccattttttatatatataccaaaagtccaagactggtttcatttttgggtttggtctgaaacctctcttcgtgttgtttgttcatggtatgtcttaattagggtaaaaaaatacttgattgttttctctcaatcatcatgcatagagtacgcaataaaccggttaaatccaccgctactgcttccgtcaagcatttaatcaaacagagaggcggcgacggagctacggcggcttccaagtcggcgaatgattataataataatgatagtctcttgacggatatgcaggaaccaagcatcgatacagataaactcagctacgagattttctctattcttgagagcaaatttcttttcgggtacgacgactcgaaacccgaacccgcgaattcggttgttgctgggtcgattaagaaccagagaggtaaaatctgtattctgagtatcgatggaggtggaatgagagggatcttacccggtaaggctttggcttatctagaacacgctctgaaatctaaatcgggtgacccgaatgcccgaatcgccgattactttgacgtagccgccgggtccggtataggtgggatttacacagccatgttgttcgggtcaagagacggtaaccgccccatcttcaaagcagatgacacgtggcagttcttaacgagaaacgccaagggtctttacggaggagcaggaatcttgaaacgggtcttgagaaccgggtcgggttgttgttccgggacggctaagttaaagaaagtgatgaaagagtctttctcggagctaaccttaaaggacacgcttaaaccggtgcttataccttgctacgacctcaaaagctctggcccgtttctgttctcacgggccgatgcgcttgagacggacggctatgattttaggctctcggaggtttgtagagcgacttgggctgagccgggtgtgtttgagcccgtggagatgaagtcggttgatgggcagaccaagtgtgtggctgttggtggaggattagccatgagcaatcccacagcggctgcaatcacgcatgtcctgcacaacaagcaggagtttccgtttgtgcgaggtgttgaggatttgcttgtgttgtctcttggtatgggtcagttgcttgatgttagctatgagtatgatcggattatcaagtggaaggctaagcattgggctcgccccgcagctcttatttctaatgacggtgctgctgacactgtcgatcaagctgtggccatggcttttggtcactgccgcagtagtaactatgtccggattcaggcgaatgggtcgaacttaggaccttggagtcctaacatggacacagaccctagtgggagcaatgtgaatatgctgatgggagtagcagaggagatgcttaaacaaaagaatgttgaatctgttttgtttggaggtaaaagaatcgatgaacagagcaacttcgagaagcttgactggttagctggggaacttgttctcgagcatcaaaggagaaatagcagaatcgctccaaccgtagcgttcaagcaatccgtgcatagagcagatcaaaagacaagtgataaagatatcggtgtgaccgcaagagaacgatgaaataagaaatggtttgcttagatgatttttttaagataaggtttttatttctttcttcttaggttatgatttgttgtatagatttgtgtttttgagattgagtttctgagacatgatgagaaaaggggaaacacctatcatcttgcaaagagggctcaagctccttaatccatgctgcccaaaaaaaaaaaaaaaaatatgattcctgtaatttcggtttgtctttgttttcctatgtaatcatcatgatttcttc

SEQ ID NO: 103745 - protein, 488 aa, Arabidopsis thaliana
  peptide (1)..(488): Ceres Seq. ID no. 13613478
  misc_feature (101)..(301): Pfam Name: Patatin-like phospholipase Pfam Description: Patatin-like phospholipase
  misc_feature (1)..(488): Homolog of NCBI NO: 15233136 NR Description: patatin-related [Arabidopsis thaliana]
  misc_feature (1)..(481): Homolog of NCBI NO: 15225054 NR Description: patatin family [Arabidopsis thaliana]
  misc_feature (88)..(488): Homolog of NCBI NO: 30688454 NR Description: patatin-related [Arabidopsis thaliana]
  misc_feature (57)..(79): Homolog of NCBI NO: 30688454 NR Description: patatin-related [Arabidopsis thaliana]
  misc_feature (88)..(488): Homolog of NCBI NO: 7486230 NR Description: hypothetical protein F27B13.40 - Arabidopsis >gi|4914404|emb|CAB43655.1| putative protein [Arabidopsis >gi|7269879|emb|CAB79738.1| putative protein [Arabidopsis
  misc_feature (57)..(79): Homolog of NCBI NO: 7486230 NR Description: hypothetical protein F27B13.40 - Arabidopsis >gi|4914404|emb|CAB43655.1| putative protein [Arabidopsis >gi|7269879|emb|CAB79738.1| putative protein [Arabidopsis
  misc_feature (54)..(480): Homolog of NCBI NO: 34897124 NR Description: putative lipid acyl hydrolase [Oryza sativa]
  misc_feature (57)..(464): Homolog of NCBI NO: 34899642 NR Description: contains ESTs
  misc_feature (54)..(391): Homolog of NCBI NO: 11357489 NR Description: hypothetical protein F16M2.50 - Arabidopsis >gi|7523402|emb|CAB86421.1| putative protein [Arabidopsis
  misc_feature (54)..(391): Homolog of NCBI NO: 18412659 NR Description: patatin-related [Arabidopsis thaliana] AT3g63200/F16M2_50 [Arabidopsis thaliana]
MHRVRNKPVKSTATASVKHLIKQRGGDGATAASKSANDYNNNDSLLTDMQEPSIDTDKLSYEIFSILESKFLFGYDDSKPEPANSVVAGSIKNQRGKICILSIDGGGMRGILPGKALAYLEHALKSKSGDPNARIADYFDVAAGSGIGGIYTAMLFGSRDGNRPIFKADDTWQFLTRNAKGLYGGAGILKRVLRTGSGCCSGTAKLKKVMKESFSELTLKDTLKPVLIPCYDLKSSGPFLFSRADALETDGYDFRLSEVCRATWAEPGVFEPVEMKSVDGQTKCVAVGGGLAMSNPTAAAITHVLHNKQEFPFVRGVEDLLVLSLGMGQLLDVSYEYDRIIKWKAKHWARPAALISNDGAADTVDQAVAMAFGHCRSSNYVRIQANGSNLGPWSPNMDTDPSGSNVNMLMGVAEEMLKQKNVESVLFGGKRIDEQSNFEKLDWLAGELVLEHQRRNSRIAPTVAFKQSVHRADQKTSDKDIGVTARER

SEQ ID NO: 103746 - protein, 440 aa, Arabidopsis thaliana; identical to SEQ ID NO: 27127
  peptide (1)..(440): Ceres Seq. ID no. 13613479
  misc_feature (53)..(253): Pfam Name: Patatin-like phospholipase Pfam Description: Patatin-like phospholipase
  misc_feature (1)..(440): Homolog of NCBI NO: 15233136 NR Description: patatin-related [Arabidopsis thaliana]
  misc_feature (1)..(433): Homolog of NCBI NO: 15225054 NR Description: patatin family [Arabidopsis thaliana]
  misc_feature (40)..(440): Homolog of NCBI NO: 30688454 NR Description: patatin-related [Arabidopsis thaliana]
  misc_feature (9)..(31): Homolog of NCBI NO: 30688454 NR Description: patatin-related [Arabidopsis thaliana]
  misc_feature (40)..(440): Homolog of NCBI NO: 7486230 NR Description: hypothetical protein F27B13.40 - Arabidopsis >gi|4914404|emb|CAB43655.1| putative protein [Arabidopsis >gi|7269879|emb|CAB79738.1| putative protein [Arabidopsis
  misc_feature (9)..(31): Homolog of NCBI NO: 7486230 NR Description: hypothetical protein F27B13.40 - Arabidopsis >gi|4914404|emb|CAB43655.1| putative protein [Arabidopsis >gi|7269879|emb|CAB79738.1| putative protein [Arabidopsis
  misc_feature (6)..(432): Homolog of NCBI NO: 34897124 NR Description: putative lipid acyl hydrolase [Oryza sativa]
  misc_feature (9)..(416): Homolog of NCBI NO: 34899642 NR Description: contains ESTs
  misc_feature (6)..(343): Homolog of NCBI NO: 11357489 NR Description: hypothetical protein F16M2.50 - Arabidopsis >gi|7523402|emb|CAB86421.1| putative protein [Arabidopsis
  misc_feature (6)..(343): Homolog of NCBI NO: 18412659 NR Description: patatin-related [Arabidopsis thaliana] AT3g63200/F16M2_50 [Arabidopsis thaliana]

SEQ ID NO: 103747 - protein, 381 aa, Arabidopsis thaliana; identical to SEQ ID NO: 27128
  peptide (1)..(381): Ceres Seq. ID no. 13613480
  misc_feature (1)..(194): Pfam Name: Patatin-like phospholipase Pfam Description: Patatin-like phospholipase
  misc_feature (1)..(381): Homolog of NCBI NO: 15233136 NR Description: patatin-related [Arabidopsis thaliana]
  misc_feature (1)..(374): Homolog of NCBI NO: 15225054 NR Description: patatin family [Arabidopsis thaliana]
  misc_feature (1)..(381): Homolog of NCBI NO: 30688454 NR Description: patatin-related [Arabidopsis thaliana]
  misc_feature (1)..(381): Homolog of NCBI NO: 7486230 NR Description: hypothetical protein F27B13.40 - Arabidopsis >gi|4914404|emb|CAB43655.1| putative protein [Arabidopsis >gi|7269879|emb|CAB79738.1| putative protein [Arabidopsis
  misc_feature (1)..(373): Homolog of NCBI NO: 34897124 NR Description: putative lipid acyl hydrolase [Oryza sativa]
  misc_feature (1)..(357): Homolog of NCBI NO: 34899642 NR Description: contains ESTs
  misc_feature (1)..(284): Homolog of NCBI NO: 11357489 NR Description: hypothetical protein F16M2.50 - Arabidopsis >gi|7523402|emb|CAB86421.1| putative protein [Arabidopsis
  misc_feature (1)..(284): Homolog of NCBI NO: 18412659 NR Description: patatin-related [Arabidopsis thaliana] AT3g63200/F16M2_50 [Arabidopsis thaliana]
  misc_feature (304)..(342): Homolog of NCBI NO: 11357489 NR Description: hypothetical protein F16M2.50 - Arabidopsis >gi|7523402|emb|CAB86421.1| putative protein [Arabidopsis
  misc_feature (304)..(342): Homolog of NCBI NO: 18412659 NR Description: patatin-related [Arabidopsis thaliana] AT3g63200/F16M2_50 [Arabidopsis thaliana]

SEQ ID NO: 103748 - DNA, 1255 bp, Arabidopsis thaliana
  misc_feature (1)..(1255): Ceres Seq. ID no. 13613485
  misc_feature: MA Experiment ID: 108434 Result: Up-regulated in Transcription
  misc_feature: MA Experiment 108434 PARAMETER Experiment Name: At_Root_Tips_cDNA_P Parameter: Tissue Value: Root Tips
  misc_feature: MA Experiment ID: 108573 Result: Up-regulated in Transcription
  misc_feature: MA Experiment 108573 PARAMETER Experiment Name: At_Drought_cDNA_P Parameter: Timepoint (hr) Value: 6
  misc_feature: MA Experiment 108573 PARAMETER Experiment Name: At_Drought_cDNA_P Parameter: Tissue Value: Aerial
  misc_feature: MA Experiment 108573 PARAMETER Experiment Name: At_Drought_cDNA_P Parameter: Treatment Value: Drought vs. No Drought
  misc_feature: MA Experiment ID: 20000111 Result: Up-regulated in Transcription
  misc_feature: MA Experiment 20000111 PARAMETER Experiment Name: At_42deg_Heat_cDNA_P Parameter: Temperature (deg C) Value: 42 vs. 22
  misc_feature: MA Experiment 20000111 PARAMETER Experiment Name: At_42deg_Heat_cDNA_P Parameter: Timepoint (hr) Value: 6
  misc_feature: MA Experiment 20000111 PARAMETER Experiment Name: At_42deg_Heat_cDNA_P Parameter: Tissue Value: Aerial
  misc_feature: MA Experiment ID: 20000173 Result: Up-regulated in Transcription
  misc_feature: MA Experiment 20000173 PARAMETER Experiment Name: At_42deg_Heat_P Parameter: Age (day) Value: 14
  misc_feature: MA Experiment 20000173 PARAMETER Experiment Name: At_42deg_Heat_P Parameter: Organism Value: A. thaliana
  misc_feature: MA Experiment 20000173 PARAMETER Experiment Name: At_42deg_Heat_P Parameter: Plant Line Value: WS
  misc_feature: MA Experiment 20000173 PARAMETER Experiment Name: At_42deg_Heat_P Parameter: Temperature (deg C) Value: 42 vs. 22
  misc_feature: MA Experiment 20000173 PARAMETER Experiment Name: At_42deg_Heat_P Parameter: Timepoint (hr) Value: 6
  misc_feature: MA Experiment 20000173 PARAMETER Experiment Name: At_42deg_Heat_P Parameter: Tissue Value: Aerial
  misc_feature: MA Experiment ID: 20000495 Result: Up-regulated in Transcription
  misc_feature: MA Experiment 20000495 PARAMETER Experiment Name: At_Guard_Cells_P Parameter: Harvest Date Value: 8/2/2002
  misc_feature: MA Experiment 20000495 PARAMETER Experiment Name: At_Guard_Cells_P Parameter: Organism Value: A. thaliana
  misc_feature: MA Experiment 20000495 PARAMETER Experiment Name: At_Guard_Cells_P Parameter: Tissue Value: Guard Cells vs. Leaves
  misc_feature: MA Experiment ID: 20001911 Result: Up-regulated in Transcription
  misc_feature: MA Experiment 20001911 PARAMETER Experiment Name: At_Drought_Reproduction_P Parameter: Age (day) Value: 40
  misc_feature: MA Experiment 20001911 PARAMETER Experiment Name: At_Drought_Reproduction_P Parameter: Organism Value: A. thaliana
  misc_feature: MA Experiment 20001911 PARAMETER Experiment Name: At_Drought_Reproduction_P Parameter: Plant Line Value: WS
  misc_feature: MA Experiment 20001911 PARAMETER Experiment Name: At_Drought_Reproduction_P Parameter: Timepoint (day) Value: 10
  misc_feature: MA Experiment 20001911 PARAMETER Experiment Name: At_Drought_Reproduction_P Parameter: Tissue Value: Flowers
  misc_feature: MA Experiment 20001911 PARAMETER Experiment Name: At_Drought_Reproduction_P Parameter: Treatment Value: Drought vs. No Drought
atggaagtatggaaccacaaacgcttagggttccggattcaggtcggtgtcgccaccgcccttcttcgtgcttctcttccttctttgtcggatcgtcaggtttacagatcagctcttgtggaggatatgggtgaagaagacaccgcgacggtggatcagaacagtttcggtggtggcaaagattcattgcttcgtaatcgtcattcgtcgccattgccttcaccgacacagctttcttctaaagtgattacattgcctaccgtattaacccttggccgtgtagctgccgttccgattctcgtcgccaccttttacgttgattgctggtggggaagaactgctacgacaagtattttcattgcagcagccattacagattggcttgatggatatattgcacggaagatgagattgggttctgaatttggtgcatttttggatccagtggcagataagcttatggtagcagctacattgatattgttgtgcactaaaccaatggtcgccgttgtcttaggaccagttccatggttagtgacagtaccttcaatcgccatcattggtagagagattactatgtctgcagtaagagaatgggctgcatctcaaaacggcaagctttcagaggctgttgctgtaaatagcttgggaaagtggaaaactgcaacgcagatgatagcgctaaccatacttcttgcaagccgggatagcagttttgagagactattaccgtcgggtattgggttgctctatgtatctgcagggctctctatatggtctttagttgtttatatgaggaagatatggagagtactgctaaagaagtagcaacaaaaaactcttttttcgggctttttgcattcagtatatacacatagaatggaagatttacctctcttcttcttgaagaaagctgactaatttctctctggatacaaatgaaattagttgggcaagcactataagactcttatatgatgctttagttctgttttcaactttgggcactggggtcgtactctacttggtttggttttgtataatatctctgaatcacattgctccggctagcaccgaattttaatgaagcagcaagcacgatcttatgggcaatgatggaaaagcagcaggcgcaatttcgttctagtcgaagacttggtctcatgaattctgatataaatgaaaacaattgttgcatgtcatgtagatgcttttaccgatacaatataatttatatatataaaaaactttggtt

SEQ ID NO: 103749 - protein, 275 aa, Arabidopsis thaliana
  peptide (1)..(275): Ceres Seq. ID no. 13613486
  misc_feature (116)..(267): Pfam Name: CDP-alcohol phosphatidyltransferase Pfam Description: CDP-alcohol phosphatidyltransferase
  misc_feature (43)..(275): Homolog of NCBI NO: 15233163 NR Description: phosphatidylglycerolphosphate synthase (PGS1), [Arabidopsis thaliana] >gi|11358616|pir||T47642
  misc_feature (53)..(274): Homolog of NCBI NO: 15225064 NR Description: phosphatidylglycerolphosphate synthase (PGS1)
  misc_feature (67)..(274): Homolog of NCBI NO: 24796824 NR Description: putative phosphatidylglycerolphosphate synthase
  misc_feature (83)..(269): Homolog of NCBI NO: 23061902 NR Description: hypothetical protein [Pseudomonas fluorescens
  misc_feature (83)..(269): Homolog of NCBI NO: 26990792 NR Description: CDP-diacylglycerol--glycerol-3-phosphate 3-
  misc_feature (83)..(269): Homolog of NCBI NO: 27753591 NR Description: CDP-diacylglycerol-glycerol-3-phosphate
  misc_feature (83)..(269): Homolog of NCBI NO: 28870198 NR Description: CDP-diacylglycerol--glycerol-3-phosphate 3-
  misc_feature (83)..(269): Homolog of NCBI NO: 23472904 NR Description: hypothetical protein [Pseudomonas syringae pv.
  misc_feature (83)..(269): Homolog of NCBI NO: 15597780 NR Description: CDP-diacylglycerol--glycerol-3-phosphate 3-
  misc_feature (83)..(269): Homolog of NCBI NO: 23104171 NR Description: hypothetical protein [Azotobacter vinelandii]
MEVWNHKRLGFRIQVGVATALLRASLPSLSDRQVYRSALVEDMGEEDTATVDQNSFGGGKDSLLRNRHSSPLPSPTQLSSKVITLPTVLTLGRVAAVPILVATFYVDCWWGRTATTSIFIAAAITDWLDGYIARKMRLGSEFGAFLDPVADKLMVAATLILLCTKPMVAVVLGPVPWLVTVPSIAIIGREITMSAVREWAASQNGKLSEAVAVNSLGKWKTATQMIALTILLASRDSSFERLLPSGIGLLYVSAGLSIWSLVVYMRKIWRVLLKK

SEQ ID NO: 103750 - protein, 233 aa, Arabidopsis thaliana; identical to SEQ ID NO: 21299
  peptide (1)..(233): Ceres Seq. ID no. 13613487
  misc_feature (74)..(225): Pfam Name: CDP-alcohol phosphatidyltransferase Pfam Description: CDP-alcohol phosphatidyltransferase
  misc_feature (1)..(233): Homolog of NCBI NO: 15233163 NR Description: phosphatidylglycerolphosphate synthase (PGS1), [Arabidopsis thaliana] >gi|11358616|pir||T47642
  misc_feature (11)..(232): Homolog of NCBI NO: 15225064 NR Description: phosphatidylglycerolphosphate synthase (PGS1)
  misc_feature (25)..(232): Homolog of NCBI NO: 24796824 NR Description: putative phosphatidylglycerolphosphate synthase
  misc_feature (41)..(227): Homolog of NCBI NO: 23061902 NR Description: hypothetical protein [Pseudomonas fluorescens
  misc_feature (41)..(227): Homolog of NCBI NO: 26990792 NR Description: CDP-diacylglycerol--glycerol-3-phosphate 3-
  misc_feature (41)..(227): Homolog of NCBI NO: 27753591 NR Description: CDP-diacylglycerol-glycerol-3-phosphate
  misc_feature (41)..(227): Homolog of NCBI NO: 28870198 NR Description: CDP-diacylglycerol--glycerol-3-phosphate 3-
  misc_feature (41)..(227): Homolog of NCBI NO: 23472904 NR Description: hypothetical protein [Pseudomonas syringae pv.
  misc_feature (41)..(227): Homolog of NCBI NO: 15597780 NR Description: CDP-diacylglycerol--glycerol-3-phosphate 3-
  misc_feature (41)..(227): Homolog of NCBI NO: 23104171 NR Description: hypothetical protein [Azotobacter vinelandii]

SEQ ID NO: 103751 - protein, 140 aa, Arabidopsis thaliana; identical to SEQ ID NO: 21300
  peptide (1)..(140): Ceres Seq. ID no. 13613488
  misc_feature (1)..(132): Pfam Name: CDP-alcohol phosphatidyltransferase Pfam Description: CDP-alcohol phosphatidyltransferase
  misc_feature (1)..(140): Homolog of NCBI NO: 15233163 NR Description: phosphatidylglycerolphosphate synthase (PGS1), [Arabidopsis thaliana] >gi|11358616|pir||T47642
  misc_feature (1)..(139): Homolog of NCBI NO: 15225064 NR Description: phosphatidylglycerolphosphate synthase (PGS1)
  misc_feature (1)..(139): Homolog of NCBI NO: 24796824 NR Description: putative phosphatidylglycerolphosphate synthase
  misc_feature (1)..(134): Homolog of NCBI NO: 23061902 NR Description: hypothetical protein [Pseudomonas fluorescens
  misc_feature (1)..(134): Homolog of NCBI NO: 26990792 NR Description: CDP-diacylglycerol--glycerol-3-phosphate 3-
  misc_feature (1)..(134): Homolog of NCBI NO: 27753591 NR Description: CDP-diacylglycerol-glycerol-3-phosphate
  misc_feature (1)..(134): Homolog of NCBI NO: 28870198 NR Description: CDP-diacylglycerol--glycerol-3-phosphate 3-
  misc_feature (1)..(134): Homolog of NCBI NO: 23472904 NR Description: hypothetical protein [Pseudomonas syringae pv.
  misc_feature (1)..(134): Homolog of NCBI NO: 15597780 NR Description: CDP-diacylglycerol--glycerol-3-phosphate 3-
  misc_feature (1)..(134): Homolog of NCBI NO: 23104171 NR Description: hypothetical protein [Azotobacter vinelandii]

SEQ ID NO: 103752 - DNA, 901 bp, Arabidopsis thaliana
  misc_feature (1)..(901): Ceres Seq. ID no. 13613489
  misc_feature: MA Experiment ID: 108435 Result: Up-regulated in Transcription
  misc_feature: MA Experiment 108435 PARAMETER Experiment Name: At_stm_Mutants_cDNA_P Parameter: Plant Line Value: wt Landsburg vs stm
  misc_feature: MA Experiment 108435 PARAMETER Experiment Name: At_stm_Mutants_cDNA_P Parameter: Tissue Value: Shoot Apical Meristem Region
  misc_feature: MA Experiment ID: 108461 Result: Up-regulated in Transcription
  misc_feature: MA Experiment 108461 PARAMETER Experiment Name: At_Germinating_Seeds_cDNA_P Parameter: Age (day) Value: 1 vs. 0
  misc_feature: MA Experiment 108461 PARAMETER Experiment Name: At_Germinating_Seeds_cDNA_P Parameter: Tissue Value: Germinating Seeds
  misc_feature: MA Experiment ID: 108462 Result: Up-regulated in Transcription
  misc_feature: MA Experiment 108462 PARAMETER Experiment Name: At_Germinating_Seeds_cDNA_P Parameter: Age (day) Value: 2 vs. 0
  misc_feature: MA Experiment 108462 PARAMETER Experiment Name: At_Germinating_Seeds_cDNA_P Parameter: Tissue Value: Germinating Seeds
  misc_feature: MA Experiment ID: 108463 Result: Up-regulated in Transcription
  misc_feature: MA Experiment 108463 PARAMETER Experiment Name: At_Germinating_Seeds_cDNA_P Parameter: Age (day) Value: 3 vs. 0
  misc_feature: MA Experiment 108463 PARAMETER Experiment Name: At_Germinating_Seeds_cDNA_P Parameter: Tissue Value: Germinating Seeds
  misc_feature: MA Experiment ID: 108464 Result: Up-regulated in Transcription
  misc_feature: MA Experiment 108464 PARAMETER Experiment Name: At_Germinating_Seeds_cDNA_P Parameter: Age (day) Value: 4 vs. 0
  misc_feature: MA Experiment 108464 PARAMETER Experiment Name: At_Germinating_Seeds_cDNA_P Parameter: Tissue Value: Germinating Seeds
  misc_feature: MA Experiment ID: 108473 Result: Down-regulated in Transcription
  misc_feature: MA Experiment 108473 PARAMETER Experiment Name: At_Drought_Flowers_cDNA_P Parameter: Timepoint (hr) Value: 7 d
  misc_feature: MA Experiment 108473 PARAMETER Experiment Name: At_Drought_Flowers_cDNA_P Parameter: Tissue Value: Flower
  misc_feature: MA Experiment 108473 PARAMETER Experiment Name: At_Drought_Flowers_cDNA_P Parameter: Treatment Value: Drought vs. No Drought
  misc_feature: MA Experiment ID: 108489 Result: Down-regulated in Transcription
  misc_feature: MA Experiment ID: 108501 Result: Up-regulated in Transcription
  misc_feature: MA Experiment 108501 PARAMETER Experiment Name: At_ap2_floral_buds_cDNA_P Parameter: Plant Line Value: ap2 (Ler.)
  misc_feature: MA Experiment 108501 PARAMETER Experiment Name: At_ap2_floral_buds_cDNA_P Parameter: Tissue Value: Closed Flower
  misc_feature: MA Experiment ID: 108579 Result: Up-regulated in Transcription
  misc_feature: MA Experiment 108579 PARAMETER Experiment Name: At_4deg_Cold_cDNA_P Parameter: Temperature (deg C) Value: 4 vs. 22
  misc_feature: MA Experiment 108579 PARAMETER Experiment Name: At_4deg_Cold_cDNA_P Parameter: Timepoint (hr) Value: 6
  misc_feature: MA Experiment 108579 PARAMETER Experiment Name: At_4deg_Cold_cDNA_P Parameter: Tissue Value: Aerial
  misc_feature: MA Experiment ID: 108594 Result: Down-regulated in Transcription
  misc_feature: MA Experiment 108594 PARAMETER Experiment Name: At_Ler-rhl_Root_cDNA_P Parameter: Plant Line Value: null
  misc_feature: MA Experiment ID: 20000030 Result: Up-regulated in Transcription
  misc_feature: MA Experiment 20000030 PARAMETER Experiment Name: At_CS6630_Roots_cDNA_P Parameter: Plant Line Value: CS6630 vs. WS
  misc_feature: MA Experiment 20000030 PARAMETER Experiment Name: At_CS6630_Roots_cDNA_P Parameter: Tissue Value: Roots
  misc_feature: MA Experiment ID: 20000069 Result: Down-regulated in Transcription
  misc_feature: MA Experiment 20000069 PARAMETER Experiment Name: At_100uM_ABA_Mutants_cDNA_P Parameter: Plant Line Value: CS23
  misc_feature: MA Experiment 20000069 PARAMETER Experiment Name: At_100uM_ABA_Mutants_cDNA_P Parameter: Timepoint (hr) Value: 6
  misc_feature: MA Experiment 20000069 PARAMETER Experiment Name: At_100uM_ABA_Mutants_cDNA_P Parameter: Tissue Value: Aerial
  misc_feature: MA Experiment 20000069 PARAMETER Experiment Name: At_100uM_ABA_Mutants_cDNA_P Parameter: Treatment Value: 100uM ABA vs. No Treatment
  misc_feature: MA Experiment ID: 20000070 Result: Down-regulated in Transcription
  misc_feature: MA Experiment 20000070 PARAMETER Experiment Name: At_100uM_ABA_Mutants_cDNA_P Parameter: Plant Line Value: CS24
  misc_feature: MA Experiment 20000070 PARAMETER Experiment Name: At_100uM_ABA_Mutants_cDNA_P Parameter: Timepoint (hr) Value: 6
  misc_feature: MA Experiment 20000070 PARAMETER Experiment Name: At_100uM_ABA_Mutants_cDNA_P Parameter: Tissue Value: Aerial
  misc_feature: MA Experiment 20000070 PARAMETER Experiment Name: At_100uM_ABA_Mutants_cDNA_P Parameter: Treatment Value: 100uM ABA vs. No Treatment
  misc_feature: MA Experiment ID: 20000071 Result: Down-regulated in Transcription
  misc_feature: MA Experiment 20000071 PARAMETER Experiment Name: At_100uM_ABA_Mutants_cDNA_P Parameter: Plant Line Value: CS8104
  misc_feature: MA Experiment 20000071 PARAMETER Experiment Name: At_100uM_ABA_Mutants_cDNA_P Parameter: Timepoint (hr) Value: 6
  misc_feature: MA Experiment 20000071 PARAMETER Experiment Name: At_100uM_ABA_Mutants_cDNA_P Parameter: Tissue Value: Aerial
  misc_feature: MA Experiment 20000071 PARAMETER Experiment Name: At_100uM_ABA_Mutants_cDNA_P Parameter: Treatment Value: 100uM ABA vs. No Treatment
  misc_feature: MA Experiment ID: 20000086 Result: Down-regulated in Transcription
  misc_feature: MA Experiment 20000086 PARAMETER Experiment Name: At_100uM_ABA_Mutants_cDNA_P Parameter: Plant Line Value: CS22
  misc_feature: MA Experiment 20000086 PARAMETER Experiment Name: At_100uM_ABA_Mutants_cDNA_P Parameter: Timepoint (hr) Value: 6
  misc_feature: MA Experiment 20000086 PARAMETER Experiment Name: At_100uM_ABA_Mutants_cDNA_P Parameter: Tissue Value: Aerial
  misc_feature: MA Experiment 20000086 PARAMETER Experiment Name: At_100uM_ABA_Mutants_cDNA_P Parameter: Treatment Value: 100uM ABA vs. No Treatment
  misc_feature: MA Experiment ID: 20000088 Result: Down-regulated in Transcription
  misc_feature: MA Experiment 20000088 PARAMETER Experiment Name: At_100uM_ABA_Mutants_cDNA_P Parameter: Plant Line Value: Landsberg
  misc_feature: MA Experiment 20000088 PARAMETER Experiment Name: At_100uM_ABA_Mutants_cDNA_P Parameter: Timepoint (hr) Value: 6
  misc_feature: MA Experiment 20000088 PARAMETER Experiment Name: At_100uM_ABA_Mutants_cDNA_P Parameter: Tissue Value: Aerial
  misc_feature: MA Experiment 20000088 PARAMETER Experiment Name: At_100uM_ABA_Mutants_cDNA_P Parameter: Treatment Value: 100uM ABA vs. No Treatment
  misc_feature: MA Experiment ID: 20000090 Result: Down-regulated in Transcription
  misc_feature: MA Experiment ID: 20000117 Result: Down-regulated in Transcription
  misc_feature: MA Experiment 20000117 PARAMETER Experiment Name: At_100uM_ABA_Mutants_cDNA_P Parameter: Plant Line Value: Columbia
  misc_feature: MA Experiment 20000117 PARAMETER Experiment Name: At_100uM_ABA_Mutants_cDNA_P Parameter: Timepoint (hr) Value: 6
  misc_feature: MA Experiment 20000117 PARAMETER Experiment Name: At_100uM_ABA_Mutants_cDNA_P Parameter: Tissue Value: Aerial
  misc_feature: MA Experiment 20000117 PARAMETER Experiment Name: At_100uM_ABA_Mutants_cDNA_P Parameter: Treatment Value: 100uM ABA vs. No Treatment
  misc_feature: MA Experiment ID: 20000144 Result: Down-regulated in Transcription
  misc_feature: MA Experiment 20000144 PARAMETER Experiment Name: At_42deg_Heat_cDNA_P Parameter: Temperature (deg C) Value: 42 vs. 22
  misc_feature: MA Experiment 20000144 PARAMETER Experiment Name: At_42deg_Heat_cDNA_P Parameter: Timepoint (hr) Value: 1
  misc_feature: MA Experiment 20000144 PARAMETER Experiment Name: At_42deg_Heat_cDNA_P Parameter: Tissue Value: Aerial
  misc_feature: MA Experiment ID: 20000171 Result: Down-regulated in Transcription
  misc_feature: MA Experiment 20000171 PARAMETER Experiment Name: At_42deg_Heat_P Parameter: Age (day) Value: 14
  misc_feature: MA Experiment 20000171 PARAMETER Experiment Name: At_42deg_Heat_P Parameter: Organism Value: A. thaliana
  misc_feature: MA Experiment 20000171 PARAMETER Experiment Name: At_42deg_Heat_P Parameter: Plant Line Value: WS
  misc_feature: MA Experiment 20000171 PARAMETER Experiment Name: At_42deg_Heat_P Parameter: Temperature (deg C) Value: 42 vs. 22
  misc_feature: MA Experiment 20000171 PARAMETER Experiment Name: At_42deg_Heat_P Parameter: Timepoint (hr) Value: 1
  misc_feature: MA Experiment 20000171 PARAMETER Experiment Name: At_42deg_Heat_P Parameter: Tissue Value: Aerial
  misc_feature: MA Experiment ID: 20000184 Result: Up-regulated in Transcription
  misc_feature: MA Experiment 20000184 PARAMETER Experiment Name: At_Shoots__P Parameter: Age (day) Value: 7
  misc_feature: MA Experiment 20000184 PARAMETER Experiment Name: At_Shoots__P Parameter: Tissue Value: Shoots vs. Whole Plant
  misc_feature: MA Experiment ID: 20000185 Result: Up-regulated in Transcription
  misc_feature: MA Experiment 20000185 PARAMETER Experiment Name: At_Roots__P Parameter: Age (day) Value: 7 vs. 21
  misc_feature: MA Experiment 20000185 PARAMETER Experiment Name: At_Roots__P Parameter: Organism Value: A. thaliana
  misc_feature: MA Experiment 20000185 PARAMETER Experiment Name: At_Roots__P Parameter: Tissue Value: Roots vs. Whole Plant
  misc_feature: MA Experiment ID: 20000234 Result: Up-regulated in Transcription
  misc_feature: MA Experiment 20000234 PARAMETER Experiment Name: At_Siliques_P Parameter: Age (day) Value: 21
  misc_feature: MA Experiment 20000234 PARAMETER Experiment Name: At_Siliques_P Parameter: Organism Value: A. thaliana
  misc_feature: MA Experiment 20000234 PARAMETER Experiment Name: At_Siliques_P Parameter: Plant Line Value: WS
  misc_feature: MA Experiment 20000234 PARAMETER Experiment Name: At_Siliques_P Parameter: Tissue Value: Less Than 5mm Siliques vs. Whole Plant
  misc_feature: MA Experiment ID: 20000235 Result: Up-regulated in Transcription
  misc_feature: MA Experiment 20000235 PARAMETER Experiment Name: At_Siliques_P Parameter: Age (day) Value: 21
  misc_feature: MA Experiment 20000235 PARAMETER Experiment Name: At_Siliques_P Parameter: Organism Value: A. thaliana
  misc_feature: MA Experiment 20000235 PARAMETER Experiment Name: At_Siliques_P Parameter: Plant Line Value: WS
  misc_feature: MA Experiment 20000235 PARAMETER Experiment Name: At_Siliques_P Parameter: Tissue Value: 5-10mm Siliques vs. Whole Plant
  misc_feature: MA Experiment ID: 20000264 Result: Up-regulated in Transcription
  misc_feature: MA Experiment 20000264 PARAMETER Experiment Name: At_Open_Flower_P Parameter: Age (day) Value: 21
  misc_feature: MA Experiment 20000264 PARAMETER Experiment Name: At_Open_Flower_P Parameter: Plant Line Value: WS
  misc_feature: MA Experiment 20000264 PARAMETER Experiment Name: At_Open_Flower_P Parameter: Tissue Value: Open Flower vs. Whole Plant
  misc_feature: MA Experiment ID: 20000265 Result: Up-regulated in Transcription
  misc_feature: MA Experiment 20000265 PARAMETER Experiment Name: At_Open_Flower_P Parameter: Age (day) Value: 21
  misc_feature: MA Experiment 20000265 PARAMETER Experiment Name: At_Open_Flower_P Parameter: Plant Line Value: WS
  misc_feature: MA Experiment 20000265 PARAMETER Experiment Name: At_Open_Flower_P Parameter: Tissue Value: Closed Flower vs. Whole Plant
  misc_feature: MA Experiment ID: 20000267 Result: Up-regulated in Transcription
  misc_feature: MA Experiment 20000267 PARAMETER Experiment Name: At_Drought_P Parameter: Age (day) Value: 7
  misc_feature: MA Experiment 20000267 PARAMETER Experiment Name: At_Drought_P Parameter: Organism Value: A. thaliana
  misc_feature: MA Experiment 20000267 PARAMETER Experiment Name: At_Drought_P Parameter: Plant Line Value: WS
  misc_feature: MA Experiment 20000267 PARAMETER Experiment Name: At_Drought_P Parameter: Timepoint (hr) Value: 6
  misc_feature: MA Experiment 20000267 PARAMETER Experiment Name: At_Drought_P Parameter: Tissue Value: Whole Plant
  misc_feature: MA Experiment 20000267 PARAMETER Experiment Name: At_Drought_P Parameter: Treatment Value: Drought vs. No Drought
  misc_feature: MA Experiment ID: 20000286 Result: Up-regulated in Transcription
  misc_feature: MA Experiment 20000286 PARAMETER Experiment Name: At_Open_Flower_P Parameter: Age (day) Value: 21
  misc_feature: MA Experiment 20000286 PARAMETER Experiment Name: At_Open_Flower_P Parameter: Plant Line Value: WS
  misc_feature: MA Experiment 20000286 PARAMETER Experiment Name: At_Open_Flower_P Parameter: Tissue Value: Half Open vs. Whole Plant
  misc_feature: MA Experiment ID: 20000308 Result: Up-regulated in Transcription
  misc_feature: MA Experiment 20000308 PARAMETER Experiment Name: At_100mM_NaCl__P Parameter: Age (day) Value: 17
  misc_feature: MA Experiment 20000308 PARAMETER Experiment Name: At_100mM_NaCl__P Parameter: Organism Value: A. thaliana
  misc_feature: MA Experiment 20000308 PARAMETER Experiment Name: At_100mM_NaCl__P Parameter: Plant Line Value: WS
  misc_feature: MA Experiment 20000308 PARAMETER Experiment Name: At_100mM_NaCl__P Parameter: Timepoint (hr) Value: 72
  misc_feature: MA Experiment 20000308 PARAMETER Experiment Name: At_100mM_NaCl__P Parameter: Tissue Value: Whole Plant
  misc_feature: MA Experiment 20000308 PARAMETER Experiment Name: At_100mM_NaCl__P Parameter: Treatment Value: 100mM NaCl vs. No Treatment
  misc_feature: MA Experiment ID: 20000438 Result: Up-regulated in Transcription
  misc_feature: MA Experiment 20000438 PARAMETER Experiment Name: At_Shoots__P Parameter: Age (day) Value: 14
  misc_feature: MA Experiment 20000438 PARAMETER Experiment Name: At_Shoots__P Parameter: Tissue Value: Shoots vs. Whole Plant
  misc_feature: MA Experiment ID: 20000439 Result: Up-regulated in Transcription
  misc_feature: MA Experiment 20000439 PARAMETER Experiment Name: At_Roots__P Parameter: Age (day) Value: 14 vs. 21
  misc_feature: MA Experiment 20000439 PARAMETER Experiment Name: At_Roots__P Parameter: Organism Value: A. thaliana
  misc_feature: MA Experiment 20000439 PARAMETER Experiment Name: At_Roots__P Parameter: Tissue Value: Roots vs. Whole Plant
  misc_feature: MA Experiment ID: 20000451 Result: Up-regulated in Transcription
  misc_feature: MA Experiment 20000451 PARAMETER Experiment Name: At_CS6879_Shoots-Roots_P Parameter: Age (day) Value: 14
  misc_feature: MA Experiment 20000451 PARAMETER Experiment Name: At_CS6879_Shoots-Roots_P Parameter: Organism Value: A. thaliana
  misc_feature: MA Experiment 20000451 PARAMETER Experiment Name: At_CS6879_Shoots-Roots_P Parameter: Plant Line Value: CS6879 vs. WS
  misc_feature: MA Experiment 20000451 PARAMETER Experiment Name: At_CS6879_Shoots-Roots_P Parameter: Tissue Value: Roots
  misc_feature: MA Experiment ID: 20000452 Result: Up-regulated in Transcription
  misc_feature: MA Experiment 20000452 PARAMETER Experiment Name: At_CS6879_Shoots-Roots_P Parameter: Age (day) Value: 14
  misc_feature: MA Experiment 20000452 PARAMETER Experiment Name: At_CS6879_Shoots-Roots_P Parameter: Organism Value: A. thaliana
  misc_feature: MA Experiment 20000452 PARAMETER Experiment Name: At_CS6879_Shoots-Roots_P Parameter: Plant Line Value: CS6879 vs. WS
  misc_feature: MA Experiment 20000452 PARAMETER Experiment Name: At_CS6879_Shoots-Roots_P Parameter: Tissue Value: Shoots
  misc_feature: MA Experiment ID: 20000794 Result: Up-regulated in Transcription
  misc_feature: MA Experiment 20000794 PARAMETER Experiment Name: At_Petals_P Parameter: Age (day) Value: 23-25 days
  misc_feature: MA Experiment 20000794 PARAMETER Experiment Name: At_Petals_P Parameter: Plant Line Value: WS
  misc_feature: MA Experiment 20000794 PARAMETER Experiment Name: At_Petals_P Parameter: Tissue Value: Petals vs. Whole plant
  misc_feature: MA Experiment ID: 20001248 Result: Down-regulated in Transcription
  misc_feature: MA Experiment 20001248 PARAMETER Experiment Name: At_Far-red-induction_P Parameter: Age (day) Value: 7
  misc_feature: MA Experiment 20001248 PARAMETER Experiment Name: At_Far-red-induction_P Parameter: Light Value: Far-red vs. White
  misc_feature: MA Experiment 20001248 PARAMETER Experiment Name: At_Far-red-induction_P Parameter: Organism Value: A. thaliana
  misc_feature: MA Experiment 20001248 PARAMETER Experiment Name: At_Far-red-induction_P Parameter: Plant Line Value: Columbia
  misc_feature: MA Experiment 20001248 PARAMETER Experiment Name: At_Far-red-induction_P Parameter: Timepoint (hr) Value: 4
  misc_feature: MA Experiment 20001248 PARAMETER Experiment Name: At_Far-red-induction_P Parameter: Tissue Value: Whole Plant
  misc_feature: MA Experiment ID: 20001757 Result: Down-regulated in Transcription
  misc_feature: MA Experiment 20001757 PARAMETER Experiment Name: At_50mM_NH4NO3_L-to-H_P Parameter: Timepoint (hr) Value: 6
  misc_feature: MA Experiment 20001757 PARAMETER Experiment Name: At_50mM_NH4NO3_L-to-H_P Parameter: Tissue Value: Leaf
  misc_feature: MA Experiment 20001757 PARAMETER Experiment Name: At_50mM_NH4NO3_L-to-H_P Parameter: Treatment Value: 50mM NH4NO3 vs 100mM Mannitol
aatcaagaaaagctctgtaacattattatcaatcgaaattccaaccgactcaacaatgtcttcatccaacgcctgcgcctctccgtcaccgttccccgccgtcacgaagcttcatgtagactccgtcacgtttgtaccgtccgtcaagtcaccggcctcctccaatccattattcctcggcggcgccggtgtccgaggccttgatatccaaggtaaattcgtgatcttcaccgtcattggagtatacctagagggtaacgccgttccttctctatctgtcaagtggaagggaaaaactacggaggagctaacagaatctatcccgttcttccgtgaaatagtcaccggtgcgtttgagaagtttatcaaggtgacaatgaaactgccgttaacgggacaacaatattcggagaaagtgacggagaattgtgtggctatatggaaacaattagggctttatacggactgtgaagctaaagctgtggagaagttcttggagatcttcaaggaagaaacattccctcccggttcatcgatcctcttcgctctctcccctaccggctctcttacggttgcgttttcgaaagatgatagtatccctgaaaccgggatcgctgtgatcgagaacaaattgttggcggaggcggttctggaatctatcatcgggaagaacggtgtgtcacctggcactaggttaagtgttgcagaaagattatctcagctaatgatgaagaacaaggacgaaaaggaagttagtgatcactctgttgaggaaaaactagccaaagagaactgagaatgatagatttttcttgtgtttttgtcattttctatttcttatgttttctatatctaatttcttatgcggtactcaagtggagaataaagaacatgcatttac

SEQ ID NO: 103753 - protein, 264 aa, Arabidopsis thaliana; identical to SEQ ID NO: 26207
  peptide (1)..(264): Ceres Seq. ID no. 13613490
  misc_feature (32)..(243): Pfam Name: Chalcone-flavanone isomerase Pfam Description: Chalcone-flavanone isomerase
  misc_feature (19)..(264): Homolog of NCBI NO: 8670955 NR Description: chalcone flavanone isomerase [Arabidopsis >gi|24740024|emb|CAD42203.1| chalcone flavanone isomerase thaliana] >gi|24740030|emb|CAD42204.1| chalcone flavanone
  misc_feature (19)..(264): Homolog of NCBI NO: 15233190 NR Description: chalcone-flavanone isomerase (chalcone isomerase)
  misc_feature (19)..(264): Homolog of NCBI NO: 8670918 NR Description: chalcone flavanone isomerase [Arabidopsis
  misc_feature (19)..(264): Homolog of NCBI NO: 320138 NR Description: chalcone isomerase (EC 5.5.1.6) - Arabidopsis >gi|166660|gb|AAA32766.1| chalcone isomerase [Arabidopsis >gi|8670928|emb|CAB94975.1| chalcone flavanone isomerase
  misc_feature (27)..(264): Homolog of NCBI NO: 18203239 NR Description: Chalcone--flavonone isomerase (Chalcone >gi|8670936|emb|CAB94968.1| chalcone flavanone isomerase
  misc_feature (19)..(264): Homolog of NCBI NO: 5921725 NR Description: CHALCONE--FLAVONONE ISOMERASE (CHALCONE ISOMERASE)
  misc_feature (29)..(261): Homolog of NCBI NO: 1705761 NR Description: CHALCONE--FLAVONONE ISOMERASE (CHALCONE
  misc_feature (60)..(229): Homolog of NCBI NO: 28804474 NR Description: chalcone flavanone isomerase [Raphanus sativus]
  misc_feature (29)..(248): Homolog of NCBI NO: 4126399 NR Description: chalcone isomerase [Citrus sinensis]
  misc_feature (29)..(260): Homolog of NCBI NO: 5921722 NR Description: Chalcone--flavonone isomerase (Chalcone >gi|3126969|gb|AAC16013.1| chalcone isomerase [Elaeagnus

SEQ ID NO: 103754 - protein, 246 aa, Arabidopsis thaliana; identical to SEQ ID NO: 26208
  peptide (1)..(246): Ceres Seq. ID no. 13613491
  misc_feature (14)..(225): Pfam Name: Chalcone-flavanone isomerase Pfam Description: Chalcone-flavanone isomerase
  misc_feature (1)..(246): Homolog of NCBI NO: 8670955 NR Description: chalcone flavanone isomerase [Arabidopsis >gi|24740024|emb|CAD42203.1| chalcone flavanone isomerase thaliana] >gi|24740030|emb|CAD42204.1| chalcone flavanone
  misc_feature (1)..(246): Homolog of NCBI NO: 15233190 NR Description: chalcone-flavanone isomerase (chalcone isomerase)
  misc_feature (1)..(246): Homolog of NCBI NO: 8670918 NR Description: chalcone flavanone isomerase [Arabidopsis
  misc_feature (1)..(246): Homolog of NCBI NO: 320138 NR Description: chalcone isomerase (EC 5.5.1.6) - Arabidopsis >gi|166660|gb|AAA32766.1| chalcone isomerase [Arabidopsis >gi|8670928|emb|CAB94975.1| chalcone flavanone isomerase
  misc_feature (9)..(246): Homolog of NCBI NO: 18203239 NR Description: Chalcone--flavonone isomerase (Chalcone >gi|8670936|emb|CAB94968.1| chalcone flavanone isomerase
  misc_feature (1)..(246): Homolog of NCBI NO: 5921725 NR Description: CHALCONE--FLAVONONE ISOMERASE (CHALCONE ISOMERASE)
  misc_feature (11)..(243): Homolog of NCBI NO: 1705761 NR Description: CHALCONE--FLAVONONE ISOMERASE (CHALCONE
  misc_feature (42)..(211): Homolog of NCBI NO: 28804474 NR Description: chalcone flavanone isomerase [Raphanus sativus]
  misc_feature (11)..(230): Homolog of NCBI NO: 4126399 NR Description: chalcone isomerase [Citrus sinensis]
  misc_feature (11)..(242): Homolog of NCBI NO: 5921722 NR Description: Chalcone--flavonone isomerase (Chalcone >gi|3126969|gb|AAC16013.1| chalcone isomerase [Elaeagnus

SEQ ID NO: 103755 - protein, 139 aa, Arabidopsis thaliana; identical to SEQ ID NO: 26209
  peptide (1)..(139): Ceres Seq. ID no. 13613492
  misc_feature (1)..(118): Pfam Name: Chalcone-flavanone isomerase Pfam Description: Chalcone-flavanone isomerase
  misc_feature (1)..(139): Homolog of NCBI NO: 8670955 NR Description: chalcone flavanone isomerase [Arabidopsis >gi|24740024|emb|CAD42203.1| chalcone flavanone isomerase thaliana] >gi|24740030|emb|CAD42204.1| chalcone flavanone
  misc_feature (1)..(139): Homolog of NCBI NO: 15233190 NR Description: chalcone-flavanone isomerase (chalcone isomerase)
  misc_feature (1)..(139): Homolog of NCBI NO: 8670918 NR Description: chalcone flavanone isomerase [Arabidopsis
  misc_feature (1)..(139): Homolog of NCBI NO: 320138 NR Description: chalcone isomerase (EC 5.5.1.6) - Arabidopsis >gi|166660|gb|AAA32766.1| chalcone isomerase [Arabidopsis >gi|8670928|emb|CAB94975.1| chalcone flavanone isomerase
  misc_feature (1)..(139): Homolog of NCBI NO: 18203239 NR Description: Chalcone--flavonone isomerase (Chalcone >gi|8670936|emb|CAB94968.1| chalcone flavanone isomerase
  misc_feature (1)..(139): Homolog of NCBI NO: 5921725 NR Description: CHALCONE--FLAVONONE ISOMERASE (CHALCONE ISOMERASE)
  misc_feature (1)..(136): Homolog of NCBI NO: 1705761 NR Description: CHALCONE--FLAVONONE ISOMERASE (CHALCONE
  misc_feature (1)..(104): Homolog of NCBI NO: 28804474 NR Description: chalcone flavanone isomerase [Raphanus sativus]
  misc_feature (1)..(123): Homolog of NCBI NO: 4126399 NR Description: chalcone isomerase [Citrus sinensis]
  misc_feature (1)..(135): Homolog of NCBI NO: 5921722 NR Description: Chalcone--flavonone isomerase (Chalcone >gi|3126969|gb|AAC16013.1| chalcone isomerase [Elaeagnus

SEQ ID NO: 103756 - DNA, 1310 bp, Arabidopsis thaliana
  misc_feature (1)..(1310): Ceres Seq. ID no. 13613497
  misc_feature: MA Experiment ID: 108434 Result: Up-regulated in Transcription
  misc_feature: MA Experiment 108434 PARAMETER Experiment Name: At_Root_Tips_cDNA_P Parameter: Tissue Value: Root Tips
  misc_feature: MA Experiment ID: 108461 Result: Up-regulated in Transcription
  misc_feature: MA Experiment 108461 PARAMETER Experiment Name: At_Germinating_Seeds_cDNA_P Parameter: Age (day) Value: 1 vs. 0
  misc_feature: MA Experiment 108461 PARAMETER Experiment Name: At_Germinating_Seeds_cDNA_P Parameter: Tissue Value: Germinating Seeds
  misc_feature: MA Experiment ID: 108577 Result: Down-regulated in Transcription
  misc_feature: MA Experiment 108577 PARAMETER Experiment Name: At_42deg_Heat_cDNA_P Parameter: Temperature (deg C) Value: 42 vs. 22
  misc_feature: MA Experiment 108577 PARAMETER Experiment Name: At_42deg_Heat_cDNA_P Parameter: Timepoint (hr) Value: 6
  misc_feature: MA Experiment 108577 PARAMETER Experiment Name: At_42deg_Heat_cDNA_P Parameter: Tissue Value: Aerial
  misc_feature: MA Experiment ID: 20000111 Result: Down-regulated in Transcription
  misc_feature: MA Experiment 20000111 PARAMETER Experiment Name: At_42deg_Heat_cDNA_P Parameter: Temperature (deg C) Value: 42 vs. 22
  misc_feature: MA Experiment 20000111 PARAMETER Experiment Name: At_42deg_Heat_cDNA_P Parameter: Timepoint (hr) Value: 6
  misc_feature: MA Experiment 20000111 PARAMETER Experiment Name: At_42deg_Heat_cDNA_P Parameter: Tissue Value: Aerial
  misc_feature: MA Experiment ID: 20000113 Result: Down-regulated in Transcription
  misc_feature: MA Experiment 20000113 PARAMETER Experiment Name: At_42deg_Heat_cDNA_P Parameter: Temperature (deg C) Value: 42 vs. 22
  misc_feature: MA Experiment 20000113 PARAMETER Experiment Name: At_42deg_Heat_cDNA_P Parameter: Timepoint (hr) Value: 8
  misc_feature: MA Experiment 20000113 PARAMETER Experiment Name: At_42deg_Heat_cDNA_P Parameter: Tissue Value: Aerial
  misc_feature: MA Experiment ID: 20000184 Result: Up-regulated in Transcription
  misc_feature: MA Experiment 20000184 PARAMETER Experiment Name: At_Shoots__P Parameter: Age (day) Value: 7
  misc_feature: MA Experiment 20000184 PARAMETER Experiment Name: At_Shoots__P Parameter: Tissue Value: Shoots vs. Whole Plant
  misc_feature: MA Experiment ID: 20000224 Result: Down-regulated in Transcription
  misc_feature: MA Experiment ID: 20000234 Result: Up-regulated in Transcription
  misc_feature: MA Experiment 20000234 PARAMETER Experiment Name: At_Siliques_P Parameter: Age (day) Value: 21
  misc_feature: MA Experiment 20000234 PARAMETER Experiment Name: At_Siliques_P Parameter: Organism Value: A. thaliana
  misc_feature: MA Experiment 20000234 PARAMETER Experiment Name: At_Siliques_P Parameter: Plant Line Value: WS
  misc_feature: MA Experiment 20000234 PARAMETER Experiment Name: At_Siliques_P Parameter: Tissue Value: Less Than 5mm Siliques vs. Whole Plant
  misc_feature: MA Experiment ID: 20000573 Result: Down-regulated in Transcription
  misc_feature: MA Experiment 20000573 PARAMETER Experiment Name: At_100uM_ABA_Mutants__P Parameter: Organism Value: A. thaliana
  misc_feature: MA Experiment 20000573 PARAMETER Experiment Name: At_100uM_ABA_Mutants__P Parameter: Plant Line Value: CS22 vs. Ler wt
  misc_feature: MA Experiment 20000573 PARAMETER Experiment Name: At_100uM_ABA_Mutants__P Parameter: Timepoint (hr) Value: N/A
  misc_feature: MA Experiment 20000573 PARAMETER Experiment Name: At_100uM_ABA_Mutants__P Parameter: Tissue Value: Whole Plant
  misc_feature: MA Experiment 20000573 PARAMETER Experiment Name: At_100uM_ABA_Mutants__P Parameter: Treatment Value: None
  misc_feature: MA Experiment ID: 20000794 Result: Down-regulated in Transcription
  misc_feature: MA Experiment 20000794 PARAMETER Experiment Name: At_Petals_P Parameter: Age (day) Value: 23-25 days
  misc_feature: MA Experiment 20000794 PARAMETER Experiment Name: At_Petals_P Parameter: Plant Line Value: WS
  misc_feature: MA Experiment 20000794 PARAMETER Experiment Name: At_Petals_P Parameter: Tissue Value: Petals vs. Whole plant
  misc_feature: MA Experiment ID: 20001558 Result: Up-regulated in Transcription
  misc_feature: MA Experiment 20001558 PARAMETER Experiment Name: At_Drought_Soil_Dry_P Parameter: Age (day) Value: 27
  misc_feature: MA Experiment 20001558 PARAMETER Experiment Name: At_Drought_Soil_Dry_P Parameter: Organism Value: A. thaliana
  misc_feature: MA Experiment 20001558 PARAMETER Experiment Name: At_Drought_Soil_Dry_P Parameter: Plant Line Value: WS
  misc_feature: MA Experiment 20001558 PARAMETER Experiment Name: At_Drought_Soil_Dry_P Parameter: Post Timepoint (hr) Value: 6
  misc_feature: MA Experiment 20001558 PARAMETER Experiment Name: At_Drought_Soil_Dry_P Parameter: Post-Treatment Value: Re-Water vs. No Drought
  misc_feature: MA Experiment 20001558 PARAMETER Experiment Name: At_Drought_Soil_Dry_P Parameter: Timepoint (day) Value: 13
  misc_feature: MA Experiment 20001558 PARAMETER Experiment Name: At_Drought_Soil_Dry_P Parameter: Treatment Value: Drought vs. No Drought
  misc_feature: MA Experiment ID: 20001560 Result: Up-regulated in Transcription
  misc_feature: MA Experiment 20001560 PARAMETER Experiment Name: At_Drought_Soil_Dry_P Parameter: Age (day) Value: 28
  misc_feature: MA Experiment 20001560 PARAMETER Experiment Name: At_Drought_Soil_Dry_P Parameter: Organism Value: A. thaliana
  misc_feature: MA Experiment 20001560 PARAMETER Experiment Name: At_Drought_Soil_Dry_P Parameter: Plant Line Value: WS
  misc_feature: MA Experiment 20001560 PARAMETER Experiment Name: At_Drought_Soil_Dry_P Parameter: Post Timepoint (hr) Value: None
  misc_feature: MA Experiment 20001560 PARAMETER Experiment Name: At_Drought_Soil_Dry_P Parameter: Post-Treatment Value: None
  misc_feature: MA Experiment 20001560 PARAMETER Experiment Name: At_Drought_Soil_Dry_P Parameter: Timepoint (day) Value: 14
  misc_feature: MA Experiment 20001560 PARAMETER Experiment Name: At_Drought_Soil_Dry_P Parameter: Treatment Value: Drought vs. No Drought
  misc_feature: MA Experiment ID: 20001911 Result: Down-regulated in Transcription
  misc_feature: MA Experiment 20001911 PARAMETER Experiment Name: At_Drought_Reproduction_P Parameter: Age (day) Value: 40
  misc_feature: MA Experiment 20001911 PARAMETER Experiment Name: At_Drought_Reproduction_P Parameter: Organism Value: A. thaliana
  misc_feature: MA Experiment 20001911 PARAMETER Experiment Name: At_Drought_Reproduction_P Parameter: Plant Line Value: WS
  misc_feature: MA Experiment 20001911 PARAMETER Experiment Name: At_Drought_Reproduction_P Parameter: Timepoint (day) Value: 10
  misc_feature: MA Experiment 20001911 PARAMETER Experiment Name: At_Drought_Reproduction_P Parameter: Tissue Value: Flowers
  misc_feature: MA Experiment 20001911 PARAMETER Experiment Name: At_Drought_Reproduction_P Parameter: Treatment Value: Drought vs. No Drought
actcccaactacatcctcttcaatgctcaatctcgtcttcttcttcctctctatttaatttcccttgtctctctatctctctcaatttcctcatctgggtcttcctcgtttgctccgcttaagcaccatgaaggtcaccgtcgtctcccgcagcggcagagaagtcctcaaagctccccttgacctccccgattcggcgactgttgctgatctgcaagaagcgtttcataagagagctaagaagttttacccgtcgaggcaaagactgactcttcccgtgactcctggatcgaaggacaaacctgttgtcctcaatagcaagaaatcactgaaggagtactgtgatggaaacaacaactccttaactgtagtcttcaaagacctgggggcacaagtttcctaccgcacactcttcttcttcgagtatcttggccctctccttatctaccctgtcttttactacttccctgtttacaagtttcttggttatggagaggactgtgtgatccatccggtccagacgtacgctatgtactactggtgctttcactacttcaaacggatcttagaaacgtttttcgtacatcggttcagccacgcaacctccccaatcgggaatgtgttcaggaactgtgcttattactggagctttggtgcttacattgcttattacgtcaaccatcccttgtacactccagttagtgaccttcagatgaagattggtttcgggtttggtttggtttgccaagtcgcaaacttttactgtcacatattgctgaagaatctgagggaccccagtggggctggaggctaccagattccacgcggtttcctcttcaacattgttacatgtgccaattacactaccgagatttaccaatggctaggattcaacatcgctactcagaccattgcaggatatgttttcctcgctgttgctgctctaatcatgactaattgggctcttggaaagcacagccgtctgagaaagatatttgatggaaaagatggaaagccaaagtatccaagaagatgggtgatacttcctccattcctttagaagccattgttgcttatcagtaaaagctcttaataaagctgaaaatgagactttctttgggttctctgtatcgtttccttttttgttcggtctatgtattggttataacatgtttattccttttgtttcaatatgttttgatttttgaagttagagagatttagaaatgtacttgtgtagttgtttctcacgcaaaccaattcctctttatgtatcgcatacatgagtcaataataaatatgattactag

SEQ ID NO: 103757 - protein, 310 aa, Arabidopsis thaliana; identical to SEQ ID NO: 27615
  peptide (1)..(310): Ceres Seq. ID no. 13613498
  misc_feature (158)..(310): Pfam Name: 3-oxo-5-alpha-steroid 4-dehydrogenase Pfam Description: 3-oxo-5-alpha-steroid 4-dehydrogenase
  misc_feature (1)..(310): Homolog of NCBI NO: 15233250 NR Description: 3-oxo-5-alpha-steroid 4-dehydrogenase (steroid
  misc_feature (1)..(310): Homolog of NCBI NO: 34895848 NR Description: putative glycoprotein [Oryza sativa (japonica group)] >gi|9663963|dbj|BAB03604.1| putative glycoprotein [Oryza
  misc_feature (1)..(310): Homolog of NCBI NO: 25004880 NR Description: steroid 5-alpha reductase [Cicer arietinum]
  misc_feature (2)..(310): Homolog of NCBI NO: 33585860 NR Description: Glycoprotein, synaptic 2 [Xenopus laevis]
  misc_feature (23)..(307): Homolog of NCBI NO: 31418870 NR Description: Unknown (protein for MGC:64025) [Danio rerio]
  misc_feature (2)..(310): Homolog of NCBI NO: 13111809 NR Description: Unknown (protein for IMAGE:2901253) [Homo sapiens]
  misc_feature (2)..(310): Homolog of NCBI NO: 24475816 NR Description: glycoprotein, synaptic 2; synaptic glycoprotein
  misc_feature (2)..(310): Homolog of NCBI NO: 30585427 NR Description: Homo sapiens glycoprotein, synaptic 2 [synthetic
  misc_feature (24)..(310): Homolog of NCBI NO: 19924091 NR Description: synaptic glycoprotein SC2 [Rattus norvegicus]
  misc_feature (24)..(310): Homolog of NCBI NO: 19923070 NR Description: synaptic glycoprotein SC2; DNA segment, Chr 17, Doi 178, expressed [Mus musculus] Synaptic glycoprotein SC2 >gi|12846795|dbj|BAB27305.1| unnamed

SEQ ID NO: 103758 - protein, 176 aa, Arabidopsis thaliana; identical to SEQ ID NO: 27616
  peptide (1)..(176): Ceres Seq. ID no. 13613499
  misc_feature (24)..(176): Pfam Name: 3-oxo-5-alpha-steroid 4-dehydrogenase Pfam Description: 3-oxo-5-alpha-steroid 4-dehydrogenase
  misc_feature (1)..(176): Homolog of NCBI NO: 15233250 NR Description: 3-oxo-5-alpha-steroid 4-dehydrogenase (steroid
  misc_feature (1)..(176): Homolog of NCBI NO: 34895848 NR Description: putative glycoprotein [Oryza sativa (japonica group)] >gi|9663963|dbj|BAB03604.1| putative glycoprotein [Oryza
  misc_feature (1)..(176): Homolog of NCBI NO: 25004880 NR Description: steroid 5-alpha reductase [Cicer arietinum]
  misc_feature (1)..(176): Homolog of NCBI NO: 33585860 NR Description: Glycoprotein, synaptic 2 [Xenopus laevis]
  misc_feature (1)..(173): Homolog of NCBI NO: 31418870 NR Description: Unknown (protein for MGC:64025) [Danio rerio]
  misc_feature (1)..(176): Homolog of NCBI NO: 13111809 NR Description: Unknown (protein for IMAGE:2901253) [Homo sapiens]
  misc_feature (1)..(176): Homolog of NCBI NO: 24475816 NR Description: glycoprotein, synaptic 2; synaptic glycoprotein
  misc_feature (1)..(176): Homolog of NCBI NO: 30585427 NR Description: Homo sapiens glycoprotein, synaptic 2 [synthetic
  misc_feature (1)..(176): Homolog of NCBI NO: 19924091 NR Description: synaptic glycoprotein SC2 [Rattus norvegicus]
  misc_feature (1)..(176): Homolog of NCBI NO: 19923070 NR Description: synaptic glycoprotein SC2; DNA segment, Chr 17, Doi 178, expressed [Mus musculus] Synaptic glycoprotein SC2 >gi|12846795|dbj|BAB27305.1| unnamed

SEQ ID NO: 103759 - DNA, 1641 bp, Arabidopsis thaliana
  misc_feature (1)..(1641): Ceres Seq. ID no. 13613500
  misc_feature: MA Experiment ID: 20000166 Result: Up-regulated in Transcription
  misc_feature: MA Experiment 20000166 PARAMETER Experiment Name: At_100uM_ABA_P Parameter: Age (day) Value: 14
  misc_feature: MA Experiment 20000166 PARAMETER Experiment Name: At_100uM_ABA_P Parameter: Organism Value: A. thaliana
  misc_feature: MA Experiment 20000166 PARAMETER Experiment Name: At_100uM_ABA_P Parameter: Plant Line Value: WS
  misc_feature: MA Experiment 20000166 PARAMETER Experiment Name: At_100uM_ABA_P Parameter: Timepoint (hr) Value: 1
  misc_feature: MA Experiment 20000166 PARAMETER Experiment Name: At_100uM_ABA_P Parameter: Tissue Value: Aerial
  misc_feature: MA Experiment 20000166 PARAMETER Experiment Name: At_100uM_ABA_P Parameter: Treatment Value: 100uM ABA vs. No Treatment
  misc_feature: MA Experiment ID: 20000169 Result: Up-regulated in Transcription
  misc_feature: MA Experiment 20000169 PARAMETER Experiment Name: At_100uM_ABA_P Parameter: Age (day) Value: 14
  misc_feature: MA Experiment 20000169 PARAMETER Experiment Name: At_100uM_ABA_P Parameter: Organism Value: A. thaliana
  misc_feature: MA Experiment 20000169 PARAMETER Experiment Name: At_100uM_ABA_P Parameter: Plant Line Value: WS
  misc_feature: MA Experiment 20000169 PARAMETER Experiment Name: At_100uM_ABA_P Parameter: Timepoint (hr) Value: 6
  misc_feature: MA Experiment 20000169 PARAMETER Experiment Name: At_100uM_ABA_P Parameter: Tissue Value: Aerial
  misc_feature: MA Experiment 20000169 PARAMETER Experiment Name: At_100uM_ABA_P Parameter: Treatment Value: 100uM ABA vs. No Treatment
  misc_feature: MA Experiment ID: 20000171 Result: Down-regulated in Transcription
  misc_feature: MA Experiment 20000171 PARAMETER Experiment Name: At_42deg_Heat_P Parameter: Age (day) Value: 14
  misc_feature: MA Experiment 20000171 PARAMETER Experiment Name: At_42deg_Heat_P Parameter: Organism Value: A. thaliana
  misc_feature: MA Experiment 20000171 PARAMETER Experiment Name: At_42deg_Heat_P Parameter: Plant Line Value: WS
  misc_feature: MA Experiment 20000171 PARAMETER Experiment Name: At_42deg_Heat_P Parameter: Temperature (deg C) Value: 42 vs. 22
  misc_feature: MA Experiment 20000171 PARAMETER Experiment Name: At_42deg_Heat_P Parameter: Timepoint (hr) Value: 1
  misc_feature: MA Experiment 20000171 PARAMETER Experiment Name: At_42deg_Heat_P Parameter: Tissue Value: Aerial
  misc_feature: MA Experiment ID: 20000182 Result: Up-regulated in Transcription
  misc_feature: MA Experiment 20000182 PARAMETER Experiment Name: At_2mM_SA_P Parameter: Age (day) Value: 14
  misc_feature: MA Experiment 20000182 PARAMETER Experiment Name: At_2mM_SA_P Parameter: Organism Value: A. thaliana
  misc_feature: MA Experiment 20000182 PARAMETER Experiment Name: At_2mM_SA_P Parameter: Plant Line Value: WS
  misc_feature: MA Experiment 20000182 PARAMETER Experiment Name: At_2mM_SA_P Parameter: Timepoint (hr) Value: 6
  misc_feature: MA Experiment 20000182 PARAMETER Experiment Name: At_2mM_SA_P Parameter: Tissue Value: Aerial
  misc_feature: MA Experiment 20000182 PARAMETER Experiment Name: At_2mM_SA_P Parameter: Treatment Value: 2mM SA vs. No Treatment
  misc_feature: MA Experiment ID: 20000436 Result: Up-regulated in Transcription
  misc_feature: MA Experiment 20000436 PARAMETER Experiment Name: At_Drought_P Parameter: Age (day) Value: 7
  misc_feature: MA Experiment 20000436 PARAMETER Experiment Name: At_Drought_P Parameter: Organism Value: A. thaliana
  misc_feature: MA Experiment 20000436 PARAMETER Experiment Name: At_Drought_P Parameter: Plant Line Value: WS
  misc_feature: MA Experiment 20000436 PARAMETER Experiment Name: At_Drought_P Parameter: Timepoint (hr) Value: 12
  misc_feature: MA Experiment 20000436 PARAMETER Experiment Name: At_Drought_P Parameter: Tissue Value: Whole Plant
  misc_feature: MA Experiment 20000436 PARAMETER Experiment Name: At_Drought_P Parameter: Treatment Value: Drought vs. No Drought
  misc_feature: MA Experiment ID: 20000437 Result: Up-regulated in Transcription
  misc_feature: MA Experiment 20000437 PARAMETER Experiment Name: At_Drought_P Parameter: Age (day) Value: 8
  misc_feature: MA Experiment 20000437 PARAMETER Experiment Name: At_Drought_P Parameter: Organism Value: A. thaliana
  misc_feature: MA Experiment 20000437 PARAMETER Experiment Name: At_Drought_P Parameter: Plant Line Value: WS
  misc_feature: MA Experiment 20000437 PARAMETER Experiment Name: At_Drought_P Parameter: Timepoint (hr) Value: 24
  misc_feature: MA Experiment 20000437 PARAMETER Experiment Name: At_Drought_P Parameter: Tissue Value: Whole Plant
  misc_feature: MA Experiment 20000437 PARAMETER Experiment Name: At_Drought_P Parameter: Treatment Value: Drought vs. No Drought
  misc_feature: MA Experiment ID: 20000438 Result: Down-regulated in Transcription
  misc_feature: MA Experiment 20000438 PARAMETER Experiment Name: At_Shoots__P Parameter: Age (day) Value: 14
  misc_feature: MA Experiment 20000438 PARAMETER Experiment Name: At_Shoots__P Parameter: Tissue Value: Shoots vs. Whole Plant
  misc_feature: MA Experiment ID: 20000439 Result: Down-regulated in Transcription
  misc_feature: MA Experiment 20000439 PARAMETER Experiment Name: At_Roots__P Parameter: Age (day) Value: 14 vs. 21
  misc_feature: MA Experiment 20000439 PARAMETER Experiment Name: At_Roots__P Parameter: Organism Value: A. thaliana
  misc_feature: MA Experiment 20000439 PARAMETER Experiment Name: At_Roots__P Parameter: Tissue Value: Roots vs. Whole Plant
  misc_feature: MA Experiment ID: 20000453 Result: Up-regulated in Transcription
  misc_feature: MA Experiment 20000453 PARAMETER Experiment Name: At_100uM_ABA_P Parameter: Age (day) Value: 15
  misc_feature: MA Experiment 20000453 PARAMETER Experiment Name: At_100uM_ABA_P Parameter: Organism Value: A. thaliana
  misc_feature: MA Experiment 20000453 PARAMETER Experiment Name: At_100uM_ABA_P Parameter: Plant Line Value: WS
  misc_feature: MA Experiment 20000453 PARAMETER Experiment Name: At_100uM_ABA_P Parameter: Timepoint (hr) Value: 24
  misc_feature: MA Experiment 20000453 PARAMETER Experiment Name: At_100uM_ABA_P Parameter: Tissue Value: Aerial
  misc_feature: MA Experiment 20000453 PARAMETER Experiment Name: At_100uM_ABA_P Parameter: Treatment Value: 100uM ABA vs. No Treatment
  misc_feature: MA Experiment ID: 20000455 Result: Up-regulated in Transcription
  misc_feature: MA Experiment 20000455 PARAMETER Experiment Name: At_100uM_ABA_P Parameter: Age (day) Value: 16
  misc_feature: MA Experiment 20000455 PARAMETER Experiment Name: At_100uM_ABA_P Parameter: Organism Value: A. thaliana
  misc_feature: MA Experiment 20000455 PARAMETER Experiment Name: At_100uM_ABA_P Parameter: Plant Line Value: WS
  misc_feature: MA Experiment 20000455 PARAMETER Experiment Name: At_100uM_ABA_P Parameter: Timepoint (hr) Value: 48
  misc_feature: MA Experiment 20000455 PARAMETER Experiment Name: At_100uM_ABA_P Parameter: Tissue Value: Aerial
  misc_feature: MA Experiment 20000455 PARAMETER Experiment Name: At_100uM_ABA_P Parameter: Treatment Value: 100uM ABA vs. No Treatment
  misc_feature: MA Experiment ID: 20000709 Result: Up-regulated in Transcription
  misc_feature: MA Experiment 20000709 PARAMETER Experiment Name: At_15mM_NH4NO3_L-to-H_P Parameter: Age (hr) Value: 14
  misc_feature: MA Experiment 20000709 PARAMETER Experiment Name: At_15mM_NH4NO3_L-to-H_P Parameter: Organism Value: A. thaliana
  misc_feature: MA Experiment 20000709 PARAMETER Experiment Name: At_15mM_NH4NO3_L-to-H_P Parameter: Plant Line Value: WS
  misc_feature: MA Experiment 20000709 PARAMETER Experiment Name: At_15mM_NH4NO3_L-to-H_P Parameter: Timepoint (hr) Value: 4
  misc_feature: MA Experiment 20000709 PARAMETER Experiment Name: At_15mM_NH4NO3_L-to-H_P Parameter: Tissue Value: Aerial
  misc_feature: MA Experiment 20000709 PARAMETER Experiment Name: At_15mM_NH4NO3_L-to-H_P Parameter: Treatment Value: 15mM NH4NO3 vs. 30mM Mannitol
  misc_feature: MA Experiment ID: 20001247 Result: Up-regulated in Transcription
  misc_feature: MA Experiment 20001247 PARAMETER Experiment Name: At_Far-red-induction_P Parameter: Age (day) Value: 7
  misc_feature: MA Experiment 20001247 PARAMETER Experiment Name: At_Far-red-induction_P Parameter: Light Value: Far-red vs. White
  misc_feature: MA Experiment 20001247 PARAMETER Experiment Name: At_Far-red-induction_P Parameter: Organism Value: A. thaliana
  misc_feature: MA Experiment 20001247 PARAMETER Experiment Name: At_Far-red-induction_P Parameter: Plant Line Value: Columbia
  misc_feature: MA Experiment 20001247 PARAMETER Experiment Name: At_Far-red-induction_P Parameter: Timepoint (hr) Value: 1
  misc_feature: MA Experiment 20001247 PARAMETER Experiment Name: At_Far-red-induction_P Parameter: Tissue Value: Whole Plant
  misc_feature: MA Experiment ID: 20001557 Result: Up-regulated in Transcription
  misc_feature: MA Experiment 20001557 PARAMETER Experiment Name: At_Drought_Soil_Dry_P Parameter: Age (day) Value: 27
  misc_feature: MA Experiment 20001557 PARAMETER Experiment Name: At_Drought_Soil_Dry_P Parameter: Organism Value: A. thaliana
  misc_feature: MA Experiment 20001557 PARAMETER Experiment Name: At_Drought_Soil_Dry_P Parameter: Plant Line Value: WS
  misc_feature: MA Experiment 20001557 PARAMETER Experiment Name: At_Drought_Soil_Dry_P Parameter: Post Timepoint (hr) Value: 3
  misc_feature: MA Experiment 20001557 PARAMETER Experiment Name: At_Drought_Soil_Dry_P Parameter: Post-Treatment Value: Re-Water vs. No Drought
  misc_feature: MA Experiment 20001557 PARAMETER Experiment Name: At_Drought_Soil_Dry_P Parameter: Timepoint (day) Value: 13
  misc_feature: MA Experiment 20001557 PARAMETER Experiment Name: At_Drought_Soil_Dry_P Parameter: Treatment Value: Drought vs. No Drought
  misc_feature: MA Experiment ID: 20001905 Result: Up-regulated in Transcription
  misc_feature: MA Experiment 20001905 PARAMETER Experiment Name: At_Drought_Reproduction_P Parameter: Age (day) Value: 40
  misc_feature: MA Experiment 20001905 PARAMETER Experiment Name: At_Drought_Reproduction_P Parameter: Organism Value: A. thaliana
  misc_feature: MA Experiment 20001905 PARAMETER Experiment Name: At_Drought_Reproduction_P Parameter: Plant Line Value: WS
  misc_feature: MA Experiment 20001905 PARAMETER Experiment Name: At_Drought_Reproduction_P Parameter: Timepoint (day) Value: 10
  misc_feature: MA Experiment 20001905 PARAMETER Experiment Name: At_Drought_Reproduction_P Parameter: Tissue Value: Rosettes
  misc_feature: MA Experiment 20001905 PARAMETER Experiment Name: At_Drought_Reproduction_P Parameter: Treatment Value: Drought vs. No Drought
  misc_feature: MA Experiment ID: 20001910 Result: Up-regulated in Transcription
  misc_feature: MA Experiment 20001910 PARAMETER Experiment Name: At_Drought_Reproduction_P Parameter: Age (day) Value: 37
  misc_feature: MA Experiment 20001910 PARAMETER Experiment Name: At_Drought_Reproduction_P Parameter: Organism Value: A. thaliana
  misc_feature: MA Experiment 20001910 PARAMETER Experiment Name: At_Drought_Reproduction_P Parameter: Plant Line Value: WS
  misc_feature: MA Experiment 20001910 PARAMETER Experiment Name: At_Drought_Reproduction_P Parameter: Timepoint (day) Value: 7
  misc_feature: MA Experiment 20001910 PARAMETER Experiment Name: At_Drought_Reproduction_P Parameter: Tissue Value: Flowers
  misc_feature: MA Experiment 20001910 PARAMETER Experiment Name: At_Drought_Reproduction_P Parameter: Treatment Value: Drought vs. No Drought
ctattcgtcgtaataataaaaacacaactcaaacgattcacgggtttcacttggaatcgtttggttttctcatttccgaaatataaaaagatggccaaagcgccaccgtcaatctctcttctcctcctcctctgcgccgccgtattcctcaccatccccgccgtgatctccgccatcggtgttaactacggaactctcggaaacctcccaccaccgactcaggtggctaactttatcaagacacaaacttcgattgatagcgtcaagatcttcgatgtgaatcccgatatcctacgtgccttcgctggaactggtatctccgtcgttgtcaccgttcctaacggtgatattccggcgttggctaacggaagacaagctcgtcggtgggtttcggttaacattttgccgtttcatcctcagacgaagattaagtatatctcagtcggaaatgagattctgctcaccggagataataacatgatcaataatctcttaccggcgatgaggaatcttaacaacgctttggttcgtgctggtgtcagagatgttaaggttacaaccgcacactcacttaacatcatagcctatgacctgaccggtgcaccaagcagcggtagattcaggccgggttgggacaaaggcatattggctccaatcctagcttaccatcgccgaaccaagtcacctttcatggttaacccgtacccttactttggttttgaccccaaaaacgtcaacttcgcaattttccgaacaccgtacaaggcagtccgtgacccgttcacccgccacgtctacaccaacatgtttgatgcactcatggactcgacatactcagccatgaaagctcttggatacggtgatgttaacattgtcgttggcgagactggctggccatctgcttgtgacgcaccttggtgctcgcctgcgaatgctgcttggttcaacctcaacattatcaaacgtgcacaaggccaagggacacctctcatgcctaacagacggttcgagacatacattttcggtctcttcaacgaagaaggcaaacccggtccgaccgcagagcgtaactggggacttttccgagcagatttctccccggtttacgatgttggtcttctccgaaacggacaaggcggtggaggccgcccagcattgcccgcacctagtactgccggcggtaaatggtgtgtagcgaggtccggggcgacgaatactcagctgcaagacagtattaattgggtgtgtggtcagggtgttgactgtaaaccgatccaagctggtggttcgtgctttaacccgagcagtttgaggacgcacgcatcttttgttatgaatgcttatttccagagccacggccgcactgatggtgcttgtaacttcagtggaactggtatgatcgtagggaacaacccaagcaatggtgcatgtaagtactaaggagattgtctatgtagtagtatttgtctggaaaatcctaacataatggttctgaggaactttggatttgagagatcatcagctttgtgtttaatttcggattatcctaattttaagatttttttgttaattattttttcgctgattccttttatttaaataaagtggaacttccataaaatttgcttcagcgttacgctt

SEQ ID NO: 103760 - protein, 479 aa, Arabidopsis thaliana
  peptide (1)..(479): Ceres Seq. ID no. 13613501
  misc_feature (59)..(373): Pfam Name: Glycosyl hydrolases family 17 Pfam Description: Glycosyl hydrolases family 17
  misc_feature (31)..(479): Homolog of NCBI NO: 15233271 NR Description: glycosyl hydrolase family 17 (beta-1,3-glucanase)
  misc_feature (31)..(479): Homolog of NCBI NO: 21617932 NR Description: beta-1,3-glucanase-like protein [Arabidopsis
  misc_feature (31)..(479): Homolog of NCBI NO: 15028379 NR Description: putative beta-1,3-glucanase [Arabidopsis thaliana]
  misc_feature (31)..(477): Homolog of NCBI NO: 15225516 NR Description: glycosyl hydrolase family 17 [Arabidopsis
  misc_feature (31)..(478): Homolog of NCBI NO: 11279328 NR Description: glucan endo-1,3-beta-D-glucosidase (EC 3.2.1.39)
  misc_feature (36)..(479): Homolog of NCBI NO: 1706551 NR Description: GLUCAN ENDO-1,3-BETA-GLUCOSIDASE PRECURSOR
  misc_feature (43)..(394): Homolog of NCBI NO: 13548679 NR Description: endo-1,3-beta-glucanase-like protein [Pyrus
  misc_feature (31)..(479): Homolog of NCBI NO: 14279169 NR Description: beta-1,3-glucanase-like protein [Olea europaea]
  misc_feature (37)..(473): Homolog of NCBI NO: 15226720 NR Description: glycosyl hydrolase family 17 [Arabidopsis
  misc_feature (38)..(479): Homolog of NCBI NO: 31126737 NR Description: putative beta 1,3-glucanase [Oryza sativa
LFVVIIKTQLKRFTGFTWNRLVFSFPKYKKMAKAPPSISLLLLLCAAVFLTIPAVISAIGVNYGTLGNLPPPTQVANFIKTQTSIDSVKIFDVNPDILRAFAGTGISVVVTVPNGDIPALANGRQARRWVSVNILPFHPQTKIKYISVGNEILLTGDNNMINNLLPAMRNLNNALVRAGVRDVKVTTAHSLNIIAYDLTGAPSSGRFRPGWDKGILAPILAYHRRTKSPFMVNPYPYFGFDPKNVNFAIFRTPYKAVRDPFTRHVYTNMFDALMDSTYSAMKALGYGDVNIVVGETGWPSACDAPWCSPANAAWFNLNIIKRAQGQGTPLMPNRRFETYIFGLFNEEGKPGPTAERNWGLFRADFSPVYDVGLLRNGQGGGGRPALPAPSTAGGKWCVARSGATNTQLQDSINWVCGQGVDCKPIQAGGSCFNPSSLRTHASFVMNAYFQSHGRTDGACNFSGTGMIVGNNPSNGACKY

SEQ ID NO: 103761 - protein, 449 aa, Arabidopsis thaliana; identical to SEQ ID NO: 28203
  peptide (1)..(449): Ceres Seq. ID no. 13613502
  misc_feature (29)..(343): Pfam Name: Glycosyl hydrolases family 17 Pfam Description: Glycosyl hydrolases family 17
  misc_feature (1)..(449): Homolog of NCBI NO: 15233271 NR Description: glycosyl hydrolase family 17 (beta-1,3-glucanase)
  misc_feature (1)..(449): Homolog of NCBI NO: 21617932 NR Description: beta-1,3-glucanase-like protein [Arabidopsis
  misc_feature (1)..(449): Homolog of NCBI NO: 15028379 NR Description: putative beta-1,3-glucanase [Arabidopsis thaliana]
  misc_feature (1)..(447): Homolog of NCBI NO: 15225516 NR Description: glycosyl hydrolase family 17 [Arabidopsis
  misc_feature (1)..(448): Homolog of NCBI NO: 11279328 NR Description: glucan endo-1,3-beta-D-glucosidase (EC 3.2.1.39)
  misc_feature (6)..(449): Homolog of NCBI NO: 1706551 NR Description: GLUCAN ENDO-1,3-BETA-GLUCOSIDASE PRECURSOR
  misc_feature (13)..(364): Homolog of NCBI NO: 13548679 NR Description: endo-1,3-beta-glucanase-like protein [Pyrus
  misc_feature (1)..(449): Homolog of NCBI NO: 14279169 NR Description: beta-1,3-glucanase-like protein [Olea europaea]
  misc_feature (7)..(443): Homolog of NCBI NO: 15226720 NR Description: glycosyl hydrolase family 17 [Arabidopsis
  misc_feature (8)..(449): Homolog of NCBI NO: 31126737 NR Description: putative beta 1,3-glucanase [Oryza sativa

SEQ ID NO: 103762 - protein, 320 aa, Arabidopsis thaliana; identical to SEQ ID NO: 28204
  peptide (1)..(320): Ceres Seq. ID no. 13613503
  misc_feature (1)..(214): Pfam Name: Glycosyl hydrolases family 17 Pfam Description: Glycosyl hydrolases family 17
  misc_feature (1)..(320): Homolog of NCBI NO: 15233271 NR Description: glycosyl hydrolase family 17 (beta-1,3-glucanase)
  misc_feature (1)..(320): Homolog of NCBI NO: 21617932 NR Description: beta-1,3-glucanase-like protein [Arabidopsis
  misc_feature (1)..(320): Homolog of NCBI NO: 15028379 NR Description: putative beta-1,3-glucanase [Arabidopsis thaliana]
  misc_feature (1)..(318): Homolog of NCBI NO: 15225516 NR Description: glycosyl hydrolase family 17 [Arabidopsis
  misc_feature (1)..(319): Homolog of NCBI NO: 11279328 NR Description: glucan endo-1,3-beta-D-glucosidase (EC 3.2.1.39)
  misc_feature (1)..(320): Homolog of NCBI NO: 1706551 NR Description: GLUCAN ENDO-1,3-BETA-GLUCOSIDASE PRECURSOR
  misc_feature (1)..(235): Homolog of NCBI NO: 13548679 NR Description: endo-1,3-beta-glucanase-like protein [Pyrus
  misc_feature (1)..(320): Homolog of NCBI NO: 14279169 NR Description: beta-1,3-glucanase-like protein [Olea europaea]
  misc_feature (1)..(314): Homolog of NCBI NO: 15226720 NR Description: glycosyl hydrolase family 17 [Arabidopsis
  misc_feature (1)..(320): Homolog of NCBI NO: 31126737 NR Description: putative beta 1,3-glucanase [Oryza sativa

SEQ ID NO: 103763 - DNA, 1392 bp, Arabidopsis thaliana
  misc_feature (1)..(1392): Ceres Seq. ID no. 13613511
  misc_feature: MA Experiment ID: 108573 Result: Up-regulated in Transcription
  misc_feature: MA Experiment 108573 PARAMETER Experiment Name: At_Drought_cDNA_P Parameter: Timepoint (hr) Value: 6
  misc_feature: MA Experiment 108573 PARAMETER Experiment Name: At_Drought_cDNA_P Parameter: Tissue Value: Aerial
  misc_feature: MA Experiment 108573 PARAMETER Experiment Name: At_Drought_cDNA_P Parameter: Treatment Value: Drought vs. No Drought
  misc_feature: MA Experiment ID: 108574 Result: Up-regulated in Transcription
  misc_feature: MA Experiment 108574 PARAMETER Experiment Name: At_Wounding__cDNA_P Parameter: Timepoint (hr) Value: 1
  misc_feature: MA Experiment 108574 PARAMETER Experiment Name: At_Wounding__cDNA_P Parameter: Tissue Value: Aerial
  misc_feature: MA Experiment 108574 PARAMETER Experiment Name: At_Wounding__cDNA_P Parameter: Treatment Value: Wounding vs. No Wounding
  misc_feature: MA Experiment ID: 108585 Result: Up-regulated in Transcription
  misc_feature: MA Experiment 108585 PARAMETER Experiment Name: At_5mM_NaNP_cDNA_P Parameter: Timepoint (hr) Value: 6
  misc_feature: MA Experiment 108585 PARAMETER Experiment Name: At_5mM_NaNP_cDNA_P Parameter: Tissue Value: Aerial
  misc_feature: MA Experiment 108585 PARAMETER Experiment Name: At_5mM_NaNP_cDNA_P Parameter: Treatment Value: null
  misc_feature: MA Experiment ID: 108607 Result: Up-regulated in Transcription
  misc_feature: MA Experiment 108607 PARAMETER Experiment Name: At_100uM_ABA_cDNA_P Parameter: Timepoint (hr) Value: 4
  misc_feature: MA Experiment 108607 PARAMETER Experiment Name: At_100uM_ABA_cDNA_P Parameter: Tissue Value: Aerial
  misc_feature: MA Experiment 108607 PARAMETER Experiment Name: At_100uM_ABA_cDNA_P Parameter: Treatment Value: 100uM ABA vs. No Treatment
  misc_feature: MA Experiment ID: 20000072 Result: Up-regulated in Transcription
  misc_feature: MA Experiment 20000072 PARAMETER Experiment Name: At_100uM_ABA_Mutants_cDNA_P Parameter: Plant Line Value: CS8105
  misc_feature: MA Experiment 20000072 PARAMETER Experiment Name: At_100uM_ABA_Mutants_cDNA_P Parameter: Timepoint (hr) Value: 6
  misc_feature: MA Experiment 20000072 PARAMETER Experiment Name: At_100uM_ABA_Mutants_cDNA_P Parameter: Tissue Value: Aerial
  misc_feature: MA Experiment 20000072 PARAMETER Experiment Name: At_100uM_ABA_Mutants_cDNA_P Parameter: Treatment Value: 100uM ABA vs. No Treatment
  misc_feature: MA Experiment ID: 20000315 Result: Down-regulated in Transcription
  misc_feature: MA Experiment 20000315 PARAMETER Experiment Name: At_14day_Shoots-Roots_Sub_P Parameter: Age (day) Value: 14
  misc_feature: MA Experiment 20000315 PARAMETER Experiment Name: At_14day_Shoots-Roots_Sub_P Parameter: Organism Value: A. thaliana
  misc_feature: MA Experiment 20000315 PARAMETER Experiment Name: At_14day_Shoots-Roots_Sub_P Parameter: Plant Line Value: WS
  misc_feature: MA Experiment 20000315 PARAMETER Experiment Name: At_14day_Shoots-Roots_Sub_P Parameter: Tissue Value: Shoots vs. Whole Plant
  misc_feature: MA Experiment ID: 20000328 Result: Down-regulated in Transcription
  misc_feature: MA Experiment 20000328 PARAMETER Experiment Name: At_42deg_Heat_Sub_P Parameter: Age (day) Value: 14
  misc_feature: MA Experiment 20000328 PARAMETER Experiment Name: At_42deg_Heat_Sub_P Parameter: Organism Value: A. thaliana
  misc_feature: MA Experiment 20000328 PARAMETER Experiment Name: At_42deg_Heat_Sub_P Parameter: Plant Line Value: WS
  misc_feature: MA Experiment 20000328 PARAMETER Experiment Name: At_42deg_Heat_Sub_P Parameter: Temperature (deg C) Value: 42 vs. 22
  misc_feature: MA Experiment 20000328 PARAMETER Experiment Name: At_42deg_Heat_Sub_P Parameter: Timepoint (hr) Value: 6
  misc_feature: MA Experiment 20000328 PARAMETER Experiment Name: At_42deg_Heat_Sub_P Parameter: Tissue Value: Aerial
agacgagaggcacacaaaaagagatacaaaaccaaaactttcaagcaaagcaattcaatttcaatcaaaaaccaaatcgaagatctttgaaagtttcctttttttccgaaatctgagcttgggtattgttggataagcttctcggagattgagattgaggattttgataggtgaggagattgaaagatttggatttttgggcggcaaaaatggtgatgcagacggaagctagggttggtgtgagctcaggacatggcgtagcttcgtcttctcatcgtttaacgcaggaccagagatcacatatcgaatcggcgtcgcagctcttagccggaggactcgctggtgcttttagcaagacttgtactgctcctctatctcgtctcaccattctcttccaggtgcaaggtatgcacacaaatgctgcagctttaagaaagccaagcatattacacgaggcttcacggatattgaatgaagaaggattgaaagctttttggaaagggaatctagttactattgctcaccggcttccatattcttctgttaatttctacgcatatgaacactacaagaagttcatgtatatggttactgggatggaaaatcacaaggagggtataagttcaaacctttttgtacattttgtagccggtggtttggctggaatcacagctgcttctgccacttatccacttgatcttgttagaactcgtcttgctgctcagacaaaagtaatctactactcgggtatctggcatactctgcgctctattacaaccgatgaaggtatcttgggcctctacaagggactaggaacaacgcttgtgggtgttgggcctagtattgccattagcttttctgtgtatgaatcattgagatcttattggaggtcaactaggccccatgattcccctatcatggtcagtctagcttgtggaagtctttcaggaatagcatcttcaacagctacgtttccattggatctggtgagaagaaggaagcagctggaaggaataggcgggcgagcggtagtgtacaagacaggtttgttaggcacattaaagcgtattgttcaaacggaaggagcgagaggcctgtacagaggaattcttccagagtactacaaagtggtacctggtgtagggatttgcttcatgacctacgagacactcaagctttacttcaaggatctttcttcgaatctataacggtttaaaaggttggtagatttgtttaggtctatttttggtgagaggaaaaaaactgtaaaaaccaaacagcggaaaatgataatgtatacgaaatgtagaattatatatgtagttgttggatgtagcttatacgagattaacatttgtattggtacaatccttttccattgttacatggctt

SEQ ID NO: 103764 - protein, 332 aa, Arabidopsis thaliana; identical to SEQ ID NO: 36967
  peptide (1)..(332): Ceres Seq. ID no. 13613512
  misc_feature (1)..(332): Homolog of NCBI NO: 15228163 NR Description: mitochondrial carrier protein family [Arabidopsis
  misc_feature (3)..(332): Homolog of NCBI NO: 21554682 NR Description: Ca-dependent solute carrier-like protein
  misc_feature (1)..(322): Homolog of NCBI NO: 22331775 NR Description: mitochondrial carrier protein family [Arabidopsis >gi|17064804|gb|AAL32556.1| putative protein [Arabidopsis >gi|20259828|gb|AAM13261.1| putative protein [Arabidopsis
  misc_feature (38)..(331): Homolog of NCBI NO: 34902034 NR Description: putative peroxisomal Ca-dependent solute carrier
  misc_feature (1)..(322): Homolog of NCBI NO: 11277067 NR Description: hypothetical protein F5K20.240 - Arabidopsis >gi|7630014|emb|CAB88356.1| putative protein [Arabidopsis
  misc_feature (3)..(322): Homolog of NCBI NO: 30687297 NR Description: mitochondrial carrier protein family [Arabidopsis >gi|22135876|gb|AAM91520.1| putative mitochondrial carrier [Arabidopsis thaliana] >gi|23197668|gb|AAN15361.1| putative
  misc_feature (3)..(322): Homolog of NCBI NO: 34895726 NR Description: putative peroxisomal Ca-dependent solute carrier
  misc_feature (3)..(322): Homolog of NCBI NO: 25295875 NR Description: probable mitochondrial carrier protein [imported]
  misc_feature (1)..(268): Homolog of NCBI NO: 15234063 NR Description: mitochondrial carrier protein family [Arabidopsis
  misc_feature (236)..(322): Homolog of NCBI NO: 15234063 NR Description: mitochondrial carrier protein family [Arabidopsis

SEQ ID NO: 103765 - protein, 330 aa, Arabidopsis thaliana; identical to SEQ ID NO: 36968
  peptide (1)..(330): Ceres Seq. ID no. 13613513
  misc_feature (1)..(330): Homolog of NCBI NO: 15228163 NR Description: mitochondrial carrier protein family [Arabidopsis
  misc_feature (1)..(330): Homolog of NCBI NO: 21554682 NR Description: Ca-dependent solute carrier-like protein
  misc_feature (1)..(320): Homolog of NCBI NO: 22331775 NR Description: mitochondrial carrier protein family [Arabidopsis >gi|17064804|gb|AAL32556.1| putative protein [Arabidopsis >gi|20259828|gb|AAM13261.1| putative protein [Arabidopsis
  misc_feature (36)..(329): Homolog of NCBI NO: 34902034 NR Description: putative peroxisomal Ca-dependent solute carrier
  misc_feature (1)..(320): Homolog of NCBI NO: 11277067 NR Description: hypothetical protein F5K20.240 - Arabidopsis >gi|7630014|emb|CAB88356.1| putative protein [Arabidopsis
  misc_feature (1)..(320): Homolog of NCBI NO: 30687297 NR Description: mitochondrial carrier protein family [Arabidopsis >gi|22135876|gb|AAM91520.1| putative mitochondrial carrier [Arabidopsis thaliana] >gi|23197668|gb|AAN15361.1| putative
  misc_feature (1)..(320): Homolog of NCBI NO: 34895726 NR Description: putative peroxisomal Ca-dependent solute carrier
  misc_feature (1)..(320): Homolog of NCBI NO: 25295875 NR Description: probable mitochondrial carrier protein [imported]
  misc_feature (1)..(266): Homolog of NCBI NO: 15234063 NR Description: mitochondrial carrier protein family [Arabidopsis
  misc_feature (234)..(320): Homolog of NCBI NO: 15234063 NR Description: mitochondrial carrier protein family [Arabidopsis

SEQ ID NO: 103766 - protein, 266 aa, Arabidopsis thaliana; identical to SEQ ID NO: 36969
  peptide (1)..(266): Ceres Seq. ID no. 13613514
  misc_feature (1)..(266): Homolog of NCBI NO: 15228163 NR Description: mitochondrial carrier protein family [Arabidopsis
  misc_feature (1)..(266): Homolog of NCBI NO: 21554682 NR Description: Ca-dependent solute carrier-like protein
  misc_feature (1)..(256): Homolog of NCBI NO: 22331775 NR Description: mitochondrial carrier protein family [Arabidopsis >gi|17064804|gb|AAL32556.1| putative protein [Arabidopsis >gi|20259828|gb|AAM13261.1| putative protein [Arabidopsis
  misc_feature (1)..(265): Homolog of NCBI NO: 34902034 NR Description: putative peroxisomal Ca-dependent solute carrier
  misc_feature (1)..(256): Homolog of NCBI NO: 11277067 NR Description: hypothetical protein F5K20.240 - Arabidopsis >gi|7630014|emb|CAB88356.1| putative protein [Arabidopsis
  misc_feature (1)..(256): Homolog of NCBI NO: 30687297 NR Description: mitochondrial carrier protein family [Arabidopsis >gi|22135876|gb|AAM91520.1| putative mitochondrial carrier [Arabidopsis thaliana] >gi|23197668|gb|AAN15361.1| putative
  misc_feature (1)..(256): Homolog of NCBI NO: 34895726 NR Description: putative peroxisomal Ca-dependent solute carrier
  misc_feature (1)..(256): Homolog of NCBI NO: 25295875 NR Description: probable mitochondrial carrier protein [imported]
  misc_feature (1)..(202): Homolog of NCBI NO: 15234063 NR Description: mitochondrial carrier protein family [Arabidopsis
  misc_feature (170)..(256): Homolog of NCBI NO: 15234063 NR Description: mitochondrial carrier protein family [Arabidopsis

SEQ ID NO: 103767 - DNA, 1271 bp, Arabidopsis thaliana
  misc_feature (1)..(1271): Ceres Seq. ID no. 13613515
  misc_feature: MA Experiment ID: 20000113 Result: Up-regulated in Transcription
  misc_feature: MA Experiment 20000113 PARAMETER Experiment Name: At_42deg_Heat_cDNA_P Parameter: Temperature (deg C) Value: 42 vs. 22
  misc_feature: MA Experiment 20000113 PARAMETER Experiment Name: At_42deg_Heat_cDNA_P Parameter: Timepoint (hr) Value: 8
  misc_feature: MA Experiment 20000113 PARAMETER Experiment Name: At_42deg_Heat_cDNA_P Parameter: Tissue Value: Aerial
  misc_feature: MA Experiment ID: 20000437 Result: Up-regulated in Transcription
  misc_feature: MA Experiment 20000437 PARAMETER Experiment Name: At_Drought_P Parameter: Age (day) Value: 8
  misc_feature: MA Experiment 20000437 PARAMETER Experiment Name: At_Drought_P Parameter: Organism Value: A. thaliana
  misc_feature: MA Experiment 20000437 PARAMETER Experiment Name: At_Drought_P Parameter: Plant Line Value: WS
  misc_feature: MA Experiment 20000437 PARAMETER Experiment Name: At_Drought_P Parameter: Timepoint (hr) Value: 24
  misc_feature: MA Experiment 20000437 PARAMETER Experiment Name: At_Drought_P Parameter: Tissue Value: Whole Plant
  misc_feature: MA Experiment 20000437 PARAMETER Experiment Name: At_Drought_P Parameter: Treatment Value: Drought vs. No Drought
  misc_feature: MA Experiment ID: 20001905 Result: Up-regulated in Transcription
  misc_feature: MA Experiment 20001905 PARAMETER Experiment Name: At_Drought_Reproduction_P Parameter: Age (day) Value: 40
  misc_feature: MA Experiment 20001905 PARAMETER Experiment Name: At_Drought_Reproduction_P Parameter: Organism Value: A. thaliana
  misc_feature: MA Experiment 20001905 PARAMETER Experiment Name: At_Drought_Reproduction_P Parameter: Plant Line Value: WS
  misc_feature: MA Experiment 20001905 PARAMETER Experiment Name: At_Drought_Reproduction_P Parameter: Timepoint (day) Value: 10
  misc_feature: MA Experiment 20001905 PARAMETER Experiment Name: At_Drought_Reproduction_P Parameter: Tissue Value: Rosettes
  misc_feature: MA Experiment 20001905 PARAMETER Experiment Name: At_Drought_Reproduction_P Parameter: Treatment Value: Drought vs. No Drought
cctttcccaattgcttccacgacgacggaggaggagaagcaaacccagaaaccttaaaaattcagaaaaagggacgaccttttttccgatcttatcgatttttgaatgagattagaagaacctatcttctaagtttttctttgatatctttttctctttgatcgatggatgagtcgttcgctaatctacaatcaagccatttgcttggttcagttccggctgtgatcagcgacgacaagagaagcacaaatgtaccaatagcaagcgtcaatgaaggcccttctgcaagcatgcaaatatttccaccgaatctaggaaacaatacaaagggttatcaaactcttgagagcccaacagaaggaccagcacaacagccatcaaacaactggaagggcttttttaatgtctactcatatacccaatacttcgacgtggacacggacgttgttttgaacagattaatgagctctttatatcctactagtggagattttttcaacaagattgatgcaaaccctgatttgtatggacttgtctggatctgcactacgcttgtgtttgtgcttgcttctctcggaaattgtgctacatatctcgtgaagaaacgaaccgacagtaatgctccttggatctttgatgtgaactatatgaatttggcagcatctataatatatggatatgcaataattgtgcctctgggattttattttgcactccgttatatggggtccaaagctgatcttctaagattctggtgcctttggggatactctctcttcattttcgttccaacctctcttccattgcttattccagtagagtttctgagatgggtgattatactcttagctggtagtgcatcatcgtgttttgttgccctgaatctacggtcttacctcgagacgaacaatgatatcacggttgtaatggctgcagcatttggtctgcaaatggttctttcaatcttcatcaaggtctggttctttccttaatctccatgagacggtcaacaccagacaaaacatatatatgtaaaaacctttagattttgatgtgctgcggtagaactaagaatgtcgttaccagaaaatgaaacccacaaagtagaagaaggaacatatccgctaaatcattcggtttcgtttttactggcggattttcatcgttgcttgtaacgattgtgttttttcattttttggttttgtttgctaccacttattttgcttatggagtaaaaatatataaaagaaaaaaaggaagttttcaagatt

SEQ ID NO: 103768 - protein, 275 aa, Arabidopsis thaliana; identical to SEQ ID NO: 43356
  peptide (1)..(275): Ceres Seq. ID no. 13613516
  misc_feature (88)..(253): Pfam Name: Yip1 domain Pfam Description: Yip1 domain
  misc_feature (1)..(275): Homolog of NCBI NO: 30688039 NR Description: expressed protein [Arabidopsis thaliana] unknown protein [Arabidopsis thaliana]
  misc_feature (4)..(274): Homolog of NCBI NO: 30690667 NR Description: expressed protein [Arabidopsis thaliana]
  misc_feature (4)..(274): Homolog of NCBI NO: 38564308 NR Description: At5g27490 [Arabidopsis thaliana]
  misc_feature (4)..(274): Homolog of NCBI NO: 6729038 NR Description: unknown protein [Arabidopsis thaliana]
  misc_feature (4)..(274): Homolog of NCBI NO: 30679454 NR Description: expressed protein [Arabidopsis thaliana] unknown protein [Arabidopsis thaliana]
  misc_feature (75)..(274): Homolog of NCBI NO: 34912560 NR Description: P0410E03.18 [Oryza sativa (japonica
  misc_feature (84)..(274): Homolog of NCBI NO: 32408303 NR Description: hypothetical protein [Neurospora crassa]
  misc_feature (78)..(274): Homolog of NCBI NO: 10092643 NR Description: hypothetical protein DJ167A19.1 [Homo sapiens]
  misc_feature (27)..(274): Homolog of NCBI NO: 40786465 NR Description: similar to RIKEN cDNA C030002N13 [Rattus >gi|38328251|gb|AAH62239.1| Similar to RIKEN cDNA C030002N13
  misc_feature (27)..(274): Homolog of NCBI NO: 21704084 NR Description: RIKEN cDNA C030002N13 [Mus musculus] RIKEN cDNA C030002N13 [Mus musculus] >gi|26349047|dbj|BAC38163.1|

SEQ ID NO: 103769 - protein, 233 aa, Arabidopsis thaliana; identical to SEQ ID NO: 43357
  peptide (1)..(233): Ceres Seq. ID no. 13613517
  misc_feature (46)..(211): Pfam Name: Yip1 domain Pfam Description: Yip1 domain
  misc_feature (1)..(233): Homolog of NCBI NO: 30688039 NR Description: expressed protein [Arabidopsis thaliana] unknown protein [Arabidopsis thaliana]
  misc_feature (1)..(232): Homolog of NCBI NO: 30690667 NR Description: expressed protein [Arabidopsis thaliana]
  misc_feature (1)..(232): Homolog of NCBI NO: 38564308 NR Description: At5g27490 [Arabidopsis thaliana]
  misc_feature (1)..(232): Homolog of NCBI NO: 6729038 NR Description: unknown protein [Arabidopsis thaliana]
  misc_feature (1)..(232): Homolog of NCBI NO: 30679454 NR Description: expressed protein [Arabidopsis thaliana] unknown protein [Arabidopsis thaliana]
  misc_feature (33)..(232): Homolog of NCBI NO: 34912560 NR Description: P0410E03.18 [Oryza sativa (japonica
  misc_feature (42)..(232): Homolog of NCBI NO: 32408303 NR Description: hypothetical protein [Neurospora crassa]
  misc_feature (36)..(232): Homolog of NCBI NO: 10092643 NR Description: hypothetical protein DJ167A19.1 [Homo sapiens]
  misc_feature (1)..(232): Homolog of NCBI NO: 40786465 NR Description: similar to RIKEN cDNA C030002N13 [Rattus >gi|38328251|gb|AAH62239.1| Similar to RIKEN cDNA C030002N13
  misc_feature (1)..(232): Homolog of NCBI NO: 21704084 NR Description: RIKEN cDNA C030002N13 [Mus musculus] RIKEN cDNA C030002N13 [Mus musculus] >gi|26349047|dbj|BAC38163.1|

SEQ ID NO: 103770 - protein, 176 aa, Arabidopsis thaliana; identical to SEQ ID NO: 43358
  peptide (1)..(176): Ceres Seq. ID no. 13613518
  misc_feature (1)..(154): Pfam Name: Yip1 domain Pfam Description: Yip1 domain
  misc_feature (1)..(176): Homolog of NCBI NO: 30688039 NR Description: expressed protein [Arabidopsis thaliana] unknown protein [Arabidopsis thaliana]
  misc_feature (1)..(175): Homolog of NCBI NO: 30690667 NR Description: expressed protein [Arabidopsis thaliana]
  misc_feature (1)..(175): Homolog of NCBI NO: 38564308 NR Description: At5g27490 [Arabidopsis thaliana]
  misc_feature (1)..(175): Homolog of NCBI NO: 6729038 NR Description: unknown protein [Arabidopsis thaliana]
  misc_feature (1)..(175): Homolog of NCBI NO: 30679454 NR Description: expressed protein [Arabidopsis thaliana] unknown protein [Arabidopsis thaliana]
  misc_feature (1)..(175): Homolog of NCBI NO: 34912560 NR Description: P0410E03.18 [Oryza sativa (japonica
  misc_feature (1)..(175): Homolog of NCBI NO: 32408303 NR Description: hypothetical protein [Neurospora crassa]
  misc_feature (1)..(175): Homolog of NCBI NO: 10092643 NR Description: hypothetical protein DJ167A19.1 [Homo sapiens]
  misc_feature (1)..(175): Homolog of NCBI NO: 40786465 NR Description: similar to RIKEN cDNA C030002N13 [Rattus >gi|38328251|gb|AAH62239.1| Similar to RIKEN cDNA C030002N13
  misc_feature (1)..(175): Homolog of NCBI NO: 21704084 NR Description: RIKEN cDNA C030002N13 [Mus musculus] RIKEN cDNA C030002N13 [Mus musculus] >gi|26349047|dbj|BAC38163.1|

SEQ ID NO: 103771 - DNA, 1723 bp, Arabidopsis thaliana
  misc_feature (1)..(1723): Ceres Seq. ID no. 13613523
  misc_feature: MA Experiment ID: 108434 Result: Down-regulated in Transcription
  misc_feature: MA Experiment 108434 PARAMETER Experiment Name: At_Root_Tips_cDNA_P Parameter: Tissue Value: Root Tips
  misc_feature: MA Experiment ID: 108462 Result: Down-regulated in Transcription
  misc_feature: MA Experiment 108462 PARAMETER Experiment Name: At_Germinating_Seeds_cDNA_P Parameter: Age (day) Value: 2 vs. 0
  misc_feature: MA Experiment 108462 PARAMETER Experiment Name: At_Germinating_Seeds_cDNA_P Parameter: Tissue Value: Germinating Seeds
  misc_feature: MA Experiment ID: 108463 Result: Down-regulated in Transcription
  misc_feature: MA Experiment 108463 PARAMETER Experiment Name: At_Germinating_Seeds_cDNA_P Parameter: Age (day) Value: 3 vs. 0
  misc_feature: MA Experiment 108463 PARAMETER Experiment Name: At_Germinating_Seeds_cDNA_P Parameter: Tissue Value: Germinating Seeds
  misc_feature: MA Experiment ID: 108464 Result: Down-regulated in Transcription
  misc_feature: MA Experiment 108464 PARAMETER Experiment Name: At_Germinating_Seeds_cDNA_P Parameter: Age (day) Value: 4 vs. 0
  misc_feature: MA Experiment 108464 PARAMETER Experiment Name: At_Germinating_Seeds_cDNA_P Parameter: Tissue Value: Germinating Seeds
  misc_feature: MA Experiment ID: 108488 Result: Down-regulated in Transcription
  misc_feature: MA Experiment ID: 108573 Result: Up-regulated in Transcription
  misc_feature: MA Experiment 108573 PARAMETER Experiment Name: At_Drought_cDNA_P Parameter: Timepoint (hr) Value: 6
  misc_feature: MA Experiment 108573 PARAMETER Experiment Name: At_Drought_cDNA_P Parameter: Tissue Value: Aerial
  misc_feature: MA Experiment 108573 PARAMETER Experiment Name: At_Drought_cDNA_P Parameter: Treatment Value: Drought vs. No Drought
  misc_feature: MA Experiment ID: 108594 Result: Down-regulated in Transcription
  misc_feature: MA Experiment 108594 PARAMETER Experiment Name: At_Ler-rhl_Root_cDNA_P Parameter: Plant Line Value: null
  misc_feature: MA Experiment ID: 20000794 Result: Up-regulated in Transcription
  misc_feature: MA Experiment 20000794 PARAMETER Experiment Name: At_Petals_P Parameter: Age (day) Value: 23-25 days
  misc_feature: MA Experiment 20000794 PARAMETER Experiment Name: At_Petals_P Parameter: Plant Line Value: WS
  misc_feature: MA Experiment 20000794 PARAMETER Experiment Name: At_Petals_P Parameter: Tissue Value: Petals vs. Whole plant
  misc_feature: MA Experiment ID: 20001757 Result: Down-regulated in Transcription
  misc_feature: MA Experiment 20001757 PARAMETER Experiment Name: At_50mM_NH4NO3_L-to-H_P Parameter: Timepoint (hr) Value: 6
  misc_feature: MA Experiment 20001757 PARAMETER Experiment Name: At_50mM_NH4NO3_L-to-H_P Parameter: Tissue Value: Leaf
  misc_feature: MA Experiment 20001757 PARAMETER Experiment Name: At_50mM_NH4NO3_L-to-H_P Parameter: Treatment Value: 50mM NH4NO3 vs 100mM Mannitol
  misc_feature: MA Experiment ID: 20001905 Result: Up-regulated in Transcription
  misc_feature: MA Experiment 20001905 PARAMETER Experiment Name: At_Drought_Reproduction_P Parameter: Age (day) Value: 40
  misc_feature: MA Experiment 20001905 PARAMETER Experiment Name: At_Drought_Reproduction_P Parameter: Organism Value: A. thaliana
  misc_feature: MA Experiment 20001905 PARAMETER Experiment Name: At_Drought_Reproduction_P Parameter: Plant Line Value: WS
  misc_feature: MA Experiment 20001905 PARAMETER Experiment Name: At_Drought_Reproduction_P Parameter: Timepoint (day) Value: 10
  misc_feature: MA Experiment 20001905 PARAMETER Experiment Name: At_Drought_Reproduction_P Parameter: Tissue Value: Rosettes
  misc_feature: MA Experiment 20001905 PARAMETER Experiment Name: At_Drought_Reproduction_P Parameter: Treatment Value: Drought vs. No Drought
aacaaattcagacaagaaacctcaacggctcagacccaccaataccaattttttaaagagatttctgtcacaattgcgaatcgagctggattcttgggctcgctttttctttcaatcaaaagtttcgatattagtgaaggataaaattcgctaaaaaaagagaattttttttgttaaaaaaattataaaagctggctttctcaaaatttctccatgtggtcgacgaagaagacgaagaagacgaagaagaaagagaaagtctcttagcaaacatgaccgccaccgaagctaagaatcgcaaaatcaatgtcggagatggagatgacgttgttgatatcgaaatccctgacactgctcatcaaattagcagcgattcatggtttcaggtggcgttcgttttgaccaccggtataaacagcgcgtatgtgttgggatattcaggaacaattatggttcctttaggttggattggtggtgtggttggtcttcttattgctactgcaatctctctttatgcaaacactctaatagctaagcttcatgagtttggtggcagaagacacattcgctatagagaccttgctggattcatttacggtaggaaggcttatcatcttacatggggattgcaatatgttaatcttttcatgattaattgtggattcattatcctagctggttccgccttaaaggctgtttatgtgcttttcagggatgatcataccatgaaactacctcattttatagccattgctggtttgatttgtgcgattttcgctattgggattcctcatttatcggctcttggggtctggcttggagtttcgaccttcctcagtctcatctatattgttgtggcaatcgtgctatcggttagagatggagtaaaaacaccttcaagagattacgagatacaaggatcatcattgagcaaactttttaccatcacaggagcagccgcaaatctggttttcgcattcaacaccgggatgcttccagaaattcaggcaacagtgaggcaaccagttgttaaaaacatgatgaaggctctatactttcaattcacagcgggtgttttaccgatgtacgcagttacattcatcggatattgggcttatggatcctcaacctcgacctatctactaaacagtgttaatggcccactctgggtcaaagcccttgctaacgtctctgctatccttcaatctgttatctctttgcacatatttgcgagtccaacatatgagtacatggacacaaagtatgggatcaaaggaaacccatttgcgataaagaacctgctgtttaggatcatggcgagaggcgggtacatagcggtaagcacgcttatctcagcgctgttgccgttcctcggtgacttcatgagcctaactggtgcagtgagcacattccctctcacattcattctagccaaccacatgtactataaggcaaagaacaataagctgaatgctatgcaaaagctatggcattggcttaacgttgtcttctttagtttgatgtctgttgctgcagccattgcagctgtcagactcatcgccgttgattccaaaaatttccatgtttttgcagatttgtaattcattatattatatagtcaattgtgtatcctttattcttaggcaggtttatttctcctgtaagcttgtattctctctctatttgtcttaccattagagcctaaataaataaatcaagttct

SEQ ID NO: 103772 - protein, 442 aa, Arabidopsis thaliana; identical to SEQ ID NO: 40259
  peptide (1)..(442): Ceres Seq. ID no. 13613524
  misc_feature (1)..(442): Homolog of NCBI NO: 15225591 NR Description: proline transporter 1 (ProT1) [Arabidopsis
  misc_feature (1)..(442): Homolog of NCBI NO: 21593453 NR Description: proline transporter 1 [Arabidopsis thaliana]
  misc_feature (6)..(442): Homolog of NCBI NO: 15228000 NR Description: proline transporter, putative [Arabidopsis
  misc_feature (6)..(442): Homolog of NCBI NO: 21554196 NR Description: putative proline transporter [Arabidopsis
  misc_feature (1)..(442): Homolog of NCBI NO: 15228183 NR Description: proline transporter 2 (ProT2) [Arabidopsis
  misc_feature (17)..(442): Homolog of NCBI NO: 21069018 NR Description: betaine/proline transporter [Avicennia marina]
  misc_feature (17)..(442): Homolog of NCBI NO: 21069020 NR Description: betaine/proline transporter [Avicennia marina]
  misc_feature (22)..(442): Homolog of NCBI NO: 8571474 NR Description: proline/glycine betaine transporter [Atriplex
  misc_feature (17)..(442): Homolog of NCBI NO: 11358950 NR Description: proline transport protein 3 [imported] - tomato
  misc_feature (15)..(442): Homolog of NCBI NO: 11358960 NR Description: proline transport protein [imported] - rice

SEQ ID NO: 103773 - protein, 383 aa, Arabidopsis thaliana; identical to SEQ ID NO: 40260
  peptide (1)..(383): Ceres Seq. ID no. 13613525
  misc_feature (1)..(383): Homolog of NCBI NO: 15225591 NR Description: proline transporter 1 (ProT1) [Arabidopsis
  misc_feature (1)..(383): Homolog of NCBI NO: 21593453 NR Description: proline transporter 1 [Arabidopsis thaliana]
  misc_feature (1)..(383): Homolog of NCBI NO: 15228000 NR Description: proline transporter, putative [Arabidopsis
  misc_feature (1)..(383): Homolog of NCBI NO: 21554196 NR Description: putative proline transporter [Arabidopsis
  misc_feature (1)..(383): Homolog of NCBI NO: 15228183 NR Description: proline transporter 2 (ProT2) [Arabidopsis
  misc_feature (1)..(383): Homolog of NCBI NO: 21069018 NR Description: betaine/proline transporter [Avicennia marina]
  misc_feature (1)..(383): Homolog of NCBI NO: 21069020 NR Description: betaine/proline transporter [Avicennia marina]
  misc_feature (1)..(383): Homolog of NCBI NO: 8571474 NR Description: proline/glycine betaine transporter [Atriplex
  misc_feature (1)..(383): Homolog of NCBI NO: 11358950 NR Description: proline transport protein 3 [imported] - tomato
  misc_feature (1)..(383): Homolog of NCBI NO: 11358960 NR Description: proline transport protein [imported] - rice

SEQ ID NO: 103774 - protein, 317 aa, Arabidopsis thaliana; identical to SEQ ID NO: 24809
  peptide (1)..(317): Ceres Seq. ID no. 13613526
  misc_feature (1)..(317): Homolog of NCBI NO: 15225591 NR Description: proline transporter 1 (ProT1) [Arabidopsis
  misc_feature (1)..(317): Homolog of NCBI NO: 21593453 NR Description: proline transporter 1 [Arabidopsis thaliana]
  misc_feature (1)..(317): Homolog of NCBI NO: 15228000 NR Description: proline transporter, putative [Arabidopsis
  misc_feature (1)..(317): Homolog of NCBI NO: 21554196 NR Description: putative proline transporter [Arabidopsis
  misc_feature (1)..(317): Homolog of NCBI NO: 15228183 NR Description: proline transporter 2 (ProT2) [Arabidopsis
  misc_feature (1)..(317): Homolog of NCBI NO: 21069018 NR Description: betaine/proline transporter [Avicennia marina]
  misc_feature (1)..(317): Homolog of NCBI NO: 21069020 NR Description: betaine/proline transporter [Avicennia marina]
  misc_feature (1)..(317): Homolog of NCBI NO: 8571474 NR Description: proline/glycine betaine transporter [Atriplex
  misc_feature (1)..(317): Homolog of NCBI NO: 11358950 NR Description: proline transport protein 3 [imported] - tomato
  misc_feature (1)..(317): Homolog of NCBI NO: 11358960 NR Description: proline transport protein [imported] - rice

SEQ ID NO: 103775 - DNA, 1151 bp, Arabidopsis thaliana
  misc_feature (1)..(1151): Ceres Seq. ID no. 13613535
  misc_feature: MA Experiment ID: 108434 Result: Down-regulated in Transcription
  misc_feature: MA Experiment 108434 PARAMETER Experiment Name: At_Root_Tips_cDNA_P Parameter: Tissue Value: Root Tips
  misc_feature: MA Experiment ID: 108462 Result: Down-regulated in Transcription
  misc_feature: MA Experiment 108462 PARAMETER Experiment Name: At_Germinating_Seeds_cDNA_P Parameter: Age (day) Value: 2 vs. 0
  misc_feature: MA Experiment 108462 PARAMETER Experiment Name: At_Germinating_Seeds_cDNA_P Parameter: Tissue Value: Germinating Seeds
  misc_feature: MA Experiment ID: 108463 Result: Down-regulated in Transcription
  misc_feature: MA Experiment 108463 PARAMETER Experiment Name: At_Germinating_Seeds_cDNA_P Parameter: Age (day) Value: 3 vs. 0
  misc_feature: MA Experiment 108463 PARAMETER Experiment Name: At_Germinating_Seeds_cDNA_P Parameter: Tissue Value: Germinating Seeds
  misc_feature: MA Experiment ID: 108585 Result: Up-regulated in Transcription
  misc_feature: MA Experiment 108585 PARAMETER Experiment Name: At_5mM_NaNP_cDNA_P Parameter: Timepoint (hr) Value: 6
  misc_feature: MA Experiment 108585 PARAMETER Experiment Name: At_5mM_NaNP_cDNA_P Parameter: Tissue Value: Aerial
  misc_feature: MA Experiment 108585 PARAMETER Experiment Name: At_5mM_NaNP_cDNA_P Parameter: Treatment Value: null
  misc_feature: MA Experiment ID: 108594 Result: Down-regulated in Transcription
  misc_feature: MA Experiment 108594 PARAMETER Experiment Name: At_Ler-rhl_Root_cDNA_P Parameter: Plant Line Value: null
  misc_feature: MA Experiment ID: 108595 Result: Up-regulated in Transcription
  misc_feature: MA Experiment 108595 PARAMETER Experiment Name: At_Ler-pi_Ovule_cDNA_P Parameter: Plant Line Value: null
  misc_feature: MA Experiment ID: 20000087 Result: Up-regulated in Transcription
  misc_feature: MA Experiment 20000087 PARAMETER Experiment Name: At_100uM_ABA_Mutants_cDNA_P Parameter: Plant Line Value: WS
  misc_feature: MA Experiment 20000087 PARAMETER Experiment Name: At_100uM_ABA_Mutants_cDNA_P Parameter: Timepoint (hr) Value: 6
  misc_feature: MA Experiment 20000087 PARAMETER Experiment Name: At_100uM_ABA_Mutants_cDNA_P Parameter: Tissue Value: Aerial
  misc_feature: MA Experiment 20000087 PARAMETER Experiment Name: At_100uM_ABA_Mutants_cDNA_P Parameter: Treatment Value: 100uM ABA vs. No Treatment
  misc_feature: MA Experiment ID: 20000089 Result: Up-regulated in Transcription
  misc_feature: MA Experiment ID: 20000090 Result: Up-regulated in Transcription
  misc_feature: MA Experiment ID: 20000117 Result: Up-regulated in Transcription
  misc_feature: MA Experiment 20000117 PARAMETER Experiment Name: At_100uM_ABA_Mutants_cDNA_P Parameter: Plant Line Value: Columbia
  misc_feature: MA Experiment 20000117 PARAMETER Experiment Name: At_100uM_ABA_Mutants_cDNA_P Parameter: Timepoint (hr) Value: 6
  misc_feature: MA Experiment 20000117 PARAMETER Experiment Name: At_100uM_ABA_Mutants_cDNA_P Parameter: Tissue Value: Aerial
  misc_feature: MA Experiment 20000117 PARAMETER Experiment Name: At_100uM_ABA_Mutants_cDNA_P Parameter: Treatment Value: 100uM ABA vs. No Treatment
  misc_feature: MA Experiment ID: 20000182 Result: Up-regulated in Transcription
  misc_feature: MA Experiment 20000182 PARAMETER Experiment Name: At_2mM_SA_P Parameter: Age (day) Value: 14
  misc_feature: MA Experiment 20000182 PARAMETER Experiment Name: At_2mM_SA_P Parameter: Organism Value: A. thaliana
  misc_feature: MA Experiment 20000182 PARAMETER Experiment Name: At_2mM_SA_P Parameter: Plant Line Value: WS
  misc_feature: MA Experiment 20000182 PARAMETER Experiment Name: At_2mM_SA_P Parameter: Timepoint (hr) Value: 6
  misc_feature: MA Experiment 20000182 PARAMETER Experiment Name: At_2mM_SA_P Parameter: Tissue Value: Aerial
  misc_feature: MA Experiment 20000182 PARAMETER Experiment Name: At_2mM_SA_P Parameter: Treatment Value: 2mM SA vs. No Treatment
  misc_feature: MA Experiment ID: 20000184 Result: Down-regulated in Transcription
  misc_feature: MA Experiment 20000184 PARAMETER Experiment Name: At_Shoots__P Parameter: Age (day) Value: 7
  misc_feature: MA Experiment 20000184 PARAMETER Experiment Name: At_Shoots__P Parameter: Tissue Value: Shoots vs. Whole Plant
  misc_feature: MA Experiment ID: 20000227 Result: Down-regulated in Transcription
  misc_feature: MA Experiment 20000227 PARAMETER Experiment Name: At_Root-Tips-vs-Tops_P Parameter: Tissue Value: Root Tips vs. Root Tops
  misc_feature: MA Experiment ID: 20000234 Result: Down-regulated in Transcription
  misc_feature: MA Experiment 20000234 PARAMETER Experiment Name: At_Siliques_P Parameter: Age (day) Value: 21
  misc_feature: MA Experiment 20000234 PARAMETER Experiment Name: At_Siliques_P Parameter: Organism Value: A. thaliana
  misc_feature: MA Experiment 20000234 PARAMETER Experiment Name: At_Siliques_P Parameter: Plant Line Value: WS
  misc_feature: MA Experiment 20000234 PARAMETER Experiment Name: At_Siliques_P Parameter: Tissue Value: Less Than 5mm Siliques vs. Whole Plant
  misc_feature: MA Experiment ID: 20000235 Result: Down-regulated in Transcription
  misc_feature: MA Experiment 20000235 PARAMETER Experiment Name: At_Siliques_P Parameter: Age (day) Value: 21
  misc_feature: MA Experiment 20000235 PARAMETER Experiment Name: At_Siliques_P Parameter: Organism Value: A. thaliana
  misc_feature: MA Experiment 20000235 PARAMETER Experiment Name: At_Siliques_P Parameter: Plant Line Value: WS
  misc_feature: MA Experiment 20000235 PARAMETER Experiment Name: At_Siliques_P Parameter: Tissue Value: 5-10mm Siliques vs. Whole Plant
  misc_feature: MA Experiment ID: 20000264 Result: Down-regulated in Transcription
  misc_feature: MA Experiment 20000264 PARAMETER Experiment Name: At_Open_Flower_P Parameter: Age (day) Value: 21
  misc_feature: MA Experiment 20000264 PARAMETER Experiment Name: At_Open_Flower_P Parameter: Plant Line Value: WS
  misc_feature: MA Experiment 20000264 PARAMETER Experiment Name: At_Open_Flower_P Parameter: Tissue Value: Open Flower vs. Whole Plant
  misc_feature: MA Experiment ID: 20000286 Result: Down-regulated in Transcription
  misc_feature: MA Experiment 20000286 PARAMETER Experiment Name: At_Open_Flower_P Parameter: Age (day) Value: 21
  misc_feature: MA Experiment 20000286 PARAMETER Experiment Name: At_Open_Flower_P Parameter: Plant Line Value: WS
  misc_feature: MA Experiment 20000286 PARAMETER Experiment Name: At_Open_Flower_P Parameter: Tissue Value: Half Open vs. Whole Plant
  misc_feature: MA Experiment ID: 20000438 Result: Down-regulated in Transcription
  misc_feature: MA Experiment 20000438 PARAMETER Experiment Name: At_Shoots__P Parameter: Age (day) Value: 14
  misc_feature: MA Experiment 20000438 PARAMETER Experiment Name: At_Shoots__P Parameter: Tissue Value: Shoots vs. Whole Plant
  misc_feature: MA Experiment ID: 20000441 Result: Up-regulated in Transcription
  misc_feature: MA Experiment 20000441 PARAMETER Experiment Name: At_1uM_BR-BRZ__P Parameter: Tissue Value: Shoot Apices
  misc_feature: MA Experiment 20000441 PARAMETER Experiment Name: At_1uM_BR-BRZ__P Parameter: Treatment Value: 1uM BR vs. No Treatment
  misc_feature: MA Experiment ID: 20001555 Result: Down-regulated in Transcription
  misc_feature: MA Experiment 20001555 PARAMETER Experiment Name: At_Drought_Soil_Dry_P Parameter: Age (day) Value: 24
  misc_feature: MA Experiment 20001555 PARAMETER Experiment Name: At_Drought_Soil_Dry_P Parameter: Organism Value: A. thaliana
  misc_feature: MA Experiment 20001555 PARAMETER Experiment Name: At_Drought_Soil_Dry_P Parameter: Plant Line Value: WS
  misc_feature: MA Experiment 20001555 PARAMETER Experiment Name: At_Drought_Soil_Dry_P Parameter: Post Timepoint (hr) Value: None
  misc_feature: MA Experiment 20001555 PARAMETER Experiment Name: At_Drought_Soil_Dry_P Parameter: Post-Treatment Value: None
  misc_feature: MA Experiment 20001555 PARAMETER Experiment Name: At_Drought_Soil_Dry_P Parameter: Timepoint (day) Value: 10
  misc_feature: MA Experiment 20001555 PARAMETER Experiment Name: At_Drought_Soil_Dry_P Parameter: Treatment Value: Drought vs. No Drought
  misc_feature: MA Experiment ID: 20001556 Result: Down-regulated in Transcription
  misc_feature: MA Experiment 20001556 PARAMETER Experiment Name: At_Drought_Soil_Dry_P Parameter: Age (day) Value: 26
  misc_feature: MA Experiment 20001556 PARAMETER Experiment Name: At_Drought_Soil_Dry_P Parameter: Organism Value: A. thaliana
  misc_feature: MA Experiment 20001556 PARAMETER Experiment Name: At_Drought_Soil_Dry_P Parameter: Plant Line Value: WS
  misc_feature: MA Experiment 20001556 PARAMETER Experiment Name: At_Drought_Soil_Dry_P Parameter: Post Timepoint (hr) Value: None
  misc_feature: MA Experiment 20001556 PARAMETER Experiment Name: At_Drought_Soil_Dry_P Parameter: Post-Treatment Value: None
  misc_feature: MA Experiment 20001556 PARAMETER Experiment Name: At_Drought_Soil_Dry_P Parameter: Timepoint (day) Value: 12
  misc_feature: MA Experiment 20001556 PARAMETER Experiment Name: At_Drought_Soil_Dry_P Parameter: Treatment Value: Drought vs. No Drought
aaacaaatcctctctgattcgatgggttttagcaaagaagagattagtaaaaccagaaagctttggtcatctctatggagaggaatcaaaactatattcgttttgttcacaatgttcttctcttttctccttgtctctgctcctatcttcctcgccgtcgccgatgctctcctcccttccgctctcctccaccgcttctcttcgccggcgactctctcttctcatctcaccaactacgatttccgtcactccctcatcgatattcctttaatctcaatcattagatccgctgttatactctgtgtttatggactctgtgacggaccaaaactatcgagaggaccgtatctgacaataacaatgatttgttcaatatcttctctaatctacgtttcgttaaaagctgcgtttgtgttcggtgagccagcgatcggagacggaggaggaaactacttcagagcggcggaagtggctctgtttctatgctcgtcagtcttagccataggtcacatcgttgtggcttatcgaacaagttgtagagaaagaaaaaagcttctcgtcttcaaaatcgacattgaagccgtttcggcttgtaaaaacgtgtacccgagataccaaaagatcttattacaacaagagagactcaaatagagacgtatttccaagagaatcaatacttgtaaatatatacacatacctcaacatgtaaataaaactaatatataaaaacatacggcgtataaatgtaacttctccttctgcctttcggcgttgacccatcaactccttcgcttttaagtttcagaaggatccaaagcaaaaggaatggagattaattatataacctatgcttttttaaatgagacatttcagatgaactggcagttgttagctttaacattatattagttagggcgatttgtaaataatccagagttcctcaatgagaaaagaagcccaaggctgtctctccgttttgtatatatgtttatgtttgtatttctttgtggttttaatatatgttttgtaattgtaatttgtaagcataagcacatagtatgtgatacgtccgcgtggatttctttatacgtcaccaaaatctctaatagaatcgtaaagcaacctttttacgatcattatctatttatctt

SEQ ID NO: 103776 - protein, 216 aa, Arabidopsis thaliana
  peptide (1)..(216): Ceres Seq. ID no. 13613536
  misc_feature (8)..(216): Homolog of NCBI NO: 30688139 NR Description: expressed protein [Arabidopsis thaliana] unknown protein [Arabidopsis thaliana]
  misc_feature (8)..(216): Homolog of NCBI NO: 30694339 NR Description: expressed protein [Arabidopsis thaliana] putative protein [Arabidopsis thaliana]
  misc_feature (8)..(197): Homolog of NCBI NO: 30694336 NR Description: expressed protein [Arabidopsis thaliana]
  misc_feature (27)..(208): Homolog of NCBI NO: 15220097 NR Description: hydrolase, alpha/beta fold family [Arabidopsis
  misc_feature (20)..(195): Homolog of NCBI NO: 25446696 NR Description: Unknown protein [Oryza sativa (japonica
  misc_feature (27)..(208): Homolog of NCBI NO: 15218212 NR Description: hydrolase, alpha/beta fold family [Arabidopsis >gi|5103847|gb|AAD39677.1|AC007591_42 Contains PF|00561 hydrolase fold. [Arabidopsis thaliana]
  misc_feature (35)..(203): Homolog of NCBI NO: 34911750 NR Description: P0038D11.18 [Oryza sativa (japonica
  misc_feature (32)..(207): Homolog of NCBI NO: 25405595 NR Description: unknown protein, 18223-15857 [imported] -
  misc_feature (20)..(195): Homolog of NCBI NO: 37536434 NR Description: unknown protein [Oryza sativa (japonica
KQILSDSMGFSKEEISKTRKLWSSLWRGIKTIFVLFTMFFSFLLVSAPIFLAVADALLPSALLHRFSSPATLSSHLTNYDFRHSLIDIPLISIIRSAVILCVYGLCDGPKLSRGPYLTITMICSISSLIYVSLKAAFVFGEPAIGDGGGNYFRAAEVALFLCSSVLAIGHIVVAYRTSCRERKKLLVFKIDIEAVSACKNVYPRYQKILLQQERLK

SEQ ID NO: 103777 - protein, 209 aa, Arabidopsis thaliana; identical to SEQ ID NO: 40232
  peptide (1)..(209): Ceres Seq. ID no. 13613537
  misc_feature (1)..(209): Homolog of NCBI NO: 30688139 NR Description: expressed protein [Arabidopsis thaliana] unknown protein [Arabidopsis thaliana]
  misc_feature (1)..(209): Homolog of NCBI NO: 30694339 NR Description: expressed protein [Arabidopsis thaliana] putative protein [Arabidopsis thaliana]
  misc_feature (1)..(190): Homolog of NCBI NO: 30694336 NR Description: expressed protein [Arabidopsis thaliana]
  misc_feature (20)..(201): Homolog of NCBI NO: 15220097 NR Description: hydrolase, alpha/beta fold family [Arabidopsis
  misc_feature (13)..(188): Homolog of NCBI NO: 25446696 NR Description: Unknown protein [Oryza sativa (japonica
  misc_feature (20)..(201): Homolog of NCBI NO: 15218212 NR Description: hydrolase, alpha/beta fold family [Arabidopsis >gi|5103847|gb|AAD39677.1|AC007591_42 Contains PF|00561 hydrolase fold. [Arabidopsis thaliana]
  misc_feature (28)..(196): Homolog of NCBI NO: 34911750 NR Description: P0038D11.18 [Oryza sativa (japonica
  misc_feature (25)..(200): Homolog of NCBI NO: 25405595 NR Description: unknown protein, 18223-15857 [imported] -
  misc_feature (13)..(188): Homolog of NCBI NO: 37536434 NR Description: unknown protein [Oryza sativa (japonica

SEQ ID NO: 103778 - protein, 179 aa, Arabidopsis thaliana; identical to SEQ ID NO: 40233
  peptide (1)..(179): Ceres Seq. ID no. 13613538
  misc_feature (1)..(179): Homolog of NCBI NO: 30688139 NR Description: expressed protein [Arabidopsis thaliana] unknown protein [Arabidopsis thaliana]
  misc_feature (1)..(179): Homolog of NCBI NO: 30694339 NR Description: expressed protein [Arabidopsis thaliana] putative protein [Arabidopsis thaliana]
  misc_feature (1)..(160): Homolog of NCBI NO: 30694336 NR Description: expressed protein [Arabidopsis thaliana]
  misc_feature (1)..(171): Homolog of NCBI NO: 15220097 NR Description: hydrolase, alpha/beta fold family [Arabidopsis
  misc_feature (1)..(158): Homolog of NCBI NO: 25446696 NR Description: Unknown protein [Oryza sativa (japonica
  misc_feature (1)..(171): Homolog of NCBI NO: 15218212 NR Description: hydrolase, alpha/beta fold family [Arabidopsis >gi|5103847|gb|AAD39677.1|AC007591_42 Contains PF|00561 hydrolase fold. [Arabidopsis thaliana]
  misc_feature (1)..(166): Homolog of NCBI NO: 34911750 NR Description: P0038D11.18 [Oryza sativa (japonica
  misc_feature (1)..(170): Homolog of NCBI NO: 25405595 NR Description: unknown protein, 18223-15857 [imported] -
  misc_feature (1)..(158): Homolog of NCBI NO: 37536434 NR Description: unknown protein [Oryza sativa (japonica

SEQ ID NO: 103779 - DNA, 780 bp, Arabidopsis thaliana
  misc_feature (1)..(780): Ceres Seq. ID no. 13613539
  misc_feature: MA Experiment ID: 108434 Result: Down-regulated in Transcription
  misc_feature: MA Experiment 108434 PARAMETER Experiment Name: At_Root_Tips_cDNA_P Parameter: Tissue Value: Root Tips
  misc_feature: MA Experiment ID: 108461 Result: Up-regulated in Transcription
  misc_feature: MA Experiment 108461 PARAMETER Experiment Name: At_Germinating_Seeds_cDNA_P Parameter: Age (day) Value: 1 vs. 0
  misc_feature: MA Experiment 108461 PARAMETER Experiment Name: At_Germinating_Seeds_cDNA_P Parameter: Tissue Value: Germinating Seeds
  misc_feature: MA Experiment ID: 108462 Result: Up-regulated in Transcription
  misc_feature: MA Experiment 108462 PARAMETER Experiment Name: At_Germinating_Seeds_cDNA_P Parameter: Age (day) Value: 2 vs. 0
  misc_feature: MA Experiment 108462 PARAMETER Experiment Name: At_Germinating_Seeds_cDNA_P Parameter: Tissue Value: Germinating Seeds
  misc_feature: MA Experiment ID: 108463 Result: Up-regulated in Transcription
  misc_feature: MA Experiment 108463 PARAMETER Experiment Name: At_Germinating_Seeds_cDNA_P Parameter: Age (day) Value: 3 vs. 0
  misc_feature: MA Experiment 108463 PARAMETER Experiment Name: At_Germinating_Seeds_cDNA_P Parameter: Tissue Value: Germinating Seeds
  misc_feature: MA Experiment ID: 108464 Result: Up-regulated in Transcription
  misc_feature: MA Experiment 108464 PARAMETER Experiment Name: At_Germinating_Seeds_cDNA_P Parameter: Age (day) Value: 4 vs. 0
  misc_feature: MA Experiment 108464 PARAMETER Experiment Name: At_Germinating_Seeds_cDNA_P Parameter: Tissue Value: Germinating Seeds
  misc_feature: MA Experiment ID: 108488 Result: Down-regulated in Transcription
  misc_feature: MA Experiment ID: 108561 Result: Up-regulated in Transcription
  misc_feature: MA Experiment 108561 PARAMETER Experiment Name: At_100uM_ABA_cDNA_P Parameter: Timepoint (hr) Value: 6
  misc_feature: MA Experiment 108561 PARAMETER Experiment Name: At_100uM_ABA_cDNA_P Parameter: Tissue Value: Aerial
  misc_feature: MA Experiment 108561 PARAMETER Experiment Name: At_100uM_ABA_cDNA_P Parameter: Treatment Value: 100uM ABA vs. No Treatment
  misc_feature: MA Experiment ID: 108594 Result: Down-regulated in Transcription
  misc_feature: MA Experiment 108594 PARAMETER Experiment Name: At_Ler-rhl_Root_cDNA_P Parameter: Plant Line Value: null
  misc_feature: MA Experiment ID: 20000069 Result: Up-regulated in Transcription
  misc_feature: MA Experiment 20000069 PARAMETER Experiment Name: At_100uM_ABA_Mutants_cDNA_P Parameter: Plant Line Value: CS23
  misc_feature: MA Experiment 20000069 PARAMETER Experiment Name: At_100uM_ABA_Mutants_cDNA_P Parameter: Timepoint (hr) Value: 6
  misc_feature: MA Experiment 20000069 PARAMETER Experiment Name: At_100uM_ABA_Mutants_cDNA_P Parameter: Tissue Value: Aerial
  misc_feature: MA Experiment 20000069 PARAMETER Experiment Name: At_100uM_ABA_Mutants_cDNA_P Parameter: Treatment Value: 100uM ABA vs. No Treatment
  misc_feature: MA Experiment ID: 20000070 Result: Up-regulated in Transcription
  misc_feature: MA Experiment 20000070 PARAMETER Experiment Name: At_100uM_ABA_Mutants_cDNA_P Parameter: Plant Line Value: CS24
  misc_feature: MA Experiment 20000070 PARAMETER Experiment Name: At_100uM_ABA_Mutants_cDNA_P Parameter: Timepoint (hr) Value: 6
  misc_feature: MA Experiment 20000070 PARAMETER Experiment Name: At_100uM_ABA_Mutants_cDNA_P Parameter: Tissue Value: Aerial
  misc_feature: MA Experiment 20000070 PARAMETER Experiment Name: At_100uM_ABA_Mutants_cDNA_P Parameter: Treatment Value: 100uM ABA vs. No Treatment
  misc_feature: MA Experiment ID: 20000071 Result: Up-regulated in Transcription
  misc_feature: MA Experiment 20000071 PARAMETER Experiment Name: At_100uM_ABA_Mutants_cDNA_P Parameter: Plant Line Value: CS8104
  misc_feature: MA Experiment 20000071 PARAMETER Experiment Name: At_100uM_ABA_Mutants_cDNA_P Parameter: Timepoint (hr) Value: 6
  misc_feature: MA Experiment 20000071 PARAMETER Experiment Name: At_100uM_ABA_Mutants_cDNA_P Parameter: Tissue Value: Aerial
  misc_feature: MA Experiment 20000071 PARAMETER Experiment Name: At_100uM_ABA_Mutants_cDNA_P Parameter: Treatment Value: 100uM ABA vs. No Treatment
  misc_feature: MA Experiment ID: 20000072 Result: Up-regulated in Transcription
  misc_feature: MA Experiment 20000072 PARAMETER Experiment Name: At_100uM_ABA_Mutants_cDNA_P Parameter: Plant Line Value: CS8105
  misc_feature: MA Experiment 20000072 PARAMETER Experiment Name: At_100uM_ABA_Mutants_cDNA_P Parameter: Timepoint (hr) Value: 6
  misc_feature: MA Experiment 20000072 PARAMETER Experiment Name: At_100uM_ABA_Mutants_cDNA_P Parameter: Tissue Value: Aerial
  misc_feature: MA Experiment 20000072 PARAMETER Experiment Name: At_100uM_ABA_Mutants_cDNA_P Parameter: Treatment Value: 100uM ABA vs. No Treatment
  misc_feature: MA Experiment ID: 20000086 Result: Up-regulated in Transcription
  misc_feature: MA Experiment 20000086 PARAMETER Experiment Name: At_100uM_ABA_Mutants_cDNA_P Parameter: Plant Line Value: CS22
  misc_feature: MA Experiment 20000086 PARAMETER Experiment Name: At_100uM_ABA_Mutants_cDNA_P Parameter: Timepoint (hr) Value: 6
  misc_feature: MA Experiment 20000086 PARAMETER Experiment Name: At_100uM_ABA_Mutants_cDNA_P Parameter: Tissue Value: Aerial
  misc_feature: MA Experiment 20000086 PARAMETER Experiment Name: At_100uM_ABA_Mutants_cDNA_P Parameter: Treatment Value: 100uM ABA vs. No Treatment
  misc_feature: MA Experiment ID: 20000087 Result: Up-regulated in Transcription
  misc_feature: MA Experiment 20000087 PARAMETER Experiment Name: At_100uM_ABA_Mutants_cDNA_P Parameter: Plant Line Value: WS
  misc_feature: MA Experiment 20000087 PARAMETER Experiment Name: At_100uM_ABA_Mutants_cDNA_P Parameter: Timepoint (hr) Value: 6
  misc_feature: MA Experiment 20000087 PARAMETER Experiment Name: At_100uM_ABA_Mutants_cDNA_P Parameter: Tissue Value: Aerial
  misc_feature: MA Experiment 20000087 PARAMETER Experiment Name: At_100uM_ABA_Mutants_cDNA_P Parameter: Treatment Value: 100uM ABA vs. No Treatment
  misc_feature: MA Experiment ID: 20000111 Result: Down-regulated in Transcription
  misc_feature: MA Experiment 20000111 PARAMETER Experiment Name: At_42deg_Heat_cDNA_P Parameter: Temperature (deg C) Value: 42 vs. 22
  misc_feature: MA Experiment 20000111 PARAMETER Experiment Name: At_42deg_Heat_cDNA_P Parameter: Timepoint (hr) Value: 6
  misc_feature: MA Experiment 20000111 PARAMETER Experiment Name: At_42deg_Heat_cDNA_P Parameter: Tissue Value: Aerial
  misc_feature: MA Experiment ID: 20000113 Result: Down-regulated in Transcription
  misc_feature: MA Experiment 20000113 PARAMETER Experiment Name: At_42deg_Heat_cDNA_P Parameter: Temperature (deg C) Value: 42 vs. 22
  misc_feature: MA Experiment 20000113 PARAMETER Experiment Name: At_42deg_Heat_cDNA_P Parameter: Timepoint (hr) Value: 8
  misc_feature: MA Experiment 20000113 PARAMETER Experiment Name: At_42deg_Heat_cDNA_P Parameter: Tissue Value: Aerial
  misc_feature: MA Experiment ID: 20000117 Result: Up-regulated in Transcription
  misc_feature: MA Experiment 20000117 PARAMETER Experiment Name: At_100uM_ABA_Mutants_cDNA_P Parameter: Plant Line Value: Columbia
  misc_feature: MA Experiment 20000117 PARAMETER Experiment Name: At_100uM_ABA_Mutants_cDNA_P Parameter: Timepoint (hr) Value: 6
  misc_feature: MA Experiment 20000117 PARAMETER Experiment Name: At_100uM_ABA_Mutants_cDNA_P Parameter: Tissue Value: Aerial
  misc_feature: MA Experiment 20000117 PARAMETER Experiment Name: At_100uM_ABA_Mutants_cDNA_P Parameter: Treatment Value: 100uM ABA vs. No Treatment
  misc_feature: MA Experiment ID: 20000180 Result: Up-regulated in Transcription
  misc_feature: MA Experiment 20000180 PARAMETER Experiment Name: At_Germinating_Seeds_P Parameter: Age (hr) Value: 24 vs. 0
  misc_feature: MA Experiment 20000180 PARAMETER Experiment Name: At_Germinating_Seeds_P Parameter: Tissue Value: Germinating Seeds
  misc_feature: MA Experiment ID: 20000224 Result: Down-regulated in Transcription
  misc_feature: MA Experiment ID: 20000794 Result: Up-regulated in Transcription
  misc_feature: MA Experiment 20000794 PARAMETER Experiment Name: At_Petals_P Parameter: Age (day) Value: 23-25 days
  misc_feature: MA Experiment 20000794 PARAMETER Experiment Name: At_Petals_P Parameter: Plant Line Value: WS
  misc_feature: MA Experiment 20000794 PARAMETER Experiment Name: At_Petals_P Parameter: Tissue Value: Petals vs. Whole plant
aaagacgttataccttccccatccacattttcttgcttaactgcagaacaacaccaaattcgaccctatcaagttttgattcgtgtctacatagaaagagtctcaattgttctgtccctggacttttttttgtttcgtttttcttgttaagatcgaaaactctgttttggtagatttttgtgttcttgattttgattcaagatggggaggctgtttgtggtgaatcttgaagggaagatctatagctgcaaacactgtaagactcatcttgctacttatgaagacatcatctccaagtcttttcactgcaagcatgggaaagcttatctcttcaataaggttgccaatgtttccattggagagactgaagaaagactgatgatgactggtaaacatactgtggctgatattttctgtgtctcgtgtggatcaatcgttggctggaaatacgagactgctcatgagaagaaccagaagtacaaagaaggaaaatcagtgcttgaaagatttaagatatcgggtcctgatgggagcaactattgggtgagtagccatggaaggcatataggtggaagtgatgcagatgatgcttgaatcatctctctctctctctattctctgatttgaccatttcatgtaaatgtaaattattcaacctccattccaatttcttgtaataagactaaccaatactctttcttctcttgacttattatgtctcagtaaataaaaaatctgattctgtctaatgactatttattggttttctgtgaaaccatc

SEQ ID NO: 103780 - protein, 130 aa, Arabidopsis thaliana; identical to SEQ ID NO: 29995
  peptide (1)..(130): Ceres Seq. ID no. 13613540
  misc_feature (1)..(108): Pfam Name: Yippee putative zinc-binding protein Pfam Description: Yippee putative zinc-binding protein
  misc_feature (1)..(130): Homolog of NCBI NO: 15225631 NR Description: expressed protein [Arabidopsis thaliana]
  misc_feature (1)..(129): Homolog of NCBI NO: 27923880 NR Description: Yippee-like protein >gi|24745964|dbj|BAC23053.1|
  misc_feature (1)..(129): Homolog of NCBI NO: 28273361 NR Description: putative zinc binding protein [Oryza sativa
  misc_feature (1)..(130): Homolog of NCBI NO: 18399156 NR Description: expressed protein [Arabidopsis thaliana]
  misc_feature (1)..(130): Homolog of NCBI NO: 21617953 NR Description: yippee-like protein [Arabidopsis thaliana]
  misc_feature (1)..(116): Homolog of NCBI NO: 15228759 NR Description: Yippee-related protein [Arabidopsis thaliana]
  misc_feature (1)..(103): Homolog of NCBI NO: 15232001 NR Description: Yippee-related protein [Arabidopsis thaliana]
  misc_feature (1)..(130): Homolog of NCBI NO: 15238881 NR Description: zinc-binding protein-related [Arabidopsis
  misc_feature (1)..(101): Homolog of NCBI NO: 32402994 NR Description: hypothetical protein [Neurospora crassa]
  misc_feature (12)..(101): Homolog of NCBI NO: 20840809 NR Description: similar to hypothetical protein FLJ30213 [Homo [Mus musculus] >gi|27701004|ref|XP_230277.1| similar to

SEQ ID NO: 103781 - protein, 71 aa, Arabidopsis thaliana; identical to SEQ ID NO: 29996
  peptide (1)..(71): Ceres Seq. ID no. 13613541
  misc_feature (1)..(71): Homolog of NCBI NO: 15225631 NR Description: expressed protein [Arabidopsis thaliana]
  misc_feature (1)..(70): Homolog of NCBI NO: 27923880 NR Description: Yippee-like protein >gi|24745964|dbj|BAC23053.1|
  misc_feature (1)..(70): Homolog of NCBI NO: 28273361 NR Description: putative zinc binding protein [Oryza sativa
  misc_feature (1)..(71): Homolog of NCBI NO: 18399156 NR Description: expressed protein [Arabidopsis thaliana]
  misc_feature (1)..(71): Homolog of NCBI NO: 21617953 NR Description: yippee-like protein [Arabidopsis thaliana]
  misc_feature (1)..(57): Homolog of NCBI NO: 15228759 NR Description: Yippee-related protein [Arabidopsis thaliana]
  misc_feature (1)..(44): Homolog of NCBI NO: 15232001 NR Description: Yippee-related protein [Arabidopsis thaliana]
  misc_feature (1)..(71): Homolog of NCBI NO: 15238881 NR Description: zinc-binding protein-related [Arabidopsis
  misc_feature (1)..(42): Homolog of NCBI NO: 32402994 NR Description: hypothetical protein [Neurospora crassa]
  misc_feature (1)..(42): Homolog of NCBI NO: 20840809 NR Description: similar to hypothetical protein FLJ30213 [Homo [Mus musculus] >gi|27701004|ref|XP_230277.1| similar to

SEQ ID NO: 103782 - protein, 70 aa, Arabidopsis thaliana; identical to SEQ ID NO: 29997
  peptide (1)..(70): Ceres Seq. ID no. 13613542
  misc_feature (1)..(70): Homolog of NCBI NO: 15225631 NR Description: expressed protein [Arabidopsis thaliana]
  misc_feature (1)..(69): Homolog of NCBI NO: 27923880 NR Description: Yippee-like protein >gi|24745964|dbj|BAC23053.1|
  misc_feature (1)..(69): Homolog of NCBI NO: 28273361 NR Description: putative zinc binding protein [Oryza sativa
  misc_feature (1)..(70): Homolog of NCBI NO: 18399156 NR Description: expressed protein [Arabidopsis thaliana]
  misc_feature (1)..(70): Homolog of NCBI NO: 21617953 NR Description: yippee-like protein [Arabidopsis thaliana]
  misc_feature (1)..(56): Homolog of NCBI NO: 15228759 NR Description: Yippee-related protein [Arabidopsis thaliana]
  misc_feature (1)..(43): Homolog of NCBI NO: 15232001 NR Description: Yippee-related protein [Arabidopsis thaliana]
  misc_feature (1)..(70): Homolog of NCBI NO: 15238881 NR Description: zinc-binding protein-related [Arabidopsis
  misc_feature (1)..(41): Homolog of NCBI NO: 32402994 NR Description: hypothetical protein [Neurospora crassa]
  misc_feature (1)..(41): Homolog of NCBI NO: 20840809 NR Description: similar to hypothetical protein FLJ30213 [Homo [Mus musculus] >gi|27701004|ref|XP_230277.1| similar to

SEQ ID NO: 103783 - DNA, 1507 bp, Arabidopsis thaliana
  misc_feature (1)..(1507): Ceres Seq. ID no. 13613543
  misc_feature: MA Experiment ID: 20000171 Result: Down-regulated in Transcription
  misc_feature: MA Experiment 20000171 PARAMETER Experiment Name: At_42deg_Heat_P Parameter: Age (day) Value: 14
  misc_feature: MA Experiment 20000171 PARAMETER Experiment Name: At_42deg_Heat_P Parameter: Organism Value: A. thaliana
  misc_feature: MA Experiment 20000171 PARAMETER Experiment Name: At_42deg_Heat_P Parameter: Plant Line Value: WS
  misc_feature: MA Experiment 20000171 PARAMETER Experiment Name: At_42deg_Heat_P Parameter: Temperature (deg C) Value: 42 vs. 22
  misc_feature: MA Experiment 20000171 PARAMETER Experiment Name: At_42deg_Heat_P Parameter: Timepoint (hr) Value: 1
  misc_feature: MA Experiment 20000171 PARAMETER Experiment Name: At_42deg_Heat_P Parameter: Tissue Value: Aerial
  misc_feature: MA Experiment ID: 20000182 Result: Up-regulated in Transcription
  misc_feature: MA Experiment 20000182 PARAMETER Experiment Name: At_2mM_SA_P Parameter: Age (day) Value: 14
  misc_feature: MA Experiment 20000182 PARAMETER Experiment Name: At_2mM_SA_P Parameter: Organism Value: A. thaliana
  misc_feature: MA Experiment 20000182 PARAMETER Experiment Name: At_2mM_SA_P Parameter: Plant Line Value: WS
  misc_feature: MA Experiment 20000182 PARAMETER Experiment Name: At_2mM_SA_P Parameter: Timepoint (hr) Value: 6
  misc_feature: MA Experiment 20000182 PARAMETER Experiment Name: At_2mM_SA_P Parameter: Tissue Value: Aerial
  misc_feature: MA Experiment 20000182 PARAMETER Experiment Name: At_2mM_SA_P Parameter: Treatment Value: 2mM SA vs. No Treatment
  misc_feature: MA Experiment ID: 20000184 Result: Up-regulated in Transcription
  misc_feature: MA Experiment 20000184 PARAMETER Experiment Name: At_Shoots__P Parameter: Age (day) Value: 7
  misc_feature: MA Experiment 20000184 PARAMETER Experiment Name: At_Shoots__P Parameter: Tissue Value: Shoots vs. Whole Plant
  misc_feature: MA Experiment ID: 20000185 Result: Up-regulated in Transcription
  misc_feature: MA Experiment 20000185 PARAMETER Experiment Name: At_Roots__P Parameter: Age (day) Value: 7 vs. 21
  misc_feature: MA Experiment 20000185 PARAMETER Experiment Name: At_Roots__P Parameter: Organism Value: A. thaliana
  misc_feature: MA Experiment 20000185 PARAMETER Experiment Name: At_Roots__P Parameter: Tissue Value: Roots vs. Whole Plant
  misc_feature: MA Experiment ID: 20000224 Result: Down-regulated in Transcription
  misc_feature: MA Experiment ID: 20000227 Result: Down-regulated in Transcription
  misc_feature: MA Experiment 20000227 PARAMETER Experiment Name: At_Root-Tips-vs-Tops_P Parameter: Tissue Value: Root Tips vs. Root Tops
  misc_feature: MA Experiment ID: 20000437 Result: Down-regulated in Transcription
  misc_feature: MA Experiment 20000437 PARAMETER Experiment Name: At_Drought_P Parameter: Age (day) Value: 8
  misc_feature: MA Experiment 20000437 PARAMETER Experiment Name: At_Drought_P Parameter: Organism Value: A. thaliana
  misc_feature: MA Experiment 20000437 PARAMETER Experiment Name: At_Drought_P Parameter: Plant Line Value: WS
  misc_feature: MA Experiment 20000437 PARAMETER Experiment Name: At_Drought_P Parameter: Timepoint (hr) Value: 24
  misc_feature: MA Experiment 20000437 PARAMETER Experiment Name: At_Drought_P Parameter: Tissue Value: Whole Plant
  misc_feature: MA Experiment 20000437 PARAMETER Experiment Name: At_Drought_P Parameter: Treatment Value: Drought vs. No Drought
  misc_feature: MA Experiment ID: 20000439 Result: Up-regulated in Transcription
  misc_feature: MA Experiment 20000439 PARAMETER Experiment Name: At_Roots__P Parameter: Age (day) Value: 14 vs. 21
  misc_feature: MA Experiment 20000439 PARAMETER Experiment Name: At_Roots__P Parameter: Organism Value: A. thaliana
  misc_feature: MA Experiment 20000439 PARAMETER Experiment Name: At_Roots__P Parameter: Tissue Value: Roots vs. Whole Plant
  misc_feature: MA Experiment ID: 20000794 Result: Up-regulated in Transcription
  misc_feature: MA Experiment 20000794 PARAMETER Experiment Name: At_Petals_P Parameter: Age (day) Value: 23-25 days
  misc_feature: MA Experiment 20000794 PARAMETER Experiment Name: At_Petals_P Parameter: Plant Line Value: WS
  misc_feature: MA Experiment 20000794 PARAMETER Experiment Name: At_Petals_P Parameter: Tissue Value: Petals vs. Whole plant
  misc_feature: MA Experiment ID: 20001557 Result: Up-regulated in Transcription
  misc_feature: MA Experiment 20001557 PARAMETER Experiment Name: At_Drought_Soil_Dry_P Parameter: Age (day) Value: 27
  misc_feature: MA Experiment 20001557 PARAMETER Experiment Name: At_Drought_Soil_Dry_P Parameter: Organism Value: A. thaliana
  misc_feature: MA Experiment 20001557 PARAMETER Experiment Name: At_Drought_Soil_Dry_P Parameter: Plant Line Value: WS
  misc_feature: MA Experiment 20001557 PARAMETER Experiment Name: At_Drought_Soil_Dry_P Parameter: Post Timepoint (hr) Value: 3
  misc_feature: MA Experiment 20001557 PARAMETER Experiment Name: At_Drought_Soil_Dry_P Parameter: Post-Treatment Value: Re-Water vs. No Drought
  misc_feature: MA Experiment 20001557 PARAMETER Experiment Name: At_Drought_Soil_Dry_P Parameter: Timepoint (day) Value: 13
  misc_feature: MA Experiment 20001557 PARAMETER Experiment Name: At_Drought_Soil_Dry_P Parameter: Treatment Value: Drought vs. No Drought
gttgtttatttctgaagaagaagaaaaacagagcatcataagaagaaaaaaaaaagcaatgggatccttagttcatgtgaaagaagccacagttattactccttccgaccaaacaccttcttctgttctgtctctctccgctttagattctcagcttttcctccgattcaccattgaatacctcctcgtttacccacccgtttccgacccggagtattctctctccggtcgtctcaaatccgctctctctcgcgctctcgttccttacttccctttctccggccgcgtccgagaaaaacccgacggcggcggaggtctcgaggtcaattgccgtggccaaggtgctctgtttcttgaagccgtctctgacatcctcacgtgccttgactttcagaaacctccccggcacgtgactagctggagaaagcttctttcgctccacgtcatcgatgtcctcgctggtgctccacctctcgtcgttcagctcacttggctccgtgacggtggtgctgctttagccgtcggtgttaaccactgcgtctccgatggaatcggtagcgccgagtttctcactttattcgccgagttatctaaagactcactgagtcaaaccgagttaaaacggaaacatctctgggatcgtcaattgcttatgccgtctccgattcgtgactcgttgagtcatcccgagttcaaccgtgttcccgatctatgcggattcgttaaccgattcaacgccgagcgactcgttcctacatcggttgtcttcgagagacagaaacttaacgagctaaagaaactcgcgagtcgactcggtgagttcaattctaaacacacatcgttcgaggtactctctgcacatgtatggcggagctgggcgagatcactgaacttgccatcgaatcaggtccttaagcttttgtttagcgtcaacattagagaccgagtcaaaccgagtctacccagtgggttctacgggaacgcattcgtcgtcggatgtgctcaaaccaccgtgaaagacttgacggagaaaggattaagctacgcgacgatgctcgtgaaacaagcgaaggagcgagtcggtgacgagtacgtcagatcggtggtggaagctgtgagcaaggagagagcgagtcctgactcggttggagtcttgatattgtcgcaatggtcacgtctcggtttagagaagcttgattttggtttgggtaaaccggttcatgttggatcggtctgttgcgaccgttactgtttgttgcttccgattcctgaacaaaatgacgccgttaaagtaatggtcgccgttccgtcaagctctgttgacacgtacgagaatcttgtgacgagtcctaacgcttagattagagaaaggataaattctaattttttactctttacgttttttacttttttacctttttctaaaataaattatgaactctcctccgttgacttgtaaaatatgagttttgacttattttattttaaatccatttttggttttctt

SEQ ID NO: 103784 - protein, 452 aa, Arabidopsis thaliana
  peptide (1)..(452): Ceres Seq. ID no. 13613544
  misc_feature (22)..(447): Pfam Name: Transferase family Pfam Description: Transferase family
  misc_feature (20)..(452): Homolog of NCBI NO: 15225663 NR Description: transferase family [Arabidopsis thaliana]
  misc_feature (23)..(444): Homolog of NCBI NO: 15217644 NR Description: transferase family [Arabidopsis thaliana]
  misc_feature (20)..(445): Homolog of NCBI NO: 34894074 NR Description: putative benzoyltransferase [Oryza sativa
  misc_feature (20)..(444): Homolog of NCBI NO: 34914932 NR Description: B1096D03.33 [Oryza sativa (japonica >gi|18461275|dbj|BAB84471.1| putative benzoyltransferase [Oryza
  misc_feature (24)..(444): Homolog of NCBI NO: 30693723 NR Description: transferase family [Arabidopsis thaliana]
  misc_feature (24)..(444): Homolog of NCBI NO: 30693725 NR Description: transferase family [Arabidopsis thaliana]
  misc_feature (24)..(444): Homolog of NCBI NO: 28380187 NR Description: Taxadien-5-alpha-ol O-acetyltransferase
  misc_feature (23)..(447): Homolog of NCBI NO: 21553692 NR Description: acyltransferase-like protein [Arabidopsis
  misc_feature (23)..(447): Homolog of NCBI NO: 15229017 NR Description: transferase family [Arabidopsis thaliana]
  misc_feature (23)..(447): Homolog of NCBI NO: 34222064 NR Description: At3g48720 [Arabidopsis thaliana]
LFISEEEEKQSIIRRKKKAMGSLVHVKEATVITPSDQTPSSVLSLSALDSQLFLRFTIEYLLVYPPVSDPEYSLSGRLKSALSRALVPYFPFSGRVREKPDGGGGLEVNCRGQGALFLEAVSDILTCLDFQKPPRHVTSWRKLLSLHVIDVLAGAPPLVVQLTWLRDGGAALAVGVNHCVSDGIGSAEFLTLFAELSKDSLSQTELKRKHLWDRQLLMPSPIRDSLSHPEFNRVPDLCGFVNRFNAERLVPTSVVFERQKLNELKKLASRLGEFNSKHTSFEVLSAHVWRSWARSLNLPSNQVLKLLFSVNIRDRVKPSLPSGFYGNAFVVGCAQTTVKDLTEKGLSYATMLVKQAKERVGDEYVRSVVEAVSKERASPDSVGVLILSQWSRLGLEKLDFGLGKPVHVGSVCCDRYCLLLPIPEQNDAVKVMVAVPSSSVDTYENLVTSPNA

SEQ ID NO: 103785 - protein, 433 aa, Arabidopsis thaliana; identical to SEQ ID NO: 39300
  peptide (1)..(433): Ceres Seq. ID no. 13613545
  misc_feature (3)..(428): Pfam Name: Transferase family Pfam Description: Transferase family
  misc_feature (1)..(433): Homolog of NCBI NO: 15225663 NR Description: transferase family [Arabidopsis thaliana]
  misc_feature (4)..(425): Homolog of NCBI NO: 15217644 NR Description: transferase family [Arabidopsis thaliana]
  misc_feature (1)..(426): Homolog of NCBI NO: 34894074 NR Description: putative benzoyltransferase [Oryza sativa
  misc_feature (1)..(425): Homolog of NCBI NO: 34914932 NR Description: B1096D03.33 [Oryza sativa (japonica >gi|18461275|dbj|BAB84471.1| putative benzoyltransferase [Oryza
  misc_feature (5)..(425): Homolog of NCBI NO: 30693723 NR Description: transferase family [Arabidopsis thaliana]
  misc_feature (5)..(425): Homolog of NCBI NO: 30693725 NR Description: transferase family [Arabidopsis thaliana]
  misc_feature (5)..(425): Homolog of NCBI NO: 28380187 NR Description: Taxadien-5-alpha-ol O-acetyltransferase
  misc_feature (4)..(428): Homolog of NCBI NO: 21553692 NR Description: acyltransferase-like protein [Arabidopsis
  misc_feature (4)..(428): Homolog of NCBI NO: 15229017 NR Description: transferase family [Arabidopsis thaliana]
  misc_feature (4)..(428): Homolog of NCBI NO: 34222064 NR Description: At3g48720 [Arabidopsis thaliana]

SEQ ID NO: 103786 - protein, 235 aa, Arabidopsis thaliana; identical to SEQ ID NO: 39301
  peptide (1)..(235): Ceres Seq. ID no. 13613546
  misc_feature (1)..(230): Pfam Name: Transferase family Pfam Description: Transferase family
  misc_feature (1)..(235): Homolog of NCBI NO: 15225663 NR Description: transferase family [Arabidopsis thaliana]
  misc_feature (1)..(227): Homolog of NCBI NO: 15217644 NR Description: transferase family [Arabidopsis thaliana]
  misc_feature (1)..(228): Homolog of NCBI NO: 34894074 NR Description: putative benzoyltransferase [Oryza sativa
  misc_feature (1)..(227): Homolog of NCBI NO: 34914932 NR Description: B1096D03.33 [Oryza sativa (japonica >gi|18461275|dbj|BAB84471.1| putative benzoyltransferase [Oryza
  misc_feature (1)..(227): Homolog of NCBI NO: 30693723 NR Description: transferase family [Arabidopsis thaliana]
  misc_feature (1)..(227): Homolog of NCBI NO: 30693725 NR Description: transferase family [Arabidopsis thaliana]
  misc_feature (1)..(227): Homolog of NCBI NO: 28380187 NR Description: Taxadien-5-alpha-ol O-acetyltransferase
  misc_feature (1)..(230): Homolog of NCBI NO: 21553692 NR Description: acyltransferase-like protein [Arabidopsis
  misc_feature (1)..(230): Homolog of NCBI NO: 15229017 NR Description: transferase family [Arabidopsis thaliana]
  misc_feature (1)..(230): Homolog of NCBI NO: 34222064 NR Description: At3g48720 [Arabidopsis thaliana]

SEQ ID NO: 103787 - DNA, 1602 bp, Arabidopsis thaliana
  misc_feature (1)..(1602): Ceres Seq. ID no. 13613549
  misc_feature: MA Experiment ID: 20000307 Result: Up-regulated in Transcription
  misc_feature: MA Experiment 20000307 PARAMETER Experiment Name: At_Germinating_Seeds_Sub_P Parameter: Age (hr) Value: 24 vs. 0
  misc_feature: MA Experiment 20000307 PARAMETER Experiment Name: At_Germinating_Seeds_Sub_P Parameter: Organism Value: A. thaliana
  misc_feature: MA Experiment 20000307 PARAMETER Experiment Name: At_Germinating_Seeds_Sub_P Parameter: Plant Line Value: WS
  misc_feature: MA Experiment 20000307 PARAMETER Experiment Name: At_Germinating_Seeds_Sub_P Parameter: Tissue Value: Germinating Seeds
  misc_feature: MA Experiment ID: 20000315 Result: Down-regulated in Transcription
  misc_feature: MA Experiment 20000315 PARAMETER Experiment Name: At_14day_Shoots-Roots_Sub_P Parameter: Age (day) Value: 14
  misc_feature: MA Experiment 20000315 PARAMETER Experiment Name: At_14day_Shoots-Roots_Sub_P Parameter: Organism Value: A. thaliana
  misc_feature: MA Experiment 20000315 PARAMETER Experiment Name: At_14day_Shoots-Roots_Sub_P Parameter: Plant Line Value: WS
  misc_feature: MA Experiment 20000315 PARAMETER Experiment Name: At_14day_Shoots-Roots_Sub_P Parameter: Tissue Value: Shoots vs. Whole Plant
agtatttcttgaagcaattccaaaataaagttcttttggcttcctcctcccacattcttatttggttgaggagaatgagatcatcaagaacacaaagtgttcatttcttaattttatctcctcttttcctaataatataaaatttgaaatcacatttgtaacactaattctcaaatcctaaacatgaaaccttcatcaccaatttcactcactagttcttcaattgctagaaaagctcgtttttctccttacctcttcacactcttagccttcattcttttcgtctctgtcctctatggtgaagattttatgtgcatctttggacagctcgagcctaacttcgtcctcccgccttctcgaacacccgaaaagaataagaaatcggagaagcttgcgtttgctattggtaaaacagaggaaagctgtgacgttttcagcgggaaatgggtgagagatgaagtctcccgaccactgtatgaggaatgggagtgtccgtacattcaacctcagcttacatgtcaagaacacggccgtcccgacaaagactaccagttttggcggtggcagcctaatcactgcgatcttccctcgttcaacgcgtcactgatgctggagacattaagagggaagaggatgatgtatgtaggagactcgttaaaccgtggaatgtttgtatcaatgatttgtcttcttcatcgtcttattcctgaagatcagaaatcaattaaaaccaatggttccctcactgtcttcactgccaaggagtataacgcgacgatagagttctattgggcaccgtttcttctagaatcgaattcagacgatgcaattgtccatagaatatcggatagggttgtgagaaaaggatcaattaacaaacatggtcgtcactggaaaggagtcgatataatcatcttcaacacttatctgtggtggatgactggattgaagatgaacatcttgcaaggatcgtttgatgataaagagaagaatatcgtagaggtttcgactgaagatgcgtaccggatgggtatgaagagtatgttgagatgggtgaagaacaacatggatcgtaagaaaactagggtcttcttcactagcatgtctccaacgcatgccaaggggatagattggggaggtgaaccgggtcagaattgctataatcagacaacacttatagaagatccaagctactggggatcagattgtaggaaaagcataatgaaagtgattggagaagtgtttggaagatcgaaaacaccgataacgttactgaacataacgcaaatgtcgaattacaggaaagatgcacatacgtcgatatacaagaagcagtggagtccacttacagcggagcagctggagaatccaacgagctatgcggattgtgtacattggtgcttgcctggccttcaagatacttggaatgagcttctctttgctaaacttttctatacttgagataagagaaaacatttttttcctttgaagacgacagcgctttttgagtttggaaagagatcttgtggagaaattgtaaaatttagtcattgaattgatattgtcttttttggttgtgagataaaaaggtttgacaaatcg

SEQ ID NO: 103788 - protein, 425 aa, Arabidopsis thaliana
  peptide (1)..(425): Ceres Seq. ID no. 13613550
  misc_feature (251)..(422): Pfam Name: Arabidopsis proteins of unknown function Pfam Description: Arabidopsis proteins of unknown function
  misc_feature (1)..(425): Homolog of NCBI NO: 28393743 NR Description: unknown protein [Arabidopsis thaliana]
  misc_feature (1)..(425): Homolog of NCBI NO: 15226647 NR Description: expressed protein [Arabidopsis thaliana]
  misc_feature (78)..(425): Homolog of NCBI NO: 4588008 NR Description: hypothetical protein [Arabidopsis thaliana]
  misc_feature (56)..(424): Homolog of NCBI NO: 15228429 NR Description: expressed protein [Arabidopsis thaliana] unknown protein [Arabidopsis thaliana] unknown protein [Arabidopsis thaliana]
  misc_feature (8)..(43): Homolog of NCBI NO: 15228429 NR Description: expressed protein [Arabidopsis thaliana] unknown protein [Arabidopsis thaliana] unknown protein [Arabidopsis thaliana]
  misc_feature (16)..(424): Homolog of NCBI NO: 28876013 NR Description: unknown protein [Oryza sativa (japonica
  misc_feature (63)..(424): Homolog of NCBI NO: 28876024 NR Description: unknown protein [Oryza sativa (japonica
  misc_feature (74)..(419): Homolog of NCBI NO: 18413698 NR Description: expressed protein [Arabidopsis thaliana] expressed protein [Arabidopsis thaliana] unknown protein [Arabidopsis thaliana]
  misc_feature (74)..(419): Homolog of NCBI NO: 11291876 NR Description: hypothetical protein F7A7.140 - Arabidopsis >gi|7327821|emb|CAB82278.1| putative protein [Arabidopsis
  misc_feature (74)..(419): Homolog of NCBI NO: 21536676 NR Description: unknown [Arabidopsis thaliana]
MKPSSPISLTSSSIARKARFSPYLFTLLAFILFVSVLYGEDFMCIFGQLEPNFVLPPSRTPEKNKKSEKLAFAIGKTEESCDVFSGKWVRDEVSRPLYEEWECPYIQPQLTCQEHGRPDKDYQFWRWQPNHCDLPSFNASLMLETLRGKRMMYVGDSLNRGMFVSMICLLHRLIPEDQKSIKTNGSLTVFTAKEYNATIEFYWAPFLLESNSDDAIVHRISDRVVRKGSINKHGRHWKGVDIIIFNTYLWWMTGLKMNILQGSFDDKEKNIVEVSTEDAYRMGMKSMLRWVKNNMDRKKTRVFFTSMSPTHAKGIDWGGEPGQNCYNQTTLIEDPSYWGSDCRKSIMKVIGEVFGRSKTPITLLNITQMSNYRKDAHTSIYKKQWSPLTAEQLENPTSYADCVHWCLPGLQDTWNELLFAKLFYT

SEQ ID NO: 103789 - protein, 383 aa, Arabidopsis thaliana
  peptide (1)..(383): Ceres Seq. ID no. 13613551
  misc_feature (209)..(380): Pfam Name: Arabidopsis proteins of unknown function Pfam Description: Arabidopsis proteins of unknown function
  misc_feature (1)..(383): Homolog of NCBI NO: 28393743 NR Description: unknown protein [Arabidopsis thaliana]
  misc_feature (1)..(383): Homolog of NCBI NO: 15226647 NR Description: expressed protein [Arabidopsis thaliana]
  misc_feature (36)..(383): Homolog of NCBI NO: 4588008 NR Description: hypothetical protein [Arabidopsis thaliana]
  misc_feature (14)..(382): Homolog of NCBI NO: 15228429 NR Description: expressed protein [Arabidopsis thaliana] unknown protein [Arabidopsis thaliana] unknown protein [Arabidopsis thaliana]
  misc_feature (1)..(382): Homolog of NCBI NO: 28876013 NR Description: unknown protein [Oryza sativa (japonica
  misc_feature (21)..(382): Homolog of NCBI NO: 28876024 NR Description: unknown protein [Oryza sativa (japonica
  misc_feature (32)..(377): Homolog of NCBI NO: 18413698 NR Description: expressed protein [Arabidopsis thaliana] expressed protein [Arabidopsis thaliana] unknown protein [Arabidopsis thaliana]
  misc_feature (32)..(377): Homolog of NCBI NO: 11291876 NR Description: hypothetical protein F7A7.140 - Arabidopsis >gi|7327821|emb|CAB82278.1| putative protein [Arabidopsis
  misc_feature (32)..(377): Homolog of NCBI NO: 21536676 NR Description: unknown [Arabidopsis thaliana]
  misc_feature (16)..(380): Homolog of NCBI NO: 18412850 NR Description: expressed protein [Arabidopsis thaliana]
MCIFGQLEPNFVLPPSRTPEKNKKSEKLAFAIGKTEESCDVFSGKWVRDEVSRPLYEEWECPYIQPQLTCQEHGRPDKDYQFWRWQPNHCDLPSFNASLMLETLRGKRMMYVGDSLNRGMFVSMICLLHRLIPEDQKSIKTNGSLTVFTAKEYNATIEFYWAPFLLESNSDDAIVHRISDRVVRKGSINKHGRHWKGVDIIIFNTYLWWMTGLKMNILQGSFDDKEKNIVEVSTEDAYRMGMKSMLRWVKNNMDRKKTRVFFTSMSPTHAKGIDWGGEPGQNCYNQTTLIEDPSYWGSDCRKSIMKVIGEVFGRSKTPITLLNITQMSNYRKDAHTSIYKKQWSPLTAEQLENPTSYADCVHWCLPGLQDTWNELLFAKLFYT

SEQ ID NO: 103790 - protein, 284 aa, Arabidopsis thaliana
  peptide (1)..(284): Ceres Seq. ID no. 13613552
  misc_feature (110)..(281): Pfam Name: Arabidopsis proteins of unknown function Pfam Description: Arabidopsis proteins of unknown function
  misc_feature (1)..(284): Homolog of NCBI NO: 28393743 NR Description: unknown protein [Arabidopsis thaliana]
  misc_feature (1)..(284): Homolog of NCBI NO: 15226647 NR Description: expressed protein [Arabidopsis thaliana]
  misc_feature (1)..(284): Homolog of NCBI NO: 4588008 NR Description: hypothetical protein [Arabidopsis thaliana]
  misc_feature (1)..(283): Homolog of NCBI NO: 15228429 NR Description: expressed protein [Arabidopsis thaliana] unknown protein [Arabidopsis thaliana] unknown protein [Arabidopsis thaliana]
  misc_feature (1)..(283): Homolog of NCBI NO: 28876013 NR Description: unknown protein [Oryza sativa (japonica
  misc_feature (1)..(283): Homolog of NCBI NO: 28876024 NR Description: unknown protein [Oryza sativa (japonica
  misc_feature (1)..(278): Homolog of NCBI NO: 18413698 NR Description: expressed protein [Arabidopsis thaliana] expressed protein [Arabidopsis thaliana] unknown protein [Arabidopsis thaliana]
  misc_feature (1)..(278): Homolog of NCBI NO: 11291876 NR Description: hypothetical protein F7A7.140 - Arabidopsis >gi|7327821|emb|CAB82278.1| putative protein [Arabidopsis
  misc_feature (1)..(278): Homolog of NCBI NO: 21536676 NR Description: unknown [Arabidopsis thaliana]
  misc_feature (1)..(281): Homolog of NCBI NO: 18412850 NR Description: expressed protein [Arabidopsis thaliana]
MLETLRGKRMMYVGDSLNRGMFVSMICLLHRLIPEDQKSIKTNGSLTVFTAKEYNATIEFYWAPFLLESNSDDAIVHRISDRVVRKGSINKHGRHWKGVDIIIFNTYLWWMTGLKMNILQGSFDDKEKNIVEVSTEDAYRMGMKSMLRWVKNNMDRKKTRVFFTSMSPTHAKGIDWGGEPGQNCYNQTTLIEDPSYWGSDCRKSIMKVIGEVFGRSKTPITLLNITQMSNYRKDAHTSIYKKQWSPLTAEQLENPTSYADCVHWCLPGLQDTWNELLFAKLFYT

SEQ ID NO: 103791 - DNA, 1383 bp, Arabidopsis thaliana
  misc_feature (1)..(1383): Ceres Seq. ID no. 13613553
  misc_feature: MA Experiment ID: 108434 Result: Down-regulated in Transcription
  misc_feature: MA Experiment 108434 PARAMETER Experiment Name: At_Root_Tips_cDNA_P Parameter: Tissue Value: Root Tips
  misc_feature: MA Experiment ID: 108435 Result: Down-regulated in Transcription
  misc_feature: MA Experiment 108435 PARAMETER Experiment Name: At_stm_Mutants_cDNA_P Parameter: Plant Line Value: wt Landsburg vs stm
  misc_feature: MA Experiment 108435 PARAMETER Experiment Name: At_stm_Mutants_cDNA_P Parameter: Tissue Value: Shoot Apical Meristem Region
  misc_feature: MA Experiment ID: 108461 Result: Down-regulated in Transcription
  misc_feature: MA Experiment 108461 PARAMETER Experiment Name: At_Germinating_Seeds_cDNA_P Parameter: Age (day) Value: 1 vs. 0
  misc_feature: MA Experiment 108461 PARAMETER Experiment Name: At_Germinating_Seeds_cDNA_P Parameter: Tissue Value: Germinating Seeds
  misc_feature: MA Experiment ID: 108462 Result: Down-regulated in Transcription
  misc_feature: MA Experiment 108462 PARAMETER Experiment Name: At_Germinating_Seeds_cDNA_P Parameter: Age (day) Value: 2 vs. 0
  misc_feature: MA Experiment 108462 PARAMETER Experiment Name: At_Germinating_Seeds_cDNA_P Parameter: Tissue Value: Germinating Seeds
  misc_feature: MA Experiment ID: 108463 Result: Down-regulated in Transcription
  misc_feature: MA Experiment 108463 PARAMETER Experiment Name: At_Germinating_Seeds_cDNA_P Parameter: Age (day) Value: 3 vs. 0
  misc_feature: MA Experiment 108463 PARAMETER Experiment Name: At_Germinating_Seeds_cDNA_P Parameter: Tissue Value: Germinating Seeds
  misc_feature: MA Experiment ID: 108464 Result: Down-regulated in Transcription
  misc_feature: MA Experiment 108464 PARAMETER Experiment Name: At_Germinating_Seeds_cDNA_P Parameter: Age (day) Value: 4 vs. 0
  misc_feature: MA Experiment 108464 PARAMETER Experiment Name: At_Germinating_Seeds_cDNA_P Parameter: Tissue Value: Germinating Seeds
  misc_feature: MA Experiment ID: 108473 Result: Up-regulated in Transcription
  misc_feature: MA Experiment 108473 PARAMETER Experiment Name: At_Drought_Flowers_cDNA_P Parameter: Timepoint (hr) Value: 7 d
  misc_feature: MA Experiment 108473 PARAMETER Experiment Name: At_Drought_Flowers_cDNA_P Parameter: Tissue Value: Flower
  misc_feature: MA Experiment 108473 PARAMETER Experiment Name: At_Drought_Flowers_cDNA_P Parameter: Treatment Value: Drought vs. No Drought
  misc_feature: MA Experiment ID: 108488 Result: Down-regulated in Transcription
  misc_feature: MA Experiment ID: 108561 Result: Up-regulated in Transcription
  misc_feature: MA Experiment 108561 PARAMETER Experiment Name: At_100uM_ABA_cDNA_P Parameter: Timepoint (hr) Value: 6
  misc_feature: MA Experiment 108561 PARAMETER Experiment Name: At_100uM_ABA_cDNA_P Parameter: Tissue Value: Aerial
  misc_feature: MA Experiment 108561 PARAMETER Experiment Name: At_100uM_ABA_cDNA_P Parameter: Treatment Value: 100uM ABA vs. No Treatment
  misc_feature: MA Experiment ID: 108573 Result: Up-regulated in Transcription
  misc_feature: MA Experiment 108573 PARAMETER Experiment Name: At_Drought_cDNA_P Parameter: Timepoint (hr) Value: 6
  misc_feature: MA Experiment 108573 PARAMETER Experiment Name: At_Drought_cDNA_P Parameter: Tissue Value: Aerial
  misc_feature: MA Experiment 108573 PARAMETER Experiment Name: At_Drought_cDNA_P Parameter: Treatment Value: Drought vs. No Drought
  misc_feature: MA Experiment ID: 108574 Result: Up-regulated in Transcription
  misc_feature: MA Experiment 108574 PARAMETER Experiment Name: At_Wounding__cDNA_P Parameter: Timepoint (hr) Value: 1
  misc_feature: MA Experiment 108574 PARAMETER Experiment Name: At_Wounding__cDNA_P Parameter: Tissue Value: Aerial
  misc_feature: MA Experiment 108574 PARAMETER Experiment Name: At_Wounding__cDNA_P Parameter: Treatment Value: Wounding vs. No Wounding
  misc_feature: MA Experiment ID: 108576 Result: Up-regulated in Transcription
  misc_feature: MA Experiment 108576 PARAMETER Experiment Name: At_42deg_Heat_cDNA_P Parameter: Temperature (deg C) Value: 42 vs. 22
  misc_feature: MA Experiment 108576 PARAMETER Experiment Name: At_42deg_Heat_cDNA_P Parameter: Timepoint (hr) Value: 1
  misc_feature: MA Experiment 108576 PARAMETER Experiment Name: At_42deg_Heat_cDNA_P Parameter: Tissue Value: Aerial
  misc_feature: MA Experiment ID: 108579 Result: Up-regulated in Transcription
  misc_feature: MA Experiment 108579 PARAMETER Experiment Name: At_4deg_Cold_cDNA_P Parameter: Temperature (deg C) Value: 4 vs. 22
  misc_feature: MA Experiment 108579 PARAMETER Experiment Name: At_4deg_Cold_cDNA_P Parameter: Timepoint (hr) Value: 6
  misc_feature: MA Experiment 108579 PARAMETER Experiment Name: At_4deg_Cold_cDNA_P Parameter: Tissue Value: Aerial
  misc_feature: MA Experiment ID: 108585 Result: Up-regulated in Transcription
  misc_feature: MA Experiment 108585 PARAMETER Experiment Name: At_5mM_NaNP_cDNA_P Parameter: Timepoint (hr) Value: 6
  misc_feature: MA Experiment 108585 PARAMETER Experiment Name: At_5mM_NaNP_cDNA_P Parameter: Tissue Value: Aerial
  misc_feature: MA Experiment 108585 PARAMETER Experiment Name: At_5mM_NaNP_cDNA_P Parameter: Treatment Value: null
  misc_feature: MA Experiment ID: 108595 Result: Up-regulated in Transcription
  misc_feature: MA Experiment 108595 PARAMETER Experiment Name: At_Ler-pi_Ovule_cDNA_P Parameter: Plant Line Value: null
  misc_feature: MA Experiment ID: 108668 Result: Up-regulated in Transcription
  misc_feature: MA Experiment 108668 PARAMETER Experiment Name: At_2mM_SA_cDNA_P Parameter: Plant Line Value: WS
  misc_feature: MA Experiment 108668 PARAMETER Experiment Name: At_2mM_SA_cDNA_P Parameter: Timepoint (hr) Value: 6
  misc_feature: MA Experiment 108668 PARAMETER Experiment Name: At_2mM_SA_cDNA_P Parameter: Treatment Value: 2mM SA vs. No Treatment
  misc_feature: MA Experiment ID: 20000072 Result: Up-regulated in Transcription
  misc_feature: MA Experiment 20000072 PARAMETER Experiment Name: At_100uM_ABA_Mutants_cDNA_P Parameter: Plant Line Value: CS8105
  misc_feature: MA Experiment 20000072 PARAMETER Experiment Name: At_100uM_ABA_Mutants_cDNA_P Parameter: Timepoint (hr) Value: 6
  misc_feature: MA Experiment 20000072 PARAMETER Experiment Name: At_100uM_ABA_Mutants_cDNA_P Parameter: Tissue Value: Aerial
  misc_feature: MA Experiment 20000072 PARAMETER Experiment Name: At_100uM_ABA_Mutants_cDNA_P Parameter: Treatment Value: 100uM ABA vs. No Treatment
  misc_feature: MA Experiment ID: 20000086 Result: Up-regulated in Transcription
  misc_feature: MA Experiment 20000086 PARAMETER Experiment Name: At_100uM_ABA_Mutants_cDNA_P Parameter: Plant Line Value: CS22
  misc_feature: MA Experiment 20000086 PARAMETER Experiment Name: At_100uM_ABA_Mutants_cDNA_P Parameter: Timepoint (hr) Value: 6
  misc_feature: MA Experiment 20000086 PARAMETER Experiment Name: At_100uM_ABA_Mutants_cDNA_P Parameter: Tissue Value: Aerial
  misc_feature: MA Experiment 20000086 PARAMETER Experiment Name: At_100uM_ABA_Mutants_cDNA_P Parameter: Treatment Value: 100uM ABA vs. No Treatment
  misc_feature: MA Experiment ID: 20000087 Result: Up-regulated in Transcription
  misc_feature: MA Experiment 20000087 PARAMETER Experiment Name: At_100uM_ABA_Mutants_cDNA_P Parameter: Plant Line Value: WS
  misc_feature: MA Experiment 20000087 PARAMETER Experiment Name: At_100uM_ABA_Mutants_cDNA_P Parameter: Timepoint (hr) Value: 6
  misc_feature: MA Experiment 20000087 PARAMETER Experiment Name: At_100uM_ABA_Mutants_cDNA_P Parameter: Tissue Value: Aerial
  misc_feature: MA Experiment 20000087 PARAMETER Experiment Name: At_100uM_ABA_Mutants_cDNA_P Parameter: Treatment Value: 100uM ABA vs. No Treatment
  misc_feature: MA Experiment ID: 20000090 Result: Up-regulated in Transcription
  misc_feature: MA Experiment ID: 20000111 Result: Up-regulated in Transcription
  misc_feature: MA Experiment 20000111 PARAMETER Experiment Name: At_42deg_Heat_cDNA_P Parameter: Temperature (deg C) Value: 42 vs. 22
  misc_feature: MA Experiment 20000111 PARAMETER Experiment Name: At_42deg_Heat_cDNA_P Parameter: Timepoint (hr) Value: 6
  misc_feature: MA Experiment 20000111 PARAMETER Experiment Name: At_42deg_Heat_cDNA_P Parameter: Tissue Value: Aerial
  misc_feature: MA Experiment ID: 20000113 Result: Up-regulated in Transcription
  misc_feature: MA Experiment 20000113 PARAMETER Experiment Name: At_42deg_Heat_cDNA_P Parameter: Temperature (deg C) Value: 42 vs. 22
  misc_feature: MA Experiment 20000113 PARAMETER Experiment Name: At_42deg_Heat_cDNA_P Parameter: Timepoint (hr) Value: 8
  misc_feature: MA Experiment 20000113 PARAMETER Experiment Name: At_42deg_Heat_cDNA_P Parameter: Tissue Value: Aerial
  misc_feature: MA Experiment ID: 20000144 Result: Up-regulated in Transcription
  misc_feature: MA Experiment 20000144 PARAMETER Experiment Name: At_42deg_Heat_cDNA_P Parameter: Temperature (deg C) Value: 42 vs. 22
  misc_feature: MA Experiment 20000144 PARAMETER Experiment Name: At_42deg_Heat_cDNA_P Parameter: Timepoint (hr) Value: 1
  misc_feature: MA Experiment 20000144 PARAMETER Experiment Name: At_42deg_Heat_cDNA_P Parameter: Tissue Value: Aerial
  misc_feature: MA Experiment ID: 20000173 Result: Up-regulated in Transcription
  misc_feature: MA Experiment 20000173 PARAMETER Experiment Name: At_42deg_Heat_P Parameter: Age (day) Value: 14
  misc_feature: MA Experiment 20000173 PARAMETER Experiment Name: At_42deg_Heat_P Parameter: Organism Value: A. thaliana
  misc_feature: MA Experiment 20000173 PARAMETER Experiment Name: At_42deg_Heat_P Parameter: Plant Line Value: WS
  misc_feature: MA Experiment 20000173 PARAMETER Experiment Name: At_42deg_Heat_P Parameter: Temperature (deg C) Value: 42 vs. 22
  misc_feature: MA Experiment 20000173 PARAMETER Experiment Name: At_42deg_Heat_P Parameter: Timepoint (hr) Value: 6
  misc_feature: MA Experiment 20000173 PARAMETER Experiment Name: At_42deg_Heat_P Parameter: Tissue Value: Aerial
  misc_feature: MA Experiment ID: 20000180 Result: Down-regulated in Transcription
  misc_feature: MA Experiment 20000180 PARAMETER Experiment Name: At_Germinating_Seeds_P Parameter: Age (hr) Value: 24 vs. 0
  misc_feature: MA Experiment 20000180 PARAMETER Experiment Name: At_Germinating_Seeds_P Parameter: Tissue Value: Germinating Seeds
  misc_feature: MA Experiment ID: 20000182 Result: Up-regulated in Transcription
  misc_feature: MA Experiment 20000182 PARAMETER Experiment Name: At_2mM_SA_P Parameter: Age (day) Value: 14
  misc_feature: MA Experiment 20000182 PARAMETER Experiment Name: At_2mM_SA_P Parameter: Organism Value: A. thaliana
  misc_feature: MA Experiment 20000182 PARAMETER Experiment Name: At_2mM_SA_P Parameter: Plant Line Value: WS
  misc_feature: MA Experiment 20000182 PARAMETER Experiment Name: At_2mM_SA_P Parameter: Timepoint (hr) Value: 6
  misc_feature: MA Experiment 20000182 PARAMETER Experiment Name: At_2mM_SA_P Parameter: Tissue Value: Aerial
  misc_feature: MA Experiment 20000182 PARAMETER Experiment Name: At_2mM_SA_P Parameter: Treatment Value: 2mM SA vs. No Treatment
  misc_feature: MA Experiment ID: 20000224 Result: Down-regulated in Transcription
  misc_feature: MA Experiment ID: 20000436 Result: Up-regulated in Transcription
  misc_feature: MA Experiment 20000436 PARAMETER Experiment Name: At_Drought_P Parameter: Age (day) Value: 7
  misc_feature: MA Experiment 20000436 PARAMETER Experiment Name: At_Drought_P Parameter: Organism Value: A. thaliana
  misc_feature: MA Experiment 20000436 PARAMETER Experiment Name: At_Drought_P Parameter: Plant Line Value: WS
  misc_feature: MA Experiment 20000436 PARAMETER Experiment Name: At_Drought_P Parameter: Timepoint (hr) Value: 12
  misc_feature: MA Experiment 20000436 PARAMETER Experiment Name: At_Drought_P Parameter: Tissue Value: Whole Plant
  misc_feature: MA Experiment 20000436 PARAMETER Experiment Name: At_Drought_P Parameter: Treatment Value: Drought vs. No Drought
  misc_feature: MA Experiment ID: 20000439 Result: Down-regulated in Transcription
  misc_feature: MA Experiment 20000439 PARAMETER Experiment Name: At_Roots__P Parameter: Age (day) Value: 14 vs. 21
  misc_feature: MA Experiment 20000439 PARAMETER Experiment Name: At_Roots__P Parameter: Organism Value: A. thaliana
  misc_feature: MA Experiment 20000439 PARAMETER Experiment Name: At_Roots__P Parameter: Tissue Value: Roots vs. Whole Plant
  misc_feature: MA Experiment ID: 20000573 Result: Up-regulated in Transcription
  misc_feature: MA Experiment 20000573 PARAMETER Experiment Name: At_100uM_ABA_Mutants__P Parameter: Organism Value: A. thaliana
  misc_feature: MA Experiment 20000573 PARAMETER Experiment Name: At_100uM_ABA_Mutants__P Parameter: Plant Line Value: CS22 vs. Ler wt
  misc_feature: MA Experiment 20000573 PARAMETER Experiment Name: At_100uM_ABA_Mutants__P Parameter: Timepoint (hr) Value: N/A
  misc_feature: MA Experiment 20000573 PARAMETER Experiment Name: At_100uM_ABA_Mutants__P Parameter: Tissue Value: Whole Plant
  misc_feature: MA Experiment 20000573 PARAMETER Experiment Name: At_100uM_ABA_Mutants__P Parameter: Treatment Value: None
  misc_feature: MA Experiment ID: 20000709 Result: Up-regulated in Transcription
  misc_feature: MA Experiment 20000709 PARAMETER Experiment Name: At_15mM_NH4NO3_L-to-H_P Parameter: Age (hr) Value: 14
  misc_feature: MA Experiment 20000709 PARAMETER Experiment Name: At_15mM_NH4NO3_L-to-H_P Parameter: Organism Value: A. thaliana
  misc_feature: MA Experiment 20000709 PARAMETER Experiment Name: At_15mM_NH4NO3_L-to-H_P Parameter: Plant Line Value: WS
  misc_feature: MA Experiment 20000709 PARAMETER Experiment Name: At_15mM_NH4NO3_L-to-H_P Parameter: Timepoint (hr) Value: 4
  misc_feature: MA Experiment 20000709 PARAMETER Experiment Name: At_15mM_NH4NO3_L-to-H_P Parameter: Tissue Value: Aerial
  misc_feature: MA Experiment 20000709 PARAMETER Experiment Name: At_15mM_NH4NO3_L-to-H_P Parameter: Treatment Value: 15mM NH4NO3 vs. 30mM Mannitol
  misc_feature: MA Experiment ID: 20000794 Result: Up-regulated in Transcription
  misc_feature: MA Experiment 20000794 PARAMETER Experiment Name: At_Petals_P Parameter: Age (day) Value: 23-25 days
  misc_feature: MA Experiment 20000794 PARAMETER Experiment Name: At_Petals_P Parameter: Plant Line Value: WS
  misc_feature: MA Experiment 20000794 PARAMETER Experiment Name: At_Petals_P Parameter: Tissue Value: Petals vs. Whole plant
  misc_feature: MA Experiment ID: 20001451 Result: Down-regulated in Transcription
  misc_feature: MA Experiment 20001451 PARAMETER Experiment Name: At_Far-red-induction_P Parameter: Age (day) Value: 7
  misc_feature: MA Experiment 20001451 PARAMETER Experiment Name: At_Far-red-induction_P Parameter: Light Value: Far-red vs. White
  misc_feature: MA Experiment 20001451 PARAMETER Experiment Name: At_Far-red-induction_P Parameter: Organism Value: A. thaliana
  misc_feature: MA Experiment 20001451 PARAMETER Experiment Name: At_Far-red-induction_P Parameter: Plant Line Value: Columbia
  misc_feature: MA Experiment 20001451 PARAMETER Experiment Name: At_Far-red-induction_P Parameter: Timepoint (hr) Value: 24
  misc_feature: MA Experiment 20001451 PARAMETER Experiment Name: At_Far-red-induction_P Parameter: Tissue Value: Whole Plant
  misc_feature: MA Experiment ID: 20001458 Result: Up-regulated in Transcription
  misc_feature: MA Experiment 20001458 PARAMETER Experiment Name: At_50mM_NH4NO3_L-to-H_P Parameter: Age (day) Value: Undefined
  misc_feature: MA Experiment 20001458 PARAMETER Experiment Name: At_50mM_NH4NO3_L-to-H_P Parameter: Organism Value: Undefined
  misc_feature: MA Experiment 20001458 PARAMETER Experiment Name: At_50mM_NH4NO3_L-to-H_P Parameter: Plant Line Value: Undefined
  misc_feature: MA Experiment 20001458 PARAMETER Experiment Name: At_50mM_NH4NO3_L-to-H_P Parameter: Timepoint (hr) Value: 2
  misc_feature: MA Experiment 20001458 PARAMETER Experiment Name: At_50mM_NH4NO3_L-to-H_P Parameter: Tissue Value: Siliques
  misc_feature: MA Experiment 20001458 PARAMETER Experiment Name: At_50mM_NH4NO3_L-to-H_P Parameter: Treatment Value: 50mM NH4NO3 vs. 100mM Manitol
  misc_feature: MA Experiment ID: 20001557 Result: Up-regulated in Transcription
  misc_feature: MA Experiment 20001557 PARAMETER Experiment Name: At_Drought_Soil_Dry_P Parameter: Age (day) Value: 27
  misc_feature: MA Experiment 20001557 PARAMETER Experiment Name: At_Drought_Soil_Dry_P Parameter: Organism Value: A. thaliana
  misc_feature: MA Experiment 20001557 PARAMETER Experiment Name: At_Drought_Soil_Dry_P Parameter: Plant Line Value: WS
  misc_feature: MA Experiment 20001557 PARAMETER Experiment Name: At_Drought_Soil_Dry_P Parameter: Post Timepoint (hr) Value: 3
  misc_feature: MA Experiment 20001557 PARAMETER Experiment Name: At_Drought_Soil_Dry_P Parameter: Post-Treatment Value: Re-Water vs. No Drought
  misc_feature: MA Experiment 20001557 PARAMETER Experiment Name: At_Drought_Soil_Dry_P Parameter: Timepoint (day) Value: 13
  misc_feature: MA Experiment 20001557 PARAMETER Experiment Name: At_Drought_Soil_Dry_P Parameter: Treatment Value: Drought vs. No Drought
  misc_feature: MA Experiment ID: 20001560 Result: Up-regulated in Transcription
  misc_feature: MA Experiment 20001560 PARAMETER Experiment Name: At_Drought_Soil_Dry_P Parameter: Age (day) Value: 28
  misc_feature: MA Experiment 20001560 PARAMETER Experiment Name: At_Drought_Soil_Dry_P Parameter: Organism Value: A. thaliana
  misc_feature: MA Experiment 20001560 PARAMETER Experiment Name: At_Drought_Soil_Dry_P Parameter: Plant Line Value: WS
  misc_feature: MA Experiment 20001560 PARAMETER Experiment Name: At_Drought_Soil_Dry_P Parameter: Post Timepoint (hr) Value: None
  misc_feature: MA Experiment 20001560 PARAMETER Experiment Name: At_Drought_Soil_Dry_P Parameter: Post-Treatment Value: None
  misc_feature: MA Experiment 20001560 PARAMETER Experiment Name: At_Drought_Soil_Dry_P Parameter: Timepoint (day) Value: 14
  misc_feature: MA Experiment 20001560 PARAMETER Experiment Name: At_Drought_Soil_Dry_P Parameter: Treatment Value: Drought vs. No Drought
  misc_feature: MA Experiment ID: 20001905 Result: Up-regulated in Transcription
  misc_feature: MA Experiment 20001905 PARAMETER Experiment Name: At_Drought_Reproduction_P Parameter: Age (day) Value: 40
  misc_feature: MA Experiment 20001905 PARAMETER Experiment Name: At_Drought_Reproduction_P Parameter: Organism Value: A. thaliana
  misc_feature: MA Experiment 20001905 PARAMETER Experiment Name: At_Drought_Reproduction_P Parameter: Plant Line Value: WS
  misc_feature: MA Experiment 20001905 PARAMETER Experiment Name: At_Drought_Reproduction_P Parameter: Timepoint (day) Value: 10
  misc_feature: MA Experiment 20001905 PARAMETER Experiment Name: At_Drought_Reproduction_P Parameter: Tissue Value: Rosettes
  misc_feature: MA Experiment 20001905 PARAMETER Experiment Name: At_Drought_Reproduction_P Parameter: Treatment Value: Drought vs. No Drought
  misc_feature: MA Experiment ID: 20001911 Result: Up-regulated in Transcription
  misc_feature: MA Experiment 20001911 PARAMETER Experiment Name: At_Drought_Reproduction_P Parameter: Age (day) Value: 40
  misc_feature: MA Experiment 20001911 PARAMETER Experiment Name: At_Drought_Reproduction_P Parameter: Organism Value: A. thaliana
  misc_feature: MA Experiment 20001911 PARAMETER Experiment Name: At_Drought_Reproduction_P Parameter: Plant Line Value: WS
  misc_feature: MA Experiment 20001911 PARAMETER Experiment Name: At_Drought_Reproduction_P Parameter: Timepoint (day) Value: 10
  misc_feature: MA Experiment 20001911 PARAMETER Experiment Name: At_Drought_Reproduction_P Parameter: Tissue Value: Flowers
  misc_feature: MA Experiment 20001911 PARAMETER Experiment Name: At_Drought_Reproduction_P Parameter: Treatment Value: Drought vs. No Drought
aaacctttctcttctctgctaacgagaaaacaaaagctatcgtctttgctactactactactactattattacattgaatcctttgtgttcttcttcttcagctgctactttgttcgagtgctttcttacatgccgtcggagattgttgacaggaaaaggaagtctcgtggaacacgagatgtagctgagattctaaggcaatggagagagtacaatgagcagattgaggcagaatcttgtatcgatggtggtggtccaaaatcaatccgaaagcctcctccaaaaggttcgaggaagggttgtatgaaaggtaaaggtggacctgaaaacgggatttgtgactatagaggagttagacagaggagatggggtaaatgggttgctgagatccgtgagccagacggaggtgctaggttgtggctcggtactttctccagttcatatgaagctgcattggcttatgacgaggcggccaaagctatatatggtcagtctgccagactcaatcttcccgagatcacaaatcgctcttcttcgactgctgccactgccactgtgtcaggctcggttactgcattttctgatgaatctgaagtttgtgcacgtgaggatacaaatgcaagttcaggttttggtcaggtgaaactagaggattgtagcgatgaatatgttctcttagatagttctcagtgtattaaagaggagctgaaaggaaaagaggaagtgagggaagaacataacttggctgttggttttggaattggacaggactcgaaaagggagactttggatgcttggttgatgggaaatggcaatgaacaagaaccattggagtttggtgtggatgaaacgtttgatattaatgagctattgggtatattaaacgacaacaatgtgtctggtcaagagacaatgcagtatcaagtggatagacacccaaatttcagttaccaaacgcagtttccaaattctaacttgctcgggagcctcaaccctatggagattgctcaaccaggagttgattatggatgtccttatgtgcagcccagtgatatggagaactatggtattgatttagaccatcgcaggttcaatgatcttgacatacaggacttggattttggaggagacaaagatgttcatggatctacataagatttcaaatttcgtttgactggcctaagtttgtgattctgctccgagacggtgtagctgttactagctagaagctgcccttctttgaagctactgatactttctgatattaatggttgtgagacgtagtacatgtagttaggtaatgtaggacaagttcaaatatgattccttctttctttttcttgtgaatacatatgacatatgaagaagttcaaacgttgggt

SEQ ID NO: 103792 - protein, 341 aa, Arabidopsis thaliana
  peptide (1)..(341): Ceres Seq. ID no. 13613554
  misc_feature (69)..(133): Pfam Name: AP2 domain Pfam Description: AP2 domain
  misc_feature (1)..(341): Homolog of NCBI NO: 18405354 NR Description: AP2 domain transcription factor, putative (DRE2B) thaliana] >gi|20198013|gb|AAD25669.2| AP2 domain transcription
  misc_feature (1)..(341): Homolog of NCBI NO: 21536924 NR Description: AP2 domain transcription factor [Arabidopsis
  misc_feature (59)..(341): Homolog of NCBI NO: 25408687 NR Description: AP2 domain transcription factor [imported] - thaliana >gi|4588010|gb|AAD25951.1|AF085279_24 hypothetical
  misc_feature (8)..(128): Homolog of NCBI NO: 15226661 NR Description: AP2 domain transcription factor, putative (DREB2) thaliana] >gi|25408689|pir||D84828 AP2 domain transcription
  misc_feature (1)..(202): Homolog of NCBI NO: 8346773 NR Description: AP2-domain DNA-binding protein [Catharanthus
  misc_feature (8)..(330): Homolog of NCBI NO: 15239107 NR Description: DRE binding protein (DREB2A) [Arabidopsis >gi|11358883|pir||T51833 transcription factor DREB2A, drought
  misc_feature (8)..(213): Homolog of NCBI NO: 25992100 NR Description: dehydration responsive element binding protein
  misc_feature (8)..(176): Homolog of NCBI NO: 15228427 NR Description: DRE binding protein (DREB2B) [Arabidopsis
  misc_feature (8)..(256): Homolog of NCBI NO: 27960760 NR Description: dehydration-responsive AP2 domain transcriptional [Hordeum vulgare] >gi|30313900|gb|AAO38211.1| AP2 transcriptional
  misc_feature (8)..(256): Homolog of NCBI NO: 30313898 NR Description: AP2 transcriptional activator DRF1.1 [Hordeum
MPSEIVDRKRKSRGTRDVAEILRQWREYNEQIEAESCIDGGGPKSIRKPPPKGSRKGCMKGKGGPENGICDYRGVRQRRWGKWVAEIREPDGGARLWLGTFSSSYEAALAYDEAAKAIYGQSARLNLPEITNRSSSTAATATVSGSVTAFSDESEVCAREDTNASSGFGQVKLEDCSDEYVLLDSSQCIKEELKGKEEVREEHNLAVGFGIGQDSKRETLDAWLMGNGNEQEPLEFGVDETFDINELLGILNDNNVSGQETMQYQVDRHPNFSYQTQFPNSNLLGSLNPMEIAQPGVDYGCPYVQPSDMENYGIDLDHRRFNDLDIQDLDFGGDKDVHGST

SEQ ID NO: 103793 - protein, 283 aa, Arabidopsis thaliana
  peptide (1)..(283): Ceres Seq. ID no. 13613555
  misc_feature (11)..(75): Pfam Name: AP2 domain Pfam Description: AP2 domain
  misc_feature (1)..(283): Homolog of NCBI NO: 18405354 NR Description: AP2 domain transcription factor, putative (DRE2B) thaliana] >gi|20198013|gb|AAD25669.2| AP2 domain transcription
  misc_feature (1)..(283): Homolog of NCBI NO: 21536924 NR Description: AP2 domain transcription factor [Arabidopsis
  misc_feature (1)..(283): Homolog of NCBI NO: 25408687 NR Description: AP2 domain transcription factor [imported] - thaliana >gi|4588010|gb|AAD25951.1|AF085279_24 hypothetical
  misc_feature (1)..(70): Homolog of NCBI NO: 15226661 NR Description: AP2 domain transcription factor, putative (DREB2) thaliana] >gi|25408689|pir||D84828 AP2 domain transcription
  misc_feature (1)..(144): Homolog of NCBI NO: 8346773 NR Description: AP2-domain DNA-binding protein [Catharanthus
  misc_feature (1)..(272): Homolog of NCBI NO: 15239107 NR Description: DRE binding protein (DREB2A) [Arabidopsis >gi|11358883|pir||T51833 transcription factor DREB2A, drought
  misc_feature (1)..(155): Homolog of NCBI NO: 25992100 NR Description: dehydration responsive element binding protein
  misc_feature (1)..(118): Homolog of NCBI NO: 15228427 NR Description: DRE binding protein (DREB2B) [Arabidopsis
  misc_feature (1)..(198): Homolog of NCBI NO: 27960760 NR Description: dehydration-responsive AP2 domain transcriptional [Hordeum vulgare] >gi|30313900|gb|AAO38211.1| AP2 transcriptional
  misc_feature (1)..(198): Homolog of NCBI NO: 30313898 NR Description: AP2 transcriptional activator DRF1.1 [Hordeum
MKGKGGPENGICDYRGVRQRRWGKWVAEIREPDGGARLWLGTFSSSYEAALAYDEAAKAIYGQSARLNLPEITNRSSSTAATATVSGSVTAFSDESEVCAREDTNASSGFGQVKLEDCSDEYVLLDSSQCIKEELKGKEEVREEHNLAVGFGIGQDSKRETLDAWLMGNGNEQEPLEFGVDETFDINELLGILNDNNVSGQETMQYQVDRHPNFSYQTQFPNSNLLGSLNPMEIAQPGVDYGCPYVQPSDMENYGIDLDHRRFNDLDIQDLDFGGDKDVHGST

SEQ ID NO: 103794 - DNA, 907 bp, Arabidopsis thaliana
  misc_feature (1)..(907): Ceres Seq. ID no. 13613560
  misc_feature: MA Experiment ID: 108576 Result: Up-regulated in Transcription
  misc_feature: MA Experiment 108576 PARAMETER Experiment Name: At_42deg_Heat_cDNA_P Parameter: Temperature (deg C) Value: 42 vs. 22
  misc_feature: MA Experiment 108576 PARAMETER Experiment Name: At_42deg_Heat_cDNA_P Parameter: Timepoint (hr) Value: 1
  misc_feature: MA Experiment 108576 PARAMETER Experiment Name: At_42deg_Heat_cDNA_P Parameter: Tissue Value: Aerial
  misc_feature: MA Experiment ID: 20000438 Result: Down-regulated in Transcription
  misc_feature: MA Experiment 20000438 PARAMETER Experiment Name: At_Shoots__P Parameter: Age (day) Value: 14
  misc_feature: MA Experiment 20000438 PARAMETER Experiment Name: At_Shoots__P Parameter: Tissue Value: Shoots vs. Whole Plant
  misc_feature: MA Experiment ID: 20000794 Result: Up-regulated in Transcription
  misc_feature: MA Experiment 20000794 PARAMETER Experiment Name: At_Petals_P Parameter: Age (day) Value: 23-25 days
  misc_feature: MA Experiment 20000794 PARAMETER Experiment Name: At_Petals_P Parameter: Plant Line Value: WS
  misc_feature: MA Experiment 20000794 PARAMETER Experiment Name: At_Petals_P Parameter: Tissue Value: Petals vs. Whole plant
  misc_feature: MA Experiment ID: 20001911 Result: Down-regulated in Transcription
  misc_feature: MA Experiment 20001911 PARAMETER Experiment Name: At_Drought_Reproduction_P Parameter: Age (day) Value: 40
  misc_feature: MA Experiment 20001911 PARAMETER Experiment Name: At_Drought_Reproduction_P Parameter: Organism Value: A. thaliana
  misc_feature: MA Experiment 20001911 PARAMETER Experiment Name: At_Drought_Reproduction_P Parameter: Plant Line Value: WS
  misc_feature: MA Experiment 20001911 PARAMETER Experiment Name: At_Drought_Reproduction_P Parameter: Timepoint (day) Value: 10
  misc_feature: MA Experiment 20001911 PARAMETER Experiment Name: At_Drought_Reproduction_P Parameter: Tissue Value: Flowers
  misc_feature: MA Experiment 20001911 PARAMETER Experiment Name: At_Drought_Reproduction_P Parameter: Treatment Value: Drought vs. No Drought
cctctttaagagtcacttgactttaatatttctctttttgtttctttctccttttctctgttttttcttttcttttctctttgcgattcgctgagagcatgcctgaatgtcaagagaaagggagagatttgaagagatagggaagaagatcaaaagagaagcagatgcttggcctcatcaaatggctggaattagaagaccaatgtcgggtcctcccggaaccctcaataccattacgccttgtgctgcctgcaagcttttgcgccgtagatgtgctcaagaatgtcccttttcgccatatttctccccacacgagcctcataagttcgcttccgtccacaaagtctttggagctagtaacgtctccaagatgctaatggaagtacctgagagccagagagcagatgccgcgaatagccttgtgtatgaagcaaacgtgaggctaagagatccggtgtacggatgcatgggagccatctcagctctacaacaacaagtccaagctttacaagccgagctcacggccgtaagatccgagattcttaagtacaagcaacgagaagctgtcgccactttgatcgtaccttccaactcccaagttgccggatttcacaactccggcggtgtttccgtcattgcaccaccaccacaaagaccaacaactccaccacaacctacaacggctcatcctccttctccatcttcttgtgttttctctcaaccaaccacaagagacttagaatacggcaacattgaaagtgagaacaactacttcggttaaatttttattgtatcattctacaaacacatacaaatacatataattaatttatttcgataatttgtgatccggtgactaataaattaaattaaattaaattaatataagtgaacaaggttggtcttg

SEQ ID NO: 103795 - protein, 224 aa, Arabidopsis thaliana; identical to SEQ ID NO: 38408
  peptide (1)..(224): Ceres Seq. ID no. 13613561
  misc_feature (1)..(224): Homolog of NCBI NO: 18405401 NR Description: lateral organ boundaries (LOB) domain family thaliana] >gi|29427824|sp|Q8L5T5|LB15_ARATH LOB domain protein 15 hypothetical protein At2g40470 [imported] DOMAIN 15 [Arabidopsis
  misc_feature (1)..(224): Homolog of NCBI NO: 21618113 NR Description: LOB DOMAIN 13 [Arabidopsis thaliana]
  misc_feature (1)..(207): Homolog of NCBI NO: 30684548 NR Description: lateral organ boundaries (LOB) domain protein 13 [Arabidopsis thaliana] >gi|29427981|sp|Q9AT61|LB13_ARATH LOB protein 13 >gi|17227158|gb|AAL38033.1|AF447888_1 LOB DOMAIN 13
  misc_feature (6)..(207): Homolog of NCBI NO: 25408064 NR Description: hypothetical protein At2g30340 [imported] -
  misc_feature (6)..(181): Homolog of NCBI NO: 34907878 NR Description: P0031D02.27 [Oryza sativa (japonica
  misc_feature (35)..(146): Homolog of NCBI NO: 18402268 NR Description: lateral organ boundaries (LOB) domain family
  misc_feature (44)..(153): Homolog of NCBI NO: 15221679 NR Description: lateral organ boundaries (LOB) domain family
  misc_feature (35)..(146): Homolog of NCBI NO: 21592574 NR Description: unknown [Arabidopsis thaliana]
  misc_feature (41)..(149): Homolog of NCBI NO: 15218746 NR Description: lateral organ boundaries (LOB) domain protein 6 [Arabidopsis thaliana] >gi|29427552|sp|O04479|LBD6_ARATH LOB protein 6 (ASYMMETRIC LEAVES2) >gi|25404562|pir||C96681
  misc_feature (42)..(148): Homolog of NCBI NO: 21618134 NR Description: unknown [Arabidopsis thaliana]

SEQ ID NO: 103796 - protein, 199 aa, Arabidopsis thaliana; identical to SEQ ID NO: 38409
  peptide (1)..(199): Ceres Seq. ID no. 13613562
  misc_feature (1)..(199): Homolog of NCBI NO: 18405401 NR Description: lateral organ boundaries (LOB) domain family thaliana] >gi|29427824|sp|Q8L5T5|LB15_ARATH LOB domain protein 15 hypothetical protein At2g40470 [imported] DOMAIN 15 [Arabidopsis
  misc_feature (1)..(199): Homolog of NCBI NO: 21618113 NR Description: LOB DOMAIN 13 [Arabidopsis thaliana]
  misc_feature (1)..(182): Homolog of NCBI NO: 30684548 NR Description: lateral organ boundaries (LOB) domain protein 13 [Arabidopsis thaliana] >gi|29427981|sp|Q9AT61|LB13_ARATH LOB protein 13 >gi|17227158|gb|AAL38033.1|AF447888_1 LOB DOMAIN 13
  misc_feature (1)..(182): Homolog of NCBI NO: 25408064 NR Description: hypothetical protein At2g30340 [imported] -
  misc_feature (1)..(156): Homolog of NCBI NO: 34907878 NR Description: P0031D02.27 [Oryza sativa (japonica
  misc_feature (10)..(121): Homolog of NCBI NO: 18402268 NR Description: lateral organ boundaries (LOB) domain family
  misc_feature (19)..(128): Homolog of NCBI NO: 15221679 NR Description: lateral organ boundaries (LOB) domain family
  misc_feature (10)..(121): Homolog of NCBI NO: 21592574 NR Description: unknown [Arabidopsis thaliana]
  misc_feature (16)..(124): Homolog of NCBI NO: 15218746 NR Description: lateral organ boundaries (LOB) domain protein 6 [Arabidopsis thaliana] >gi|29427552|sp|O04479|LBD6_ARATH LOB protein 6 (ASYMMETRIC LEAVES2) >gi|25404562|pir||C96681
  misc_feature (17)..(123): Homolog of NCBI NO: 21618134 NR Description: unknown [Arabidopsis thaliana]

SEQ ID NO: 103797 - protein, 192 aa, Arabidopsis thaliana; identical to SEQ ID NO: 38410
  peptide (1)..(192): Ceres Seq. ID no. 13613563
  misc_feature (1)..(192): Homolog of NCBI NO: 18405401 NR Description: lateral organ boundaries (LOB) domain family thaliana] >gi|29427824|sp|Q8L5T5|LB15_ARATH LOB domain protein 15 hypothetical protein At2g40470 [imported] DOMAIN 15 [Arabidopsis
  misc_feature (1)..(192): Homolog of NCBI NO: 21618113 NR Description: LOB DOMAIN 13 [Arabidopsis thaliana]
  misc_feature (1)..(175): Homolog of NCBI NO: 30684548 NR Description: lateral organ boundaries (LOB) domain protein 13 [Arabidopsis thaliana] >gi|29427981|sp|Q9AT61|LB13_ARATH LOB protein 13 >gi|17227158|gb|AAL38033.1|AF447888_1 LOB DOMAIN 13
  misc_feature (1)..(175): Homolog of NCBI NO: 25408064 NR Description: hypothetical protein At2g30340 [imported] -
  misc_feature (1)..(149): Homolog of NCBI NO: 34907878 NR Description: P0031D02.27 [Oryza sativa (japonica
  misc_feature (3)..(114): Homolog of NCBI NO: 18402268 NR Description: lateral organ boundaries (LOB) domain family
  misc_feature (12)..(121): Homolog of NCBI NO: 15221679 NR Description: lateral organ boundaries (LOB) domain family
  misc_feature (3)..(114): Homolog of NCBI NO: 21592574 NR Description: unknown [Arabidopsis thaliana]
  misc_feature (9)..(117): Homolog of NCBI NO: 15218746 NR Description: lateral organ boundaries (LOB) domain protein 6 [Arabidopsis thaliana] >gi|29427552|sp|O04479|LBD6_ARATH LOB protein 6 (ASYMMETRIC LEAVES2) >gi|25404562|pir||C96681
  misc_feature (10)..(116): Homolog of NCBI NO: 21618134 NR Description: unknown [Arabidopsis thaliana]

SEQ ID NO: 103798 - DNA, 1252 bp, Arabidopsis thaliana
  misc_feature (1)..(1252): Ceres Seq. ID no. 13613591
  misc_feature: MA Experiment ID: 108434 Result: Up-regulated in Transcription
  misc_feature: MA Experiment 108434 PARAMETER Experiment Name: At_Root_Tips_cDNA_P Parameter: Tissue Value: Root Tips
  misc_feature: MA Experiment ID: 108461 Result: Up-regulated in Transcription
  misc_feature: MA Experiment 108461 PARAMETER Experiment Name: At_Germinating_Seeds_cDNA_P Parameter: Age (day) Value: 1 vs. 0
  misc_feature: MA Experiment 108461 PARAMETER Experiment Name: At_Germinating_Seeds_cDNA_P Parameter: Tissue Value: Germinating Seeds
  misc_feature: MA Experiment ID: 108579 Result: Down-regulated in Transcription
  misc_feature: MA Experiment 108579 PARAMETER Experiment Name: At_4deg_Cold_cDNA_P Parameter: Temperature (deg C) Value: 4 vs. 22
  misc_feature: MA Experiment 108579 PARAMETER Experiment Name: At_4deg_Cold_cDNA_P Parameter: Timepoint (hr) Value: 6
  misc_feature: MA Experiment 108579 PARAMETER Experiment Name: At_4deg_Cold_cDNA_P Parameter: Tissue Value: Aerial
  misc_feature: MA Experiment ID: 108595 Result: Down-regulated in Transcription
  misc_feature: MA Experiment 108595 PARAMETER Experiment Name: At_Ler-pi_Ovule_cDNA_P Parameter: Plant Line Value: null
  misc_feature: MA Experiment ID: 20000111 Result: Up-regulated in Transcription
  misc_feature: MA Experiment 20000111 PARAMETER Experiment Name: At_42deg_Heat_cDNA_P Parameter: Temperature (deg C) Value: 42 vs. 22
  misc_feature: MA Experiment 20000111 PARAMETER Experiment Name: At_42deg_Heat_cDNA_P Parameter: Timepoint (hr) Value: 6
  misc_feature: MA Experiment 20000111 PARAMETER Experiment Name: At_42deg_Heat_cDNA_P Parameter: Tissue Value: Aerial
  misc_feature: MA Experiment ID: 20000113 Result: Up-regulated in Transcription
  misc_feature: MA Experiment 20000113 PARAMETER Experiment Name: At_42deg_Heat_cDNA_P Parameter: Temperature (deg C) Value: 42 vs. 22
  misc_feature: MA Experiment 20000113 PARAMETER Experiment Name: At_42deg_Heat_cDNA_P Parameter: Timepoint (hr) Value: 8
  misc_feature: MA Experiment 20000113 PARAMETER Experiment Name: At_42deg_Heat_cDNA_P Parameter: Tissue Value: Aerial
  misc_feature: MA Experiment ID: 20000173 Result: Up-regulated in Transcription
  misc_feature: MA Experiment 20000173 PARAMETER Experiment Name: At_42deg_Heat_P Parameter: Age (day) Value: 14
  misc_feature: MA Experiment 20000173 PARAMETER Experiment Name: At_42deg_Heat_P Parameter: Organism Value: A. thaliana
  misc_feature: MA Experiment 20000173 PARAMETER Experiment Name: At_42deg_Heat_P Parameter: Plant Line Value: WS
  misc_feature: MA Experiment 20000173 PARAMETER Experiment Name: At_42deg_Heat_P Parameter: Temperature (deg C) Value: 42 vs. 22
  misc_feature: MA Experiment 20000173 PARAMETER Experiment Name: At_42deg_Heat_P Parameter: Timepoint (hr) Value: 6
  misc_feature: MA Experiment 20000173 PARAMETER Experiment Name: At_42deg_Heat_P Parameter: Tissue Value: Aerial
  misc_feature: MA Experiment ID: 20000179 Result: Up-regulated in Transcription
  misc_feature: MA Experiment 20000179 PARAMETER Experiment Name: At_Germinating_Seeds_P Parameter: Age (hr) Value: 6 vs. 0
  misc_feature: MA Experiment 20000179 PARAMETER Experiment Name: At_Germinating_Seeds_P Parameter: Tissue Value: Germinating Seeds
  misc_feature: MA Experiment ID: 20000180 Result: Up-regulated in Transcription
  misc_feature: MA Experiment 20000180 PARAMETER Experiment Name: At_Germinating_Seeds_P Parameter: Age (hr) Value: 24 vs. 0
  misc_feature: MA Experiment 20000180 PARAMETER Experiment Name: At_Germinating_Seeds_P Parameter: Tissue Value: Germinating Seeds
  misc_feature: MA Experiment ID: 20000234 Result: Up-regulated in Transcription
  misc_feature: MA Experiment 20000234 PARAMETER Experiment Name: At_Siliques_P Parameter: Age (day) Value: 21
  misc_feature: MA Experiment 20000234 PARAMETER Experiment Name: At_Siliques_P Parameter: Organism Value: A. thaliana
  misc_feature: MA Experiment 20000234 PARAMETER Experiment Name: At_Siliques_P Parameter: Plant Line Value: WS
  misc_feature: MA Experiment 20000234 PARAMETER Experiment Name: At_Siliques_P Parameter: Tissue Value: Less Than 5mm Siliques vs. Whole Plant
  misc_feature: MA Experiment ID: 20000265 Result: Up-regulated in Transcription
  misc_feature: MA Experiment 20000265 PARAMETER Experiment Name: At_Open_Flower_P Parameter: Age (day) Value: 21
  misc_feature: MA Experiment 20000265 PARAMETER Experiment Name: At_Open_Flower_P Parameter: Plant Line Value: WS
  misc_feature: MA Experiment 20000265 PARAMETER Experiment Name: At_Open_Flower_P Parameter: Tissue Value: Closed Flower vs. Whole Plant
  misc_feature: MA Experiment ID: 20000286 Result: Up-regulated in Transcription
  misc_feature: MA Experiment 20000286 PARAMETER Experiment Name: At_Open_Flower_P Parameter: Age (day) Value: 21
  misc_feature: MA Experiment 20000286 PARAMETER Experiment Name: At_Open_Flower_P Parameter: Plant Line Value: WS
  misc_feature: MA Experiment 20000286 PARAMETER Experiment Name: At_Open_Flower_P Parameter: Tissue Value: Half Open vs. Whole Plant
  misc_feature: MA Experiment ID: 20000438 Result: Up-regulated in Transcription
  misc_feature: MA Experiment 20000438 PARAMETER Experiment Name: At_Shoots__P Parameter: Age (day) Value: 14
  misc_feature: MA Experiment 20000438 PARAMETER Experiment Name: At_Shoots__P Parameter: Tissue Value: Shoots vs. Whole Plant
  misc_feature: MA Experiment ID: 20000794 Result: Down-regulated in Transcription
  misc_feature: MA Experiment 20000794 PARAMETER Experiment Name: At_Petals_P Parameter: Age (day) Value: 23-25 days
  misc_feature: MA Experiment 20000794 PARAMETER Experiment Name: At_Petals_P Parameter: Plant Line Value: WS
  misc_feature: MA Experiment 20000794 PARAMETER Experiment Name: At_Petals_P Parameter: Tissue Value: Petals vs. Whole plant
  misc_feature: MA Experiment ID: 20001451 Result: Down-regulated in Transcription
  misc_feature: MA Experiment 20001451 PARAMETER Experiment Name: At_Far-red-induction_P Parameter: Age (day) Value: 7
  misc_feature: MA Experiment 20001451 PARAMETER Experiment Name: At_Far-red-induction_P Parameter: Light Value: Far-red vs. White
  misc_feature: MA Experiment 20001451 PARAMETER Experiment Name: At_Far-red-induction_P Parameter: Organism Value: A. thaliana
  misc_feature: MA Experiment 20001451 PARAMETER Experiment Name: At_Far-red-induction_P Parameter: Plant Line Value: Columbia
  misc_feature: MA Experiment 20001451 PARAMETER Experiment Name: At_Far-red-induction_P Parameter: Timepoint (hr) Value: 24
  misc_feature: MA Experiment 20001451 PARAMETER Experiment Name: At_Far-red-induction_P Parameter: Tissue Value: Whole Plant
  misc_feature: MA Experiment ID: 20001757 Result: Up-regulated in Transcription
  misc_feature: MA Experiment 20001757 PARAMETER Experiment Name: At_50mM_NH4NO3_L-to-H_P Parameter: Timepoint (hr) Value: 6
  misc_feature: MA Experiment 20001757 PARAMETER Experiment Name: At_50mM_NH4NO3_L-to-H_P Parameter: Tissue Value: Leaf
  misc_feature: MA Experiment 20001757 PARAMETER Experiment Name: At_50mM_NH4NO3_L-to-H_P Parameter: Treatment Value: 50mM NH4NO3 vs 100mM Mannitol
  misc_feature: MA Experiment ID: 20001905 Result: Down-regulated in Transcription
  misc_feature: MA Experiment 20001905 PARAMETER Experiment Name: At_Drought_Reproduction_P Parameter: Age (day) Value: 40
  misc_feature: MA Experiment 20001905 PARAMETER Experiment Name: At_Drought_Reproduction_P Parameter: Organism Value: A. thaliana
  misc_feature: MA Experiment 20001905 PARAMETER Experiment Name: At_Drought_Reproduction_P Parameter: Plant Line Value: WS
  misc_feature: MA Experiment 20001905 PARAMETER Experiment Name: At_Drought_Reproduction_P Parameter: Timepoint (day) Value: 10
  misc_feature: MA Experiment 20001905 PARAMETER Experiment Name: At_Drought_Reproduction_P Parameter: Tissue Value: Rosettes
  misc_feature: MA Experiment 20001905 PARAMETER Experiment Name: At_Drought_Reproduction_P Parameter: Treatment Value: Drought vs. No Drought
caatcatcctcttcctctaaattctcttcttctctttgctgctacagaaaaagaatcaagctttagaggcaagcaaggactcactcacccacaagtatcctcaccccatctactcatggacacagcattgacctcagaatcaggctgtgccgttatagccgataagggattcaatgtggatccttttttggtcgaggctcttcaaaaccctcgacatcgtctaacgattttgcggatggaacttgatgttcagaggttcttgcagagccctgatcagcagcaattcgagttccagcatttccctacatcatacctccgttttgcggctcatcgtgttgctaatcactatggactaattacatcagttcgagatggtggtgcagatggtaatgagagcagaattgtcgtgactaaatctagtgatagcagatttcctgctgctcgactatctgaaatccctgtgaaacagtcagaaactggcaagtttgagcatatgaaagttgttataaagccaagacctactaaaggatctggaatggaaggtgatgaactgaaaggtggtcttctgaaaagtgttgaagagaggaaagaagattacgacagggctcgagcacgcatatttaacggtcttgtgaacattgattgtaacgattcttcatctgaaactaatccttggagggtgaattgtagttctagcagagatgaaaatcaagtgttgaagaatggtaatatcgaagcagacaagaacaatatctctaggaagagcaatcctgcatctcgtattgcaattctcagagacagagagaaagatcgatatgaccctgactatgaccgcagcaattacaggtacattagtaacctcccagtcgatcaaaatttatgcgtggcacacttcaacattcagacaatggggacaccaatctatgatatgggatttagagggtatagtccaactgctcctccatctcttaacttgggtcaacattctgtcatgagcccctgcgtcaccacaggtttaaaccagccttcaagagatgctgctatgtacatgcaatggccaaatgcagcagctgtgatgtatactcattcatatgaccacttcagaaactccccttttcaggcgcagttctatccgcagccccttagtttcgattacatgcagaaccggtaattacttttctcatcatggctaaggatttgtgtaatccagattttgagacagtttgatgtcaaaaatagacaaacttaacct

SEQ ID NO: 103799 - protein, 389 aa, Arabidopsis thaliana
  peptide (1)..(389): Ceres Seq. ID no. 13613592
  misc_feature (39)..(389): Homolog of NCBI NO: 18405560 NR Description: expressed protein [Arabidopsis thaliana] expressed protein [Arabidopsis thaliana]
  misc_feature (39)..(389): Homolog of NCBI NO: 21592404 NR Description: unknown [Arabidopsis thaliana]
  misc_feature (39)..(286): Homolog of NCBI NO: 7487238 NR Description: hypothetical protein At2g40960 [imported] -
  misc_feature (37)..(389): Homolog of NCBI NO: 15228989 NR Description: expressed protein [Arabidopsis thaliana]
  misc_feature (50)..(360): Homolog of NCBI NO: 30681485 NR Description: expressed protein [Arabidopsis thaliana]
  misc_feature (50)..(360): Homolog of NCBI NO: 18398995 NR Description: expressed protein [Arabidopsis thaliana]
  misc_feature (50)..(360): Homolog of NCBI NO: 21592735 NR Description: unknown [Arabidopsis thaliana]
  misc_feature (50)..(377): Homolog of NCBI NO: 10178049 NR Description: gb|AAF19572.1~gene_id:MUG13.4~strong similarity
  misc_feature (50)..(369): Homolog of NCBI NO: 18414788 NR Description: expressed protein [Arabidopsis thaliana] Unknown protein [Arabidopsis thaliana]
  misc_feature (58)..(377): Homolog of NCBI NO: 29367411 NR Description: unknown [Oryza sativa (japonica cultivar-group)]
NHPLPLNSLLLFAATEKESSFRGKQGLTHPQVSSPHLLMDTALTSESGCAVIADKGFNVDPFLVEALQNPRHRLTILRMELDVQRFLQSPDQQQFEFQHFPTSYLRFAAHRVANHYGLITSVRDGGADGNESRIVVTKSSDSRFPAARLSEIPVKQSETGKFEHMKVVIKPRPTKGSGMEGDELKGGLLKSVEERKEDYDRARARIFNGLVNIDCNDSSSETNPWRVNCSSSRDENQVLKNGNIEADKNNISRKSNPASRIAILRDREKDRYDPDYDRSNYRYISNLPVDQNLCVAHFNIQTMGTPIYDMGFRGYSPTAPPSLNLGQHSVMSPCVTTGLNQPSRDAAMYMQWPNAAAVMYTHSYDHFRNSPFQAQFYPQPLSFDYMQNR

SEQ ID NO: 103800 - protein, 351 aa, Arabidopsis thaliana
  peptide (1)..(351): Ceres Seq. ID no. 13613593
  misc_feature (1)..(351): Homolog of NCBI NO: 18405560 NR Description: expressed protein [Arabidopsis thaliana] expressed protein [Arabidopsis thaliana]
  misc_feature (1)..(351): Homolog of NCBI NO: 21592404 NR Description: unknown [Arabidopsis thaliana]
  misc_feature (1)..(248): Homolog of NCBI NO: 7487238 NR Description: hypothetical protein At2g40960 [imported] -
  misc_feature (1)..(351): Homolog of NCBI NO: 15228989 NR Description: expressed protein [Arabidopsis thaliana]
  misc_feature (12)..(322): Homolog of NCBI NO: 30681485 NR Description: expressed protein [Arabidopsis thaliana]
  misc_feature (12)..(322): Homolog of NCBI NO: 18398995 NR Description: expressed protein [Arabidopsis thaliana]
  misc_feature (12)..(322): Homolog of NCBI NO: 21592735 NR Description: unknown [Arabidopsis thaliana]
  misc_feature (12)..(339): Homolog of NCBI NO: 10178049 NR Description: gb|AAF19572.1~gene_id:MUG13.4~strong similarity
  misc_feature (12)..(331): Homolog of NCBI NO: 18414788 NR Description: expressed protein [Arabidopsis thaliana] Unknown protein [Arabidopsis thaliana]
  misc_feature (20)..(339): Homolog of NCBI NO: 29367411 NR Description: unknown [Oryza sativa (japonica cultivar-group)]
MDTALTSESGCAVIADKGFNVDPFLVEALQNPRHRLTILRMELDVQRFLQSPDQQQFEFQHFPTSYLRFAAHRVANHYGLITSVRDGGADGNESRIVVTKSSDSRFPAARLSEIPVKQSETGKFEHMKVVIKPRPTKGSGMEGDELKGGLLKSVEERKEDYDRARARIFNGLVNIDCNDSSSETNPWRVNCSSSRDENQVLKNGNIEADKNNISRKSNPASRIAILRDREKDRYDPDYDRSNYRYISNLPVDQNLCVAHFNIQTMGTPIYDMGFRGYSPTAPPSLNLGQHSVMSPCVTTGLNQPSRDAAMYMQWPNAAAVMYTHSYDHFRNSPFQAQFYPQPLSFDYMQNR

SEQ ID NO: 103801 - protein, 311 aa, Arabidopsis thaliana
  peptide (1)..(311): Ceres Seq. ID no. 13613594
  misc_feature (1)..(311): Homolog of NCBI NO: 18405560 NR Description: expressed protein [Arabidopsis thaliana] expressed protein [Arabidopsis thaliana]
  misc_feature (1)..(311): Homolog of NCBI NO: 21592404 NR Description: unknown [Arabidopsis thaliana]
  misc_feature (1)..(208): Homolog of NCBI NO: 7487238 NR Description: hypothetical protein At2g40960 [imported] -
  misc_feature (1)..(311): Homolog of NCBI NO: 15228989 NR Description: expressed protein [Arabidopsis thaliana]
  misc_feature (1)..(282): Homolog of NCBI NO: 30681485 NR Description: expressed protein [Arabidopsis thaliana]
  misc_feature (1)..(282): Homolog of NCBI NO: 18398995 NR Description: expressed protein [Arabidopsis thaliana]
  misc_feature (1)..(282): Homolog of NCBI NO: 21592735 NR Description: unknown [Arabidopsis thaliana]
  misc_feature (1)..(299): Homolog of NCBI NO: 10178049 NR Description: gb|AAF19572.1~gene_id:MUG13.4~strong similarity
  misc_feature (1)..(291): Homolog of NCBI NO: 18414788 NR Description: expressed protein [Arabidopsis thaliana] Unknown protein [Arabidopsis thaliana]
  misc_feature (1)..(299): Homolog of NCBI NO: 29367411 NR Description: unknown [Oryza sativa (japonica cultivar-group)]
MELDVQRFLQSPDQQQFEFQHFPTSYLRFAAHRVANHYGLITSVRDGGADGNESRIVVTKSSDSRFPAARLSEIPVKQSETGKFEHMKVVIKPRPTKGSGMEGDELKGGLLKSVEERKEDYDRARARIFNGLVNIDCNDSSSETNPWRVNCSSSRDENQVLKNGNIEADKNNISRKSNPASRIAILRDREKDRYDPDYDRSNYRYISNLPVDQNLCVAHFNIQTMGTPIYDMGFRGYSPTAPPSLNLGQHSVMSPCVTTGLNQPSRDAAMYMQWPNAAAVMYTHSYDHFRNSPFQAQFYPQPLSFDYMQNR

SEQ ID NO: 103802 - DNA, 605 bp, Arabidopsis thaliana
  misc_feature (1)..(605): Ceres Seq. ID no. 13613603
  misc_feature: MA Experiment ID: 20000173 Result: Down-regulated in Transcription
  misc_feature: MA Experiment 20000173 PARAMETER Experiment Name: At_42deg_Heat_P Parameter: Age (day) Value: 14
  misc_feature: MA Experiment 20000173 PARAMETER Experiment Name: At_42deg_Heat_P Parameter: Organism Value: A. thaliana
  misc_feature: MA Experiment 20000173 PARAMETER Experiment Name: At_42deg_Heat_P Parameter: Plant Line Value: WS
  misc_feature: MA Experiment 20000173 PARAMETER Experiment Name: At_42deg_Heat_P Parameter: Temperature (deg C) Value: 42 vs. 22
  misc_feature: MA Experiment 20000173 PARAMETER Experiment Name: At_42deg_Heat_P Parameter: Timepoint (hr) Value: 6
  misc_feature: MA Experiment 20000173 PARAMETER Experiment Name: At_42deg_Heat_P Parameter: Tissue Value: Aerial
  misc_feature: MA Experiment ID: 20000213 Result: Up-regulated in Transcription
  misc_feature: MA Experiment 20000213 PARAMETER Experiment Name: At_4deg_Cold_P Parameter: Timepoint (hr) Value: 2
  misc_feature: MA Experiment ID: 20000453 Result: Down-regulated in Transcription
  misc_feature: MA Experiment 20000453 PARAMETER Experiment Name: At_100uM_ABA_P Parameter: Age (day) Value: 15
  misc_feature: MA Experiment 20000453 PARAMETER Experiment Name: At_100uM_ABA_P Parameter: Organism Value: A. thaliana
  misc_feature: MA Experiment 20000453 PARAMETER Experiment Name: At_100uM_ABA_P Parameter: Plant Line Value: WS
  misc_feature: MA Experiment 20000453 PARAMETER Experiment Name: At_100uM_ABA_P Parameter: Timepoint (hr) Value: 24
  misc_feature: MA Experiment 20000453 PARAMETER Experiment Name: At_100uM_ABA_P Parameter: Tissue Value: Aerial
  misc_feature: MA Experiment 20000453 PARAMETER Experiment Name: At_100uM_ABA_P Parameter: Treatment Value: 100uM ABA vs. No Treatment
  misc_feature: MA Experiment ID: 20001247 Result: Down-regulated in Transcription
  misc_feature: MA Experiment 20001247 PARAMETER Experiment Name: At_Far-red-induction_P Parameter: Age (day) Value: 7
  misc_feature: MA Experiment 20001247 PARAMETER Experiment Name: At_Far-red-induction_P Parameter: Light Value: Far-red vs. White
  misc_feature: MA Experiment 20001247 PARAMETER Experiment Name: At_Far-red-induction_P Parameter: Organism Value: A. thaliana
  misc_feature: MA Experiment 20001247 PARAMETER Experiment Name: At_Far-red-induction_P Parameter: Plant Line Value: Columbia
  misc_feature: MA Experiment 20001247 PARAMETER Experiment Name: At_Far-red-induction_P Parameter: Timepoint (hr) Value: 1
  misc_feature: MA Experiment 20001247 PARAMETER Experiment Name: At_Far-red-induction_P Parameter: Tissue Value: Whole Plant
  misc_feature: MA Experiment ID: 20001248 Result: Up-regulated in Transcription
  misc_feature: MA Experiment 20001248 PARAMETER Experiment Name: At_Far-red-induction_P Parameter: Age (day) Value: 7
  misc_feature: MA Experiment 20001248 PARAMETER Experiment Name: At_Far-red-induction_P Parameter: Light Value: Far-red vs. White
  misc_feature: MA Experiment 20001248 PARAMETER Experiment Name: At_Far-red-induction_P Parameter: Organism Value: A. thaliana
  misc_feature: MA Experiment 20001248 PARAMETER Experiment Name: At_Far-red-induction_P Parameter: Plant Line Value: Columbia
  misc_feature: MA Experiment 20001248 PARAMETER Experiment Name: At_Far-red-induction_P Parameter: Timepoint (hr) Value: 4
  misc_feature: MA Experiment 20001248 PARAMETER Experiment Name: At_Far-red-induction_P Parameter: Tissue Value: Whole Plant
  misc_feature: MA Experiment ID: 20001557 Result: Up-regulated in Transcription
  misc_feature: MA Experiment 20001557 PARAMETER Experiment Name: At_Drought_Soil_Dry_P Parameter: Age (day) Value: 27
  misc_feature: MA Experiment 20001557 PARAMETER Experiment Name: At_Drought_Soil_Dry_P Parameter: Organism Value: A. thaliana
  misc_feature: MA Experiment 20001557 PARAMETER Experiment Name: At_Drought_Soil_Dry_P Parameter: Plant Line Value: WS
  misc_feature: MA Experiment 20001557 PARAMETER Experiment Name: At_Drought_Soil_Dry_P Parameter: Post Timepoint (hr) Value: 3
  misc_feature: MA Experiment 20001557 PARAMETER Experiment Name: At_Drought_Soil_Dry_P Parameter: Post-Treatment Value: Re-Water vs. No Drought
  misc_feature: MA Experiment 20001557 PARAMETER Experiment Name: At_Drought_Soil_Dry_P Parameter: Timepoint (day) Value: 13
  misc_feature: MA Experiment 20001557 PARAMETER Experiment Name: At_Drought_Soil_Dry_P Parameter: Treatment Value: Drought vs. No Drought
acataagtctctctcttacattttgaaaccctaatttctcttcttttccccaaaaaaaaatgtctgaagttgagtaccggtgctttgtcggcggccttgcctgggccaccaatgatgaagatcttcaaaggacgttctcacagttcggcgacgttatcgattctaagatcattaacgaccgcgagagtggaagatcaaggggattcggattcgtcaccttcaaggacgagaaagccatgagggatgcgattgaagagatgaacggtaaagagctcgatggacgtgtcatcaccgtgaacgaggctcagtcgagaggtagcggcggtggcggaggaggccgtggtggaagcggtggtggttaccgcagcggaggcggtgatggtggaagttacggaggcggtggtggcggctggtaatcaaagatagagttgtttgcgtgctgctgctctgtttttggtttagatttggttttgtgtcaccacttctggtttggttatcgttcgtttggtttacttttttgatgaaacagtttcgtttaagtcttctttgtctggaacgaaatgttaattcgcgtgttgtttactaaatttataacgtttcctttt

SEQ ID NO: 103803 - protein, 118 aa, Arabidopsis thaliana; identical to SEQ ID NO: 40864
  peptide (1)..(118): Ceres Seq. ID no. 13613604
  misc_feature (8)..(79): Pfam Name: RNA recognition motif. (a.k.a. RRM, RBD, or RNP domain) Pfam Description: RNA recognition motif. (a.k.a. RRM, RBD, or RNP
  misc_feature (1)..(118): Homolog of NCBI NO: 15235002 NR Description: glycine-rich RNA-binding protein 8 (GRP8) (CCR1)
  misc_feature (1)..(118): Homolog of NCBI NO: 30692254 NR Description: glycine-rich RNA-binding protein 8 (GRP8) (CCR1)
  misc_feature (1)..(118): Homolog of NCBI NO: 544416 NR Description: Glycine-rich RNA-binding protein 10
  misc_feature (1)..(118): Homolog of NCBI NO: 544426 NR Description: Glycine-rich RNA-binding protein
  misc_feature (3)..(116): Homolog of NCBI NO: 15226605 NR Description: glycine-rich RNA-binding protein (AtGRP7)
  misc_feature (3)..(116): Homolog of NCBI NO: 21553354 NR Description: glycine-rich RNA binding protein 7 [Arabidopsis
  misc_feature (3)..(118): Homolog of NCBI NO: 1346180 NR Description: Glycine-rich RNA-binding protein GRP1A
  misc_feature (1)..(116): Homolog of NCBI NO: 2119042 NR Description: glycine-rich RNA-binding protein RGP-1a - wood
  misc_feature (1)..(118): Homolog of NCBI NO: 2226370 NR Description: RNA-binding protein [Nicotiana glutinosa]
  misc_feature (3)..(117): Homolog of NCBI NO: 1346181 NR Description: Glycine-rich RNA-binding protein GRP2A

SEQ ID NO: 103804 - protein, 59 aa, Arabidopsis thaliana; identical to SEQ ID NO: 40865
  peptide (1)..(59): Ceres Seq. ID no. 13613605
  misc_feature (1)..(59): Homolog of NCBI NO: 15235002 NR Description: glycine-rich RNA-binding protein 8 (GRP8) (CCR1)
  misc_feature (1)..(59): Homolog of NCBI NO: 30692254 NR Description: glycine-rich RNA-binding protein 8 (GRP8) (CCR1)
  misc_feature (1)..(59): Homolog of NCBI NO: 544416 NR Description: Glycine-rich RNA-binding protein 10
  misc_feature (1)..(59): Homolog of NCBI NO: 544426 NR Description: Glycine-rich RNA-binding protein
  misc_feature (1)..(57): Homolog of NCBI NO: 15226605 NR Description: glycine-rich RNA-binding protein (AtGRP7)
  misc_feature (1)..(57): Homolog of NCBI NO: 21553354 NR Description: glycine-rich RNA binding protein 7 [Arabidopsis
  misc_feature (1)..(59): Homolog of NCBI NO: 1346180 NR Description: Glycine-rich RNA-binding protein GRP1A
  misc_feature (1)..(57): Homolog of NCBI NO: 2119042 NR Description: glycine-rich RNA-binding protein RGP-1a - wood
  misc_feature (1)..(59): Homolog of NCBI NO: 2226370 NR Description: RNA-binding protein [Nicotiana glutinosa]
  misc_feature (1)..(58): Homolog of NCBI NO: 1346181 NR Description: Glycine-rich RNA-binding protein GRP2A

SEQ ID NO: 103805 - DNA, 592 bp, Arabidopsis thaliana
  misc_feature (1)..(592): Ceres Seq. ID no. 13613606
  misc_feature: MA Experiment ID: 108488 Result: Down-regulated in Transcription
  misc_feature: MA Experiment ID: 108572 Result: Down-regulated in Transcription
  misc_feature: MA Experiment 108572 PARAMETER Experiment Name: At_Drought_cDNA_P Parameter: Timepoint (hr) Value: 1
  misc_feature: MA Experiment 108572 PARAMETER Experiment Name: At_Drought_cDNA_P Parameter: Tissue Value: Aerial
  misc_feature: MA Experiment 108572 PARAMETER Experiment Name: At_Drought_cDNA_P Parameter: Treatment Value: Drought vs. No Drought
  misc_feature: MA Experiment ID: 108573 Result: Down-regulated in Transcription
  misc_feature: MA Experiment 108573 PARAMETER Experiment Name: At_Drought_cDNA_P Parameter: Timepoint (hr) Value: 6
  misc_feature: MA Experiment 108573 PARAMETER Experiment Name: At_Drought_cDNA_P Parameter: Tissue Value: Aerial
  misc_feature: MA Experiment 108573 PARAMETER Experiment Name: At_Drought_cDNA_P Parameter: Treatment Value: Drought vs. No Drought
  misc_feature: MA Experiment ID: 108577 Result: Down-regulated in Transcription
  misc_feature: MA Experiment 108577 PARAMETER Experiment Name: At_42deg_Heat_cDNA_P Parameter: Temperature (deg C) Value: 42 vs. 22
  misc_feature: MA Experiment 108577 PARAMETER Experiment Name: At_42deg_Heat_cDNA_P Parameter: Timepoint (hr) Value: 6
  misc_feature: MA Experiment 108577 PARAMETER Experiment Name: At_42deg_Heat_cDNA_P Parameter: Tissue Value: Aerial
  misc_feature: MA Experiment ID: 108579 Result: Up-regulated in Transcription
  misc_feature: MA Experiment 108579 PARAMETER Experiment Name: At_4deg_Cold_cDNA_P Parameter: Temperature (deg C) Value: 4 vs. 22
  misc_feature: MA Experiment 108579 PARAMETER Experiment Name: At_4deg_Cold_cDNA_P Parameter: Timepoint (hr) Value: 6
  misc_feature: MA Experiment 108579 PARAMETER Experiment Name: At_4deg_Cold_cDNA_P Parameter: Tissue Value: Aerial
  misc_feature: MA Experiment ID: 108607 Result: Down-regulated in Transcription
  misc_feature: MA Experiment 108607 PARAMETER Experiment Name: At_100uM_ABA_cDNA_P Parameter: Timepoint (hr) Value: 4
  misc_feature: MA Experiment 108607 PARAMETER Experiment Name: At_100uM_ABA_cDNA_P Parameter: Tissue Value: Aerial
  misc_feature: MA Experiment 108607 PARAMETER Experiment Name: At_100uM_ABA_cDNA_P Parameter: Treatment Value: 100uM ABA vs. No Treatment
  misc_feature: MA Experiment ID: 20000069 Result: Up-regulated in Transcription
  misc_feature: MA Experiment 20000069 PARAMETER Experiment Name: At_100uM_ABA_Mutants_cDNA_P Parameter: Plant Line Value: CS23
  misc_feature: MA Experiment 20000069 PARAMETER Experiment Name: At_100uM_ABA_Mutants_cDNA_P Parameter: Timepoint (hr) Value: 6
  misc_feature: MA Experiment 20000069 PARAMETER Experiment Name: At_100uM_ABA_Mutants_cDNA_P Parameter: Tissue Value: Aerial
  misc_feature: MA Experiment 20000069 PARAMETER Experiment Name: At_100uM_ABA_Mutants_cDNA_P Parameter: Treatment Value: 100uM ABA vs. No Treatment
  misc_feature: MA Experiment ID: 20000070 Result: Up-regulated in Transcription
  misc_feature: MA Experiment 20000070 PARAMETER Experiment Name: At_100uM_ABA_Mutants_cDNA_P Parameter: Plant Line Value: CS24
  misc_feature: MA Experiment 20000070 PARAMETER Experiment Name: At_100uM_ABA_Mutants_cDNA_P Parameter: Timepoint (hr) Value: 6
  misc_feature: MA Experiment 20000070 PARAMETER Experiment Name: At_100uM_ABA_Mutants_cDNA_P Parameter: Tissue Value: Aerial
  misc_feature: MA Experiment 20000070 PARAMETER Experiment Name: At_100uM_ABA_Mutants_cDNA_P Parameter: Treatment Value: 100uM ABA vs. No Treatment
  misc_feature: MA Experiment ID: 20000087 Result: Up-regulated in Transcription
  misc_feature: MA Experiment 20000087 PARAMETER Experiment Name: At_100uM_ABA_Mutants_cDNA_P Parameter: Plant Line Value: WS
  misc_feature: MA Experiment 20000087 PARAMETER Experiment Name: At_100uM_ABA_Mutants_cDNA_P Parameter: Timepoint (hr) Value: 6
  misc_feature: MA Experiment 20000087 PARAMETER Experiment Name: At_100uM_ABA_Mutants_cDNA_P Parameter: Tissue Value: Aerial
  misc_feature: MA Experiment 20000087 PARAMETER Experiment Name: At_100uM_ABA_Mutants_cDNA_P Parameter: Treatment Value: 100uM ABA vs. No Treatment
  misc_feature: MA Experiment ID: 20000088 Result: Up-regulated in Transcription
  misc_feature: MA Experiment 20000088 PARAMETER Experiment Name: At_100uM_ABA_Mutants_cDNA_P Parameter: Plant Line Value: Landsberg
  misc_feature: MA Experiment 20000088 PARAMETER Experiment Name: At_100uM_ABA_Mutants_cDNA_P Parameter: Timepoint (hr) Value: 6
  misc_feature: MA Experiment 20000088 PARAMETER Experiment Name: At_100uM_ABA_Mutants_cDNA_P Parameter: Tissue Value: Aerial
  misc_feature: MA Experiment 20000088 PARAMETER Experiment Name: At_100uM_ABA_Mutants_cDNA_P Parameter: Treatment Value: 100uM ABA vs. No Treatment
  misc_feature: MA Experiment ID: 20000089 Result: Up-regulated in Transcription
  misc_feature: MA Experiment ID: 20000112 Result: Down-regulated in Transcription
  misc_feature: MA Experiment 20000112 PARAMETER Experiment Name: At_42deg_Heat_cDNA_P Parameter: Temperature (deg C) Value: 42 vs. 22
  misc_feature: MA Experiment 20000112 PARAMETER Experiment Name: At_42deg_Heat_cDNA_P Parameter: Timepoint (hr) Value: 2
  misc_feature: MA Experiment 20000112 PARAMETER Experiment Name: At_42deg_Heat_cDNA_P Parameter: Tissue Value: Aerial
  misc_feature: MA Experiment ID: 20000117 Result: Up-regulated in Transcription
  misc_feature: MA Experiment 20000117 PARAMETER Experiment Name: At_100uM_ABA_Mutants_cDNA_P Parameter: Plant Line Value: Columbia
  misc_feature: MA Experiment 20000117 PARAMETER Experiment Name: At_100uM_ABA_Mutants_cDNA_P Parameter: Timepoint (hr) Value: 6
  misc_feature: MA Experiment 20000117 PARAMETER Experiment Name: At_100uM_ABA_Mutants_cDNA_P Parameter: Tissue Value: Aerial
  misc_feature: MA Experiment 20000117 PARAMETER Experiment Name: At_100uM_ABA_Mutants_cDNA_P Parameter: Treatment Value: 100uM ABA vs. No Treatment
acataagtctctctcttacattttgaaaccctaatttctcttcttttccccaaaaaaaaatgtctgaagttgagtaccggtgctttgtcggcggccttgcctgggccaccaatgatgaagatcttcaaaggacgttctcacagttcggcgacgttatcgattctaagatcattaacgaccgcgagagtggaagatcaaggggattcggattcgtcaccttcaaggacgagaaagccatgagggatgcgattgaagagatgaacggtaaagagctcgatggacgtgtcatcaccgtgaacgaggctcagtcgagaggtagcggcggtggcggaggaggttacggatctggtggaggcggtggtggccgaggatacggtggtggtggacgccgtgagggaggtggctacggaggcggtgatggtggaagttacggaggcggtggtggcggctggtaatcaaagatagagttgtttgcgtgctgctgctctgtttttggtttagatttggttttgtgtcaccacttctggtttggttatcgttcgtttggtttacttttttgatgaaacagtttcgtttaagtcttctttgtctg

SEQ ID NO: 103806 - protein, 131 aa, Arabidopsis thaliana; identical to SEQ ID NO: 20905
  peptide (1)..(131): Ceres Seq. ID no. 13613607
  misc_feature (8)..(79): Pfam Name: RNA recognition motif. (a.k.a. RRM, RBD, or RNP domain) Pfam Description: RNA recognition motif. (a.k.a. RRM, RBD, or RNP
  misc_feature (1)..(130): Homolog of NCBI NO: 15235002 NR Description: glycine-rich RNA-binding protein 8 (GRP8) (CCR1)
  misc_feature (1)..(131): Homolog of NCBI NO: 30692254 NR Description: glycine-rich RNA-binding protein 8 (GRP8) (CCR1)
  misc_feature (1)..(131): Homolog of NCBI NO: 544416 NR Description: Glycine-rich RNA-binding protein 10
  misc_feature (1)..(131): Homolog of NCBI NO: 544426 NR Description: Glycine-rich RNA-binding protein
  misc_feature (1)..(131): Homolog of NCBI NO: 2226370 NR Description: RNA-binding protein [Nicotiana glutinosa]
  misc_feature (1)..(130): Homolog of NCBI NO: 2119042 NR Description: glycine-rich RNA-binding protein RGP-1a - wood
  misc_feature (2)..(131): Homolog of NCBI NO: 20152613 NR Description: putative glycine rich protein [Rumex obtusifolius]
  misc_feature (3)..(131): Homolog of NCBI NO: 1346181 NR Description: Glycine-rich RNA-binding protein GRP2A
  misc_feature (2)..(131): Homolog of NCBI NO: 34851124 NR Description: putative glycine-rich RNA-binding protein [Prunus
  misc_feature (3)..(131): Homolog of NCBI NO: 1346180 NR Description: Glycine-rich RNA-binding protein GRP1A

SEQ ID NO: 103807 - protein, 72 aa, Arabidopsis thaliana; identical to SEQ ID NO: 20906
  peptide (1)..(72): Ceres Seq. ID no. 13613608
  misc_feature (10)..(71): Pfam Name: Herpesvirus large structural phosphoprotein UL32 Pfam Description: Herpesvirus large structural phosphoprotein UL32
  misc_feature (1)..(71): Homolog of NCBI NO: 15235002 NR Description: glycine-rich RNA-binding protein 8 (GRP8) (CCR1)
  misc_feature (1)..(72): Homolog of NCBI NO: 30692254 NR Description: glycine-rich RNA-binding protein 8 (GRP8) (CCR1)
  misc_feature (1)..(72): Homolog of NCBI NO: 544416 NR Description: Glycine-rich RNA-binding protein 10
  misc_feature (1)..(72): Homolog of NCBI NO: 544426 NR Description: Glycine-rich RNA-binding protein
  misc_feature (1)..(72): Homolog of NCBI NO: 2226370 NR Description: RNA-binding protein [Nicotiana glutinosa]
  misc_feature (1)..(71): Homolog of NCBI NO: 2119042 NR Description: glycine-rich RNA-binding protein RGP-1a - wood
  misc_feature (1)..(72): Homolog of NCBI NO: 20152613 NR Description: putative glycine rich protein [Rumex obtusifolius]
  misc_feature (1)..(72): Homolog of NCBI NO: 1346181 NR Description: Glycine-rich RNA-binding protein GRP2A
  misc_feature (1)..(72): Homolog of NCBI NO: 34851124 NR Description: putative glycine-rich RNA-binding protein [Prunus
  misc_feature (1)..(72): Homolog of NCBI NO: 1346180 NR Description: Glycine-rich RNA-binding protein GRP1A

SEQ ID NO: 103808 - protein, 65 aa, Arabidopsis thaliana; identical to SEQ ID NO: 20907
  peptide (1)..(65): Ceres Seq. ID no. 13613609
  misc_feature (3)..(64): Pfam Name: Herpesvirus large structural phosphoprotein UL32 Pfam Description: Herpesvirus large structural phosphoprotein UL32
  misc_feature (1)..(64): Homolog of NCBI NO: 15235002 NR Description: glycine-rich RNA-binding protein 8 (GRP8) (CCR1)
  misc_feature (1)..(65): Homolog of NCBI NO: 30692254 NR Description: glycine-rich RNA-binding protein 8 (GRP8) (CCR1)
  misc_feature (1)..(65): Homolog of NCBI NO: 544416 NR Description: Glycine-rich RNA-binding protein 10
  misc_feature (1)..(65): Homolog of NCBI NO: 544426 NR Description: Glycine-rich RNA-binding protein
  misc_feature (1)..(65): Homolog of NCBI NO: 2226370 NR Description: RNA-binding protein [Nicotiana glutinosa]
  misc_feature (1)..(64): Homolog of NCBI NO: 2119042 NR Description: glycine-rich RNA-binding protein RGP-1a - wood
  misc_feature (1)..(65): Homolog of NCBI NO: 20152613 NR Description: putative glycine rich protein [Rumex obtusifolius]
  misc_feature (1)..(65): Homolog of NCBI NO: 1346181 NR Description: Glycine-rich RNA-binding protein GRP2A
  misc_feature (1)..(65): Homolog of NCBI NO: 34851124 NR Description: putative glycine-rich RNA-binding protein [Prunus
  misc_feature (1)..(65): Homolog of NCBI NO: 1346180 NR Description: Glycine-rich RNA-binding protein GRP1A

SEQ ID NO: 103809 - DNA, 591 bp, Arabidopsis thaliana
  misc_feature (1)..(591): Ceres Seq. ID no. 13613610
  misc_feature: MA Experiment ID: 108462 Result: Down-regulated in Transcription
  misc_feature: MA Experiment 108462 PARAMETER Experiment Name: At_Germinating_Seeds_cDNA_P Parameter: Age (day) Value: 2 vs. 0
  misc_feature: MA Experiment 108462 PARAMETER Experiment Name: At_Germinating_Seeds_cDNA_P Parameter: Tissue Value: Germinating Seeds
  misc_feature: MA Experiment ID: 108463 Result: Down-regulated in Transcription
  misc_feature: MA Experiment 108463 PARAMETER Experiment Name: At_Germinating_Seeds_cDNA_P Parameter: Age (day) Value: 3 vs. 0
  misc_feature: MA Experiment 108463 PARAMETER Experiment Name: At_Germinating_Seeds_cDNA_P Parameter: Tissue Value: Germinating Seeds
  misc_feature: MA Experiment ID: 108464 Result: Down-regulated in Transcription
  misc_feature: MA Experiment 108464 PARAMETER Experiment Name: At_Germinating_Seeds_cDNA_P Parameter: Age (day) Value: 4 vs. 0
  misc_feature: MA Experiment 108464 PARAMETER Experiment Name: At_Germinating_Seeds_cDNA_P Parameter: Tissue Value: Germinating Seeds
  misc_feature: MA Experiment ID: 108488 Result: Down-regulated in Transcription
  misc_feature: MA Experiment ID: 108572 Result: Down-regulated in Transcription
  misc_feature: MA Experiment 108572 PARAMETER Experiment Name: At_Drought_cDNA_P Parameter: Timepoint (hr) Value: 1
  misc_feature: MA Experiment 108572 PARAMETER Experiment Name: At_Drought_cDNA_P Parameter: Tissue Value: Aerial
  misc_feature: MA Experiment 108572 PARAMETER Experiment Name: At_Drought_cDNA_P Parameter: Treatment Value: Drought vs. No Drought
  misc_feature: MA Experiment ID: 108573 Result: Down-regulated in Transcription
  misc_feature: MA Experiment 108573 PARAMETER Experiment Name: At_Drought_cDNA_P Parameter: Timepoint (hr) Value: 6
  misc_feature: MA Experiment 108573 PARAMETER Experiment Name: At_Drought_cDNA_P Parameter: Tissue Value: Aerial
  misc_feature: MA Experiment 108573 PARAMETER Experiment Name: At_Drought_cDNA_P Parameter: Treatment Value: Drought vs. No Drought
  misc_feature: MA Experiment ID: 108576 Result: Down-regulated in Transcription
  misc_feature: MA Experiment 108576 PARAMETER Experiment Name: At_42deg_Heat_cDNA_P Parameter: Temperature (deg C) Value: 42 vs. 22
  misc_feature: MA Experiment 108576 PARAMETER Experiment Name: At_42deg_Heat_cDNA_P Parameter: Timepoint (hr) Value: 1
  misc_feature: MA Experiment 108576 PARAMETER Experiment Name: At_42deg_Heat_cDNA_P Parameter: Tissue Value: Aerial
  misc_feature: MA Experiment ID: 108577 Result: Down-regulated in Transcription
  misc_feature: MA Experiment 108577 PARAMETER Experiment Name: At_42deg_Heat_cDNA_P Parameter: Temperature (deg C) Value: 42 vs. 22
  misc_feature: MA Experiment 108577 PARAMETER Experiment Name: At_42deg_Heat_cDNA_P Parameter: Timepoint (hr) Value: 6
  misc_feature: MA Experiment 108577 PARAMETER Experiment Name: At_42deg_Heat_cDNA_P Parameter: Tissue Value: Aerial
  misc_feature: MA Experiment ID: 108579 Result: Up-regulated in Transcription
  misc_feature: MA Experiment 108579 PARAMETER Experiment Name: At_4deg_Cold_cDNA_P Parameter: Temperature (deg C) Value: 4 vs. 22
  misc_feature: MA Experiment 108579 PARAMETER Experiment Name: At_4deg_Cold_cDNA_P Parameter: Timepoint (hr) Value: 6
  misc_feature: MA Experiment 108579 PARAMETER Experiment Name: At_4deg_Cold_cDNA_P Parameter: Tissue Value: Aerial
  misc_feature: MA Experiment ID: 108585 Result: Down-regulated in Transcription
  misc_feature: MA Experiment 108585 PARAMETER Experiment Name: At_5mM_NaNP_cDNA_P Parameter: Timepoint (hr) Value: 6
  misc_feature: MA Experiment 108585 PARAMETER Experiment Name: At_5mM_NaNP_cDNA_P Parameter: Tissue Value: Aerial
  misc_feature: MA Experiment 108585 PARAMETER Experiment Name: At_5mM_NaNP_cDNA_P Parameter: Treatment Value: null
  misc_feature: MA Experiment ID: 108605 Result: Down-regulated in Transcription
  misc_feature: MA Experiment 108605 PARAMETER Experiment Name: At_100uM_ABA_cDNA_P Parameter: Timepoint (hr) Value: 6
  misc_feature: MA Experiment 108605 PARAMETER Experiment Name: At_100uM_ABA_cDNA_P Parameter: Tissue Value: Aerial
  misc_feature: MA Experiment 108605 PARAMETER Experiment Name: At_100uM_ABA_cDNA_P Parameter: Treatment Value: 100uM ABA vs. No Treatment
  misc_feature: MA Experiment ID: 108607 Result: Down-regulated in Transcription
  misc_feature: MA Experiment 108607 PARAMETER Experiment Name: At_100uM_ABA_cDNA_P Parameter: Timepoint (hr) Value: 4
  misc_feature: MA Experiment 108607 PARAMETER Experiment Name: At_100uM_ABA_cDNA_P Parameter: Tissue Value: Aerial
  misc_feature: MA Experiment 108607 PARAMETER Experiment Name: At_100uM_ABA_cDNA_P Parameter: Treatment Value: 100uM ABA vs. No Treatment
  misc_feature: MA Experiment ID: 20000069 Result: Up-regulated in Transcription
  misc_feature: MA Experiment 20000069 PARAMETER Experiment Name: At_100uM_ABA_Mutants_cDNA_P Parameter: Plant Line Value: CS23
  misc_feature: MA Experiment 20000069 PARAMETER Experiment Name: At_100uM_ABA_Mutants_cDNA_P Parameter: Timepoint (hr) Value: 6
  misc_feature: MA Experiment 20000069 PARAMETER Experiment Name: At_100uM_ABA_Mutants_cDNA_P Parameter: Tissue Value: Aerial
  misc_feature: MA Experiment 20000069 PARAMETER Experiment Name: At_100uM_ABA_Mutants_cDNA_P Parameter: Treatment Value: 100uM ABA vs. No Treatment
  misc_feature: MA Experiment ID: 20000070 Result: Up-regulated in Transcription
  misc_feature: MA Experiment 20000070 PARAMETER Experiment Name: At_100uM_ABA_Mutants_cDNA_P Parameter: Plant Line Value: CS24
  misc_feature: MA Experiment 20000070 PARAMETER Experiment Name: At_100uM_ABA_Mutants_cDNA_P Parameter: Timepoint (hr) Value: 6
  misc_feature: MA Experiment 20000070 PARAMETER Experiment Name: At_100uM_ABA_Mutants_cDNA_P Parameter: Tissue Value: Aerial
  misc_feature: MA Experiment 20000070 PARAMETER Experiment Name: At_100uM_ABA_Mutants_cDNA_P Parameter: Treatment Value: 100uM ABA vs. No Treatment
  misc_feature: MA Experiment ID: 20000071 Result: Up-regulated in Transcription
  misc_feature: MA Experiment 20000071 PARAMETER Experiment Name: At_100uM_ABA_Mutants_cDNA_P Parameter: Plant Line Value: CS8104
  misc_feature: MA Experiment 20000071 PARAMETER Experiment Name: At_100uM_ABA_Mutants_cDNA_P Parameter: Timepoint (hr) Value: 6
  misc_feature: MA Experiment 20000071 PARAMETER Experiment Name: At_100uM_ABA_Mutants_cDNA_P Parameter: Tissue Value: Aerial
  misc_feature: MA Experiment 20000071 PARAMETER Experiment Name: At_100uM_ABA_Mutants_cDNA_P Parameter: Treatment Value: 100uM ABA vs. No Treatment
  misc_feature: MA Experiment ID: 20000072 Result: Up-regulated in Transcription
  misc_feature: MA Experiment 20000072 PARAMETER Experiment Name: At_100uM_ABA_Mutants_cDNA_P Parameter: Plant Line Value: CS8105
  misc_feature: MA Experiment 20000072 PARAMETER Experiment Name: At_100uM_ABA_Mutants_cDNA_P Parameter: Timepoint (hr) Value: 6
  misc_feature: MA Experiment 20000072 PARAMETER Experiment Name: At_100uM_ABA_Mutants_cDNA_P Parameter: Tissue Value: Aerial
  misc_feature: MA Experiment 20000072 PARAMETER Experiment Name: At_100uM_ABA_Mutants_cDNA_P Parameter: Treatment Value: 100uM ABA vs. No Treatment
  misc_feature: MA Experiment ID: 20000086 Result: Up-regulated in Transcription
  misc_feature: MA Experiment 20000086 PARAMETER Experiment Name: At_100uM_ABA_Mutants_cDNA_P Parameter: Plant Line Value: CS22
  misc_feature: MA Experiment 20000086 PARAMETER Experiment Name: At_100uM_ABA_Mutants_cDNA_P Parameter: Timepoint (hr) Value: 6
  misc_feature: MA Experiment 20000086 PARAMETER Experiment Name: At_100uM_ABA_Mutants_cDNA_P Parameter: Tissue Value: Aerial
  misc_feature: MA Experiment 20000086 PARAMETER Experiment Name: At_100uM_ABA_Mutants_cDNA_P Parameter: Treatment Value: 100uM ABA vs. No Treatment
  misc_feature: MA Experiment ID: 20000087 Result: Up-regulated in Transcription
  misc_feature: MA Experiment 20000087 PARAMETER Experiment Name: At_100uM_ABA_Mutants_cDNA_P Parameter: Plant Line Value: WS
  misc_feature: MA Experiment 20000087 PARAMETER Experiment Name: At_100uM_ABA_Mutants_cDNA_P Parameter: Timepoint (hr) Value: 6
  misc_feature: MA Experiment 20000087 PARAMETER Experiment Name: At_100uM_ABA_Mutants_cDNA_P Parameter: Tissue Value: Aerial
  misc_feature: MA Experiment 20000087 PARAMETER Experiment Name: At_100uM_ABA_Mutants_cDNA_P Parameter: Treatment Value: 100uM ABA vs. No Treatment
  misc_feature: MA Experiment ID: 20000088 Result: Up-regulated in Transcription
  misc_feature: MA Experiment 20000088 PARAMETER Experiment Name: At_100uM_ABA_Mutants_cDNA_P Parameter: Plant Line Value: Landsberg
  misc_feature: MA Experiment 20000088 PARAMETER Experiment Name: At_100uM_ABA_Mutants_cDNA_P Parameter: Timepoint (hr) Value: 6
  misc_feature: MA Experiment 20000088 PARAMETER Experiment Name: At_100uM_ABA_Mutants_cDNA_P Parameter: Tissue Value: Aerial
  misc_feature: MA Experiment 20000088 PARAMETER Experiment Name: At_100uM_ABA_Mutants_cDNA_P Parameter: Treatment Value: 100uM ABA vs. No Treatment
  misc_feature: MA Experiment ID: 20000089 Result: Up-regulated in Transcription
  misc_feature: MA Experiment ID: 20000090 Result: Up-regulated in Transcription
  misc_feature: MA Experiment ID: 20000111 Result: Down-regulated in Transcription
  misc_feature: MA Experiment 20000111 PARAMETER Experiment Name: At_42deg_Heat_cDNA_P Parameter: Temperature (deg C) Value: 42 vs. 22
  misc_feature: MA Experiment 20000111 PARAMETER Experiment Name: At_42deg_Heat_cDNA_P Parameter: Timepoint (hr) Value: 6
  misc_feature: MA Experiment 20000111 PARAMETER Experiment Name: At_42deg_Heat_cDNA_P Parameter: Tissue Value: Aerial
  misc_feature: MA Experiment ID: 20000112 Result: Down-regulated in Transcription
  misc_feature: MA Experiment 20000112 PARAMETER Experiment Name: At_42deg_Heat_cDNA_P Parameter: Temperature (deg C) Value: 42 vs. 22
  misc_feature: MA Experiment 20000112 PARAMETER Experiment Name: At_42deg_Heat_cDNA_P Parameter: Timepoint (hr) Value: 2
  misc_feature: MA Experiment 20000112 PARAMETER Experiment Name: At_42deg_Heat_cDNA_P Parameter: Tissue Value: Aerial
  misc_feature: MA Experiment ID: 20000113 Result: Down-regulated in Transcription
  misc_feature: MA Experiment 20000113 PARAMETER Experiment Name: At_42deg_Heat_cDNA_P Parameter: Temperature (deg C) Value: 42 vs. 22
  misc_feature: MA Experiment 20000113 PARAMETER Experiment Name: At_42deg_Heat_cDNA_P Parameter: Timepoint (hr) Value: 8
  misc_feature: MA Experiment 20000113 PARAMETER Experiment Name: At_42deg_Heat_cDNA_P Parameter: Tissue Value: Aerial
  misc_feature: MA Experiment ID: 20000117 Result: Up-regulated in Transcription
  misc_feature: MA Experiment 20000117 PARAMETER Experiment Name: At_100uM_ABA_Mutants_cDNA_P Parameter: Plant Line Value: Columbia
  misc_feature: MA Experiment 20000117 PARAMETER Experiment Name: At_100uM_ABA_Mutants_cDNA_P Parameter: Timepoint (hr) Value: 6
  misc_feature: MA Experiment 20000117 PARAMETER Experiment Name: At_100uM_ABA_Mutants_cDNA_P Parameter: Tissue Value: Aerial
  misc_feature: MA Experiment 20000117 PARAMETER Experiment Name: At_100uM_ABA_Mutants_cDNA_P Parameter: Treatment Value: 100uM ABA vs. No Treatment
  misc_feature: MA Experiment ID: 20000173 Result: Down-regulated in Transcription
  misc_feature: MA Experiment 20000173 PARAMETER Experiment Name: At_42deg_Heat_P Parameter: Age (day) Value: 14
  misc_feature: MA Experiment 20000173 PARAMETER Experiment Name: At_42deg_Heat_P Parameter: Organism Value: A. thaliana
  misc_feature: MA Experiment 20000173 PARAMETER Experiment Name: At_42deg_Heat_P Parameter: Plant Line Value: WS
  misc_feature: MA Experiment 20000173 PARAMETER Experiment Name: At_42deg_Heat_P Parameter: Temperature (deg C) Value: 42 vs. 22
  misc_feature: MA Experiment 20000173 PARAMETER Experiment Name: At_42deg_Heat_P Parameter: Timepoint (hr) Value: 6
  misc_feature: MA Experiment 20000173 PARAMETER Experiment Name: At_42deg_Heat_P Parameter: Tissue Value: Aerial
  misc_feature: MA Experiment ID: 20000213 Result: Up-regulated in Transcription
  misc_feature: MA Experiment 20000213 PARAMETER Experiment Name: At_4deg_Cold_P Parameter: Timepoint (hr) Value: 2
  misc_feature: MA Experiment ID: 20000453 Result: Down-regulated in Transcription
  misc_feature: MA Experiment 20000453 PARAMETER Experiment Name: At_100uM_ABA_P Parameter: Age (day) Value: 15
  misc_feature: MA Experiment 20000453 PARAMETER Experiment Name: At_100uM_ABA_P Parameter: Organism Value: A. thaliana
  misc_feature: MA Experiment 20000453 PARAMETER Experiment Name: At_100uM_ABA_P Parameter: Plant Line Value: WS
  misc_feature: MA Experiment 20000453 PARAMETER Experiment Name: At_100uM_ABA_P Parameter: Timepoint (hr) Value: 24
  misc_feature: MA Experiment 20000453 PARAMETER Experiment Name: At_100uM_ABA_P Parameter: Tissue Value: Aerial
  misc_feature: MA Experiment 20000453 PARAMETER Experiment Name: At_100uM_ABA_P Parameter: Treatment Value: 100uM ABA vs. No Treatment
  misc_feature: MA Experiment ID: 20001247 Result: Down-regulated in Transcription
  misc_feature: MA Experiment 20001247 PARAMETER Experiment Name: At_Far-red-induction_P Parameter: Age (day) Value: 7
  misc_feature: MA Experiment 20001247 PARAMETER Experiment Name: At_Far-red-induction_P Parameter: Light Value: Far-red vs. White
  misc_feature: MA Experiment 20001247 PARAMETER Experiment Name: At_Far-red-induction_P Parameter: Organism Value: A. thaliana
  misc_feature: MA Experiment 20001247 PARAMETER Experiment Name: At_Far-red-induction_P Parameter: Plant Line Value: Columbia
  misc_feature: MA Experiment 20001247 PARAMETER Experiment Name: At_Far-red-induction_P Parameter: Timepoint (hr) Value: 1
  misc_feature: MA Experiment 20001247 PARAMETER Experiment Name: At_Far-red-induction_P Parameter: Tissue Value: Whole Plant
  misc_feature: MA Experiment ID: 20001248 Result: Up-regulated in Transcription
  misc_feature: MA Experiment 20001248 PARAMETER Experiment Name: At_Far-red-induction_P Parameter: Age (day) Value: 7
  misc_feature: MA Experiment 20001248 PARAMETER Experiment Name: At_Far-red-induction_P Parameter: Light Value: Far-red vs. White
  misc_feature: MA Experiment 20001248 PARAMETER Experiment Name: At_Far-red-induction_P Parameter: Organism Value: A. thaliana
  misc_feature: MA Experiment 20001248 PARAMETER Experiment Name: At_Far-red-induction_P Parameter: Plant Line Value: Columbia
  misc_feature: MA Experiment 20001248 PARAMETER Experiment Name: At_Far-red-induction_P Parameter: Timepoint (hr) Value: 4
  misc_feature: MA Experiment 20001248 PARAMETER Experiment Name: At_Far-red-induction_P Parameter: Tissue Value: Whole Plant
  misc_feature: MA Experiment ID: 20001557 Result: Up-regulated in Transcription
  misc_feature: MA Experiment 20001557 PARAMETER Experiment Name: At_Drought_Soil_Dry_P Parameter: Age (day) Value: 27
  misc_feature: MA Experiment 20001557 PARAMETER Experiment Name: At_Drought_Soil_Dry_P Parameter: Organism Value: A. thaliana
  misc_feature: MA Experiment 20001557 PARAMETER Experiment Name: At_Drought_Soil_Dry_P Parameter: Plant Line Value: WS
  misc_feature: MA Experiment 20001557 PARAMETER Experiment Name: At_Drought_Soil_Dry_P Parameter: Post Timepoint (hr) Value: 3
  misc_feature: MA Experiment 20001557 PARAMETER Experiment Name: At_Drought_Soil_Dry_P Parameter: Post-Treatment Value: Re-Water vs. No Drought
  misc_feature: MA Experiment 20001557 PARAMETER Experiment Name: At_Drought_Soil_Dry_P Parameter: Timepoint (day) Value: 13
  misc_feature: MA Experiment 20001557 PARAMETER Experiment Name: At_Drought_Soil_Dry_P Parameter: Treatment Value: Drought vs. No Drought
cacataagtctctctcttacattttgaaaccctaatttctcttcttttccccaaaaaaaaatgtctgaagttgagtaccggtgctttgtcggcggccttgcctgggccaccaatgatgaagatcttcaaaggacgttctcacagttcggcgacgttatcgattctaagatcattaacgaccgcgagagtggaagatcaaggggattcggattcgtcaccttcaaggacgagaaagccatgagggatgcgattgaagagatgaacggtaaagagctcgatggacgtgtcatcaccgtgaacgaggctcagtcgagaggtagcggcggtggcggaggaggccgtggtggacgccgtgagggaggtggctacggaggcggtgatggtggaagttacggaggcggtggtggcggctggtaatcaaagatagagttgtttgcgtgctgctgctctgtttttggtttagatttggttttgtgtcaccacttctggtttggttatcgttcgtttggtttacttttttgatgaaacagtttcgtttaagtcttctttgtctggaacgaaatgttaattcgcgtgttgtttactaaattt

SEQ ID NO: 103810 - protein, 118 aa, Arabidopsis thaliana
  peptide (1)..(118): Ceres Seq. ID no. 13613611
  misc_feature (8)..(79): Pfam Name: RNA recognition motif. (a.k.a. RRM, RBD, or RNP domain) Pfam Description: RNA recognition motif. (a.k.a. RRM, RBD, or RNP
  misc_feature (1)..(118): Homolog of NCBI NO: 30692254 NR Description: glycine-rich RNA-binding protein 8 (GRP8) (CCR1)
  misc_feature (1)..(117): Homolog of NCBI NO: 15235002 NR Description: glycine-rich RNA-binding protein 8 (GRP8) (CCR1)
  misc_feature (1)..(118): Homolog of NCBI NO: 544416 NR Description: Glycine-rich RNA-binding protein 10
  misc_feature (1)..(118): Homolog of NCBI NO: 544426 NR Description: Glycine-rich RNA-binding protein
  misc_feature (1)..(118): Homolog of NCBI NO: 30692258 NR Description: glycine-rich RNA-binding protein 8 (GRP8) (CCR1)
  misc_feature (3)..(118): Homolog of NCBI NO: 1346180 NR Description: Glycine-rich RNA-binding protein GRP1A
  misc_feature (1)..(118): Homolog of NCBI NO: 2226370 NR Description: RNA-binding protein [Nicotiana glutinosa]
  misc_feature (1)..(116): Homolog of NCBI NO: 2119042 NR Description: glycine-rich RNA-binding protein RGP-1a - wood
  misc_feature (1)..(118): Homolog of NCBI NO: 7439982 NR Description: RNA-binding glycine-rich protein-1 (RGP-1c) -
  misc_feature (3)..(118): Homolog of NCBI NO: 1346181 NR Description: Glycine-rich RNA-binding protein GRP2A
MSEVEYRCFVGGLAWATNDEDLQRTFSQFGDVIDSKIINDRESGRSRGFGFVTFKDEKAMRDAIEEMNGKELDGRVITVNEAQSRGSGGGGGGRGGRREGGGYGGGDGGSYGGGGGGW

SEQ ID NO: 103811 - protein, 59 aa, Arabidopsis thaliana; identical to SEQ ID NO: 39123
  peptide (1)..(59): Ceres Seq. ID no. 13613612
  misc_feature (1)..(59): Homolog of NCBI NO: 30692254 NR Description: glycine-rich RNA-binding protein 8 (GRP8) (CCR1)
  misc_feature (1)..(58): Homolog of NCBI NO: 15235002 NR Description: glycine-rich RNA-binding protein 8 (GRP8) (CCR1)
  misc_feature (1)..(59): Homolog of NCBI NO: 544416 NR Description: Glycine-rich RNA-binding protein 10
  misc_feature (1)..(59): Homolog of NCBI NO: 544426 NR Description: Glycine-rich RNA-binding protein
  misc_feature (1)..(59): Homolog of NCBI NO: 30692258 NR Description: glycine-rich RNA-binding protein 8 (GRP8) (CCR1)
  misc_feature (1)..(59): Homolog of NCBI NO: 1346180 NR Description: Glycine-rich RNA-binding protein GRP1A
  misc_feature (1)..(59): Homolog of NCBI NO: 2226370 NR Description: RNA-binding protein [Nicotiana glutinosa]
  misc_feature (1)..(57): Homolog of NCBI NO: 2119042 NR Description: glycine-rich RNA-binding protein RGP-1a - wood
  misc_feature (1)..(59): Homolog of NCBI NO: 7439982 NR Description: RNA-binding glycine-rich protein-1 (RGP-1c) -
  misc_feature (1)..(59): Homolog of NCBI NO: 1346181 NR Description: Glycine-rich RNA-binding protein GRP2A

SEQ ID NO: 103812 - DNA, 554 bp, Arabidopsis thaliana
  misc_feature (1)..(554): Ceres Seq. ID no. 13613613
  misc_feature: MA Experiment ID: 108462 Result: Down-regulated in Transcription
  misc_feature: MA Experiment 108462 PARAMETER Experiment Name: At_Germinating_Seeds_cDNA_P Parameter: Age (day) Value: 2 vs. 0
  misc_feature: MA Experiment 108462 PARAMETER Experiment Name: At_Germinating_Seeds_cDNA_P Parameter: Tissue Value: Germinating Seeds
  misc_feature: MA Experiment ID: 108488 Result: Down-regulated in Transcription
  misc_feature: MA Experiment ID: 108572 Result: Down-regulated in Transcription
  misc_feature: MA Experiment 108572 PARAMETER Experiment Name: At_Drought_cDNA_P Parameter: Timepoint (hr) Value: 1
  misc_feature: MA Experiment 108572 PARAMETER Experiment Name: At_Drought_cDNA_P Parameter: Tissue Value: Aerial
  misc_feature: MA Experiment 108572 PARAMETER Experiment Name: At_Drought_cDNA_P Parameter: Treatment Value: Drought vs. No Drought
  misc_feature: MA Experiment ID: 108573 Result: Down-regulated in Transcription
  misc_feature: MA Experiment 108573 PARAMETER Experiment Name: At_Drought_cDNA_P Parameter: Timepoint (hr) Value: 6
  misc_feature: MA Experiment 108573 PARAMETER Experiment Name: At_Drought_cDNA_P Parameter: Tissue Value: Aerial
  misc_feature: MA Experiment 108573 PARAMETER Experiment Name: At_Drought_cDNA_P Parameter: Treatment Value: Drought vs. No Drought
  misc_feature: MA Experiment ID: 108577 Result: Down-regulated in Transcription
  misc_feature: MA Experiment 108577 PARAMETER Experiment Name: At_42deg_Heat_cDNA_P Parameter: Temperature (deg C) Value: 42 vs. 22
  misc_feature: MA Experiment 108577 PARAMETER Experiment Name: At_42deg_Heat_cDNA_P Parameter: Timepoint (hr) Value: 6
  misc_feature: MA Experiment 108577 PARAMETER Experiment Name: At_42deg_Heat_cDNA_P Parameter: Tissue Value: Aerial
  misc_feature: MA Experiment ID: 108579 Result: Up-regulated in Transcription
  misc_feature: MA Experiment 108579 PARAMETER Experiment Name: At_4deg_Cold_cDNA_P Parameter: Temperature (deg C) Value: 4 vs. 22
  misc_feature: MA Experiment 108579 PARAMETER Experiment Name: At_4deg_Cold_cDNA_P Parameter: Timepoint (hr) Value: 6
  misc_feature: MA Experiment 108579 PARAMETER Experiment Name: At_4deg_Cold_cDNA_P Parameter: Tissue Value: Aerial
  misc_feature: MA Experiment ID: 108605 Result: Down-regulated in Transcription
  misc_feature: MA Experiment 108605 PARAMETER Experiment Name: At_100uM_ABA_cDNA_P Parameter: Timepoint (hr) Value: 6
  misc_feature: MA Experiment 108605 PARAMETER Experiment Name: At_100uM_ABA_cDNA_P Parameter: Tissue Value: Aerial
  misc_feature: MA Experiment 108605 PARAMETER Experiment Name: At_100uM_ABA_cDNA_P Parameter: Treatment Value: 100uM ABA vs. No Treatment
  misc_feature: MA Experiment ID: 108607 Result: Down-regulated in Transcription
  misc_feature: MA Experiment 108607 PARAMETER Experiment Name: At_100uM_ABA_cDNA_P Parameter: Timepoint (hr) Value: 4
  misc_feature: MA Experiment 108607 PARAMETER Experiment Name: At_100uM_ABA_cDNA_P Parameter: Tissue Value: Aerial
  misc_feature: MA Experiment 108607 PARAMETER Experiment Name: At_100uM_ABA_cDNA_P Parameter: Treatment Value: 100uM ABA vs. No Treatment
  misc_feature: MA Experiment ID: 108608 Result: Down-regulated in Transcription
  misc_feature: MA Experiment 108608 PARAMETER Experiment Name: At_100uM_ABA_cDNA_P Parameter: Timepoint (hr) Value: 1
  misc_feature: MA Experiment 108608 PARAMETER Experiment Name: At_100uM_ABA_cDNA_P Parameter: Tissue Value: Aerial
  misc_feature: MA Experiment 108608 PARAMETER Experiment Name: At_100uM_ABA_cDNA_P Parameter: Treatment Value: 100uM ABA vs. No Treatment
  misc_feature: MA Experiment ID: 20000069 Result: Up-regulated in Transcription
  misc_feature: MA Experiment 20000069 PARAMETER Experiment Name: At_100uM_ABA_Mutants_cDNA_P Parameter: Plant Line Value: CS23
  misc_feature: MA Experiment 20000069 PARAMETER Experiment Name: At_100uM_ABA_Mutants_cDNA_P Parameter: Timepoint (hr) Value: 6
  misc_feature: MA Experiment 20000069 PARAMETER Experiment Name: At_100uM_ABA_Mutants_cDNA_P Parameter: Tissue Value: Aerial
  misc_feature: MA Experiment 20000069 PARAMETER Experiment Name: At_100uM_ABA_Mutants_cDNA_P Parameter: Treatment Value: 100uM ABA vs. No Treatment
  misc_feature: MA Experiment ID: 20000070 Result: Up-regulated in Transcription
  misc_feature: MA Experiment 20000070 PARAMETER Experiment Name: At_100uM_ABA_Mutants_cDNA_P Parameter: Plant Line Value: CS24
  misc_feature: MA Experiment 20000070 PARAMETER Experiment Name: At_100uM_ABA_Mutants_cDNA_P Parameter: Timepoint (hr) Value: 6
  misc_feature: MA Experiment 20000070 PARAMETER Experiment Name: At_100uM_ABA_Mutants_cDNA_P Parameter: Tissue Value: Aerial
  misc_feature: MA Experiment 20000070 PARAMETER Experiment Name: At_100uM_ABA_Mutants_cDNA_P Parameter: Treatment Value: 100uM ABA vs. No Treatment
  misc_feature: MA Experiment ID: 20000071 Result: Up-regulated in Transcription
  misc_feature: MA Experiment 20000071 PARAMETER Experiment Name: At_100uM_ABA_Mutants_cDNA_P Parameter: Plant Line Value: CS8104
  misc_feature: MA Experiment 20000071 PARAMETER Experiment Name: At_100uM_ABA_Mutants_cDNA_P Parameter: Timepoint (hr) Value: 6
  misc_feature: MA Experiment 20000071 PARAMETER Experiment Name: At_100uM_ABA_Mutants_cDNA_P Parameter: Tissue Value: Aerial
  misc_feature: MA Experiment 20000071 PARAMETER Experiment Name: At_100uM_ABA_Mutants_cDNA_P Parameter: Treatment Value: 100uM ABA vs. No Treatment
  misc_feature: MA Experiment ID: 20000072 Result: Up-regulated in Transcription
  misc_feature: MA Experiment 20000072 PARAMETER Experiment Name: At_100uM_ABA_Mutants_cDNA_P Parameter: Plant Line Value: CS8105
  misc_feature: MA Experiment 20000072 PARAMETER Experiment Name: At_100uM_ABA_Mutants_cDNA_P Parameter: Timepoint (hr) Value: 6
  misc_feature: MA Experiment 20000072 PARAMETER Experiment Name: At_100uM_ABA_Mutants_cDNA_P Parameter: Tissue Value: Aerial
  misc_feature: MA Experiment 20000072 PARAMETER Experiment Name: At_100uM_ABA_Mutants_cDNA_P Parameter: Treatment Value: 100uM ABA vs. No Treatment
  misc_feature: MA Experiment ID: 20000086 Result: Up-regulated in Transcription
  misc_feature: MA Experiment 20000086 PARAMETER Experiment Name: At_100uM_ABA_Mutants_cDNA_P Parameter: Plant Line Value: CS22
  misc_feature: MA Experiment 20000086 PARAMETER Experiment Name: At_100uM_ABA_Mutants_cDNA_P Parameter: Timepoint (hr) Value: 6
  misc_feature: MA Experiment 20000086 PARAMETER Experiment Name: At_100uM_ABA_Mutants_cDNA_P Parameter: Tissue Value: Aerial
  misc_feature: MA Experiment 20000086 PARAMETER Experiment Name: At_100uM_ABA_Mutants_cDNA_P Parameter: Treatment Value: 100uM ABA vs. No Treatment
  misc_feature: MA Experiment ID: 20000087 Result: Up-regulated in Transcription
  misc_feature: MA Experiment 20000087 PARAMETER Experiment Name: At_100uM_ABA_Mutants_cDNA_P Parameter: Plant Line Value: WS
  misc_feature: MA Experiment 20000087 PARAMETER Experiment Name: At_100uM_ABA_Mutants_cDNA_P Parameter: Timepoint (hr) Value: 6
  misc_feature: MA Experiment 20000087 PARAMETER Experiment Name: At_100uM_ABA_Mutants_cDNA_P Parameter: Tissue Value: Aerial
  misc_feature: MA Experiment 20000087 PARAMETER Experiment Name: At_100uM_ABA_Mutants_cDNA_P Parameter: Treatment Value: 100uM ABA vs. No Treatment
  misc_feature: MA Experiment ID: 20000088 Result: Up-regulated in Transcription
  misc_feature: MA Experiment 20000088 PARAMETER Experiment Name: At_100uM_ABA_Mutants_cDNA_P Parameter: Plant Line Value: Landsberg
  misc_feature: MA Experiment 20000088 PARAMETER Experiment Name: At_100uM_ABA_Mutants_cDNA_P Parameter: Timepoint (hr) Value: 6
  misc_feature: MA Experiment 20000088 PARAMETER Experiment Name: At_100uM_ABA_Mutants_cDNA_P Parameter: Tissue Value: Aerial
  misc_feature: MA Experiment 20000088 PARAMETER Experiment Name: At_100uM_ABA_Mutants_cDNA_P Parameter: Treatment Value: 100uM ABA vs. No Treatment
  misc_feature: MA Experiment ID: 20000089 Result: Up-regulated in Transcription
  misc_feature: MA Experiment ID: 20000090 Result: Up-regulated in Transcription
  misc_feature: MA Experiment ID: 20000111 Result: Down-regulated in Transcription
  misc_feature: MA Experiment 20000111 PARAMETER Experiment Name: At_42deg_Heat_cDNA_P Parameter: Temperature (deg C) Value: 42 vs. 22
  misc_feature: MA Experiment 20000111 PARAMETER Experiment Name: At_42deg_Heat_cDNA_P Parameter: Timepoint (hr) Value: 6
  misc_feature: MA Experiment 20000111 PARAMETER Experiment Name: At_42deg_Heat_cDNA_P Parameter: Tissue Value: Aerial
  misc_feature: MA Experiment ID: 20000112 Result: Down-regulated in Transcription
  misc_feature: MA Experiment 20000112 PARAMETER Experiment Name: At_42deg_Heat_cDNA_P Parameter: Temperature (deg C) Value: 42 vs. 22
  misc_feature: MA Experiment 20000112 PARAMETER Experiment Name: At_42deg_Heat_cDNA_P Parameter: Timepoint (hr) Value: 2
  misc_feature: MA Experiment 20000112 PARAMETER Experiment Name: At_42deg_Heat_cDNA_P Parameter: Tissue Value: Aerial
  misc_feature: MA Experiment ID: 20000113 Result: Down-regulated in Transcription
  misc_feature: MA Experiment 20000113 PARAMETER Experiment Name: At_42deg_Heat_cDNA_P Parameter: Temperature (deg C) Value: 42 vs. 22
  misc_feature: MA Experiment 20000113 PARAMETER Experiment Name: At_42deg_Heat_cDNA_P Parameter: Timepoint (hr) Value: 8
  misc_feature: MA Experiment 20000113 PARAMETER Experiment Name: At_42deg_Heat_cDNA_P Parameter: Tissue Value: Aerial
  misc_feature: MA Experiment ID: 20000117 Result: Up-regulated in Transcription
  misc_feature: MA Experiment 20000117 PARAMETER Experiment Name: At_100uM_ABA_Mutants_cDNA_P Parameter: Plant Line Value: Columbia
  misc_feature: MA Experiment 20000117 PARAMETER Experiment Name: At_100uM_ABA_Mutants_cDNA_P Parameter: Timepoint (hr) Value: 6
  misc_feature: MA Experiment 20000117 PARAMETER Experiment Name: At_100uM_ABA_Mutants_cDNA_P Parameter: Tissue Value: Aerial
  misc_feature: MA Experiment 20000117 PARAMETER Experiment Name: At_100uM_ABA_Mutants_cDNA_P Parameter: Treatment Value: 100uM ABA vs. No Treatment
  misc_feature: MA Experiment ID: 20000173 Result: Down-regulated in Transcription
  misc_feature: MA Experiment 20000173 PARAMETER Experiment Name: At_42deg_Heat_P Parameter: Age (day) Value: 14
  misc_feature: MA Experiment 20000173 PARAMETER Experiment Name: At_42deg_Heat_P Parameter: Organism Value: A. thaliana
  misc_feature: MA Experiment 20000173 PARAMETER Experiment Name: At_42deg_Heat_P Parameter: Plant Line Value: WS
  misc_feature: MA Experiment 20000173 PARAMETER Experiment Name: At_42deg_Heat_P Parameter: Temperature (deg C) Value: 42 vs. 22
  misc_feature: MA Experiment 20000173 PARAMETER Experiment Name: At_42deg_Heat_P Parameter: Timepoint (hr) Value: 6
  misc_feature: MA Experiment 20000173 PARAMETER Experiment Name: At_42deg_Heat_P Parameter: Tissue Value: Aerial
  misc_feature: MA Experiment ID: 20000213 Result: Up-regulated in Transcription
  misc_feature: MA Experiment 20000213 PARAMETER Experiment Name: At_4deg_Cold_P Parameter: Timepoint (hr) Value: 2
  misc_feature: MA Experiment ID: 20000453 Result: Down-regulated in Transcription
  misc_feature: MA Experiment 20000453 PARAMETER Experiment Name: At_100uM_ABA_P Parameter: Age (day) Value: 15
  misc_feature: MA Experiment 20000453 PARAMETER Experiment Name: At_100uM_ABA_P Parameter: Organism Value: A. thaliana
  misc_feature: MA Experiment 20000453 PARAMETER Experiment Name: At_100uM_ABA_P Parameter: Plant Line Value: WS
  misc_feature: MA Experiment 20000453 PARAMETER Experiment Name: At_100uM_ABA_P Parameter: Timepoint (hr) Value: 24
  misc_feature: MA Experiment 20000453 PARAMETER Experiment Name: At_100uM_ABA_P Parameter: Tissue Value: Aerial
  misc_feature: MA Experiment 20000453 PARAMETER Experiment Name: At_100uM_ABA_P Parameter: Treatment Value: 100uM ABA vs. No Treatment
  misc_feature: MA Experiment ID: 20001247 Result: Down-regulated in Transcription
  misc_feature: MA Experiment 20001247 PARAMETER Experiment Name: At_Far-red-induction_P Parameter: Age (day) Value: 7
  misc_feature: MA Experiment 20001247 PARAMETER Experiment Name: At_Far-red-induction_P Parameter: Light Value: Far-red vs. White
  misc_feature: MA Experiment 20001247 PARAMETER Experiment Name: At_Far-red-induction_P Parameter: Organism Value: A. thaliana
  misc_feature: MA Experiment 20001247 PARAMETER Experiment Name: At_Far-red-induction_P Parameter: Plant Line Value: Columbia
  misc_feature: MA Experiment 20001247 PARAMETER Experiment Name: At_Far-red-induction_P Parameter: Timepoint (hr) Value: 1
  misc_feature: MA Experiment 20001247 PARAMETER Experiment Name: At_Far-red-induction_P Parameter: Tissue Value: Whole Plant
  misc_feature: MA Experiment ID: 20001248 Result: Up-regulated in Transcription
  misc_feature: MA Experiment 20001248 PARAMETER Experiment Name: At_Far-red-induction_P Parameter: Age (day) Value: 7
  misc_feature: MA Experiment 20001248 PARAMETER Experiment Name: At_Far-red-induction_P Parameter: Light Value: Far-red vs. White
  misc_feature: MA Experiment 20001248 PARAMETER Experiment Name: At_Far-red-induction_P Parameter: Organism Value: A. thaliana
  misc_feature: MA Experiment 20001248 PARAMETER Experiment Name: At_Far-red-induction_P Parameter: Plant Line Value: Columbia
  misc_feature: MA Experiment 20001248 PARAMETER Experiment Name: At_Far-red-induction_P Parameter: Timepoint (hr) Value: 4
  misc_feature: MA Experiment 20001248 PARAMETER Experiment Name: At_Far-red-induction_P Parameter: Tissue Value: Whole Plant
  misc_feature: MA Experiment ID: 20001557 Result: Up-regulated in Transcription
  misc_feature: MA Experiment 20001557 PARAMETER Experiment Name: At_Drought_Soil_Dry_P Parameter: Age (day) Value: 27
  misc_feature: MA Experiment 20001557 PARAMETER Experiment Name: At_Drought_Soil_Dry_P Parameter: Organism Value: A. thaliana
  misc_feature: MA Experiment 20001557 PARAMETER Experiment Name: At_Drought_Soil_Dry_P Parameter: Plant Line Value: WS
  misc_feature: MA Experiment 20001557 PARAMETER Experiment Name: At_Drought_Soil_Dry_P Parameter: Post Timepoint (hr) Value: 3
  misc_feature: MA Experiment 20001557 PARAMETER Experiment Name: At_Drought_Soil_Dry_P Parameter: Post-Treatment Value: Re-Water vs. No Drought
  misc_feature: MA Experiment 20001557 PARAMETER Experiment Name: At_Drought_Soil_Dry_P Parameter: Timepoint (day) Value: 13
  misc_feature: MA Experiment 20001557 PARAMETER Experiment Name: At_Drought_Soil_Dry_P Parameter: Treatment Value: Drought vs. No Drought
acataagtctctctcttacattttgaaaccctaatttctcttcttttccccaaaaaaaaatgtctgaagttgagtaccggtgctttgtcggcggccttgcctgggccaccaatgatgaagatcttcaaaggacgttctcacagttcggcgacgttatcgattctaagatcattaacgaccgcgagagtggaagatcaaggggattcggattcgtcaccttcaaggacgagaaagccatgagggatgcgattgaagagatgaacggtaaagagctcgatggacgtgtcatcaccgtgaacgaggctcagtcgagaggtagcggcggtgatggtggaagttacggaggcggtggtggcggctggtaatcaaagatagagttgtttgcgtgctgctgctctgtttttggtttagatttggttttgtgtcaccacttctggtttggttatcgttcgtttggtttacttttttgatgaaacagtttcgtttaagtcttctttgtctggaacgaaatgttaattcgcgtgttgtttactaaatttataacgtttcctttt

SEQ ID NO: 103813 - protein, 101 aa, Arabidopsis thaliana
  peptide (1)..(101): Ceres Seq. ID no. 13613614
  misc_feature (8)..(79): Pfam Name: RNA recognition motif. (a.k.a. RRM, RBD, or RNP domain) Pfam Description: RNA recognition motif. (a.k.a. RRM, RBD, or RNP
  misc_feature (1)..(101): Homolog of NCBI NO: 15235002 NR Description: glycine-rich RNA-binding protein 8 (GRP8) (CCR1)
  misc_feature (1)..(101): Homolog of NCBI NO: 30692254 NR Description: glycine-rich RNA-binding protein 8 (GRP8) (CCR1)
  misc_feature (1)..(91): Homolog of NCBI NO: 30692256 NR Description: glycine-rich RNA-binding protein 8 (GRP8) (CCR1)
  misc_feature (1)..(100): Homolog of NCBI NO: 544416 NR Description: Glycine-rich RNA-binding protein 10
  misc_feature (1)..(101): Homolog of NCBI NO: 544426 NR Description: Glycine-rich RNA-binding protein
  misc_feature (3)..(101): Homolog of NCBI NO: 15226605 NR Description: glycine-rich RNA-binding protein (AtGRP7)
  misc_feature (3)..(101): Homolog of NCBI NO: 21553354 NR Description: glycine-rich RNA binding protein 7 [Arabidopsis
  misc_feature (1)..(101): Homolog of NCBI NO: 2226370 NR Description: RNA-binding protein [Nicotiana glutinosa]
  misc_feature (1)..(101): Homolog of NCBI NO: 30692258 NR Description: glycine-rich RNA-binding protein 8 (GRP8) (CCR1)
  misc_feature (1)..(101): Homolog of NCBI NO: 2119042 NR Description: glycine-rich RNA-binding protein RGP-1a - wood
MSEVEYRCFVGGLAWATNDEDLQRTFSQFGDVIDSKIINDRESGRSRGFGFVTFKDEKAMRDAIEEMNGKELDGRVITVNEAQSRGSGGDGGSYGGGGGGW

SEQ ID NO: 103814 - DNA, 1251 bp, Arabidopsis thaliana
  misc_feature (1)..(1251): Ceres Seq. ID no. 13613615
  misc_feature: MA Experiment ID: 108434 Result: Up-regulated in Transcription
  misc_feature: MA Experiment 108434 PARAMETER Experiment Name: At_Root_Tips_cDNA_P Parameter: Tissue Value: Root Tips
  misc_feature: MA Experiment ID: 108577 Result: Up-regulated in Transcription
  misc_feature: MA Experiment 108577 PARAMETER Experiment Name: At_42deg_Heat_cDNA_P Parameter: Temperature (deg C) Value: 42 vs. 22
  misc_feature: MA Experiment 108577 PARAMETER Experiment Name: At_42deg_Heat_cDNA_P Parameter: Timepoint (hr) Value: 6
  misc_feature: MA Experiment 108577 PARAMETER Experiment Name: At_42deg_Heat_cDNA_P Parameter: Tissue Value: Aerial
  misc_feature: MA Experiment ID: 108595 Result: Down-regulated in Transcription
  misc_feature: MA Experiment 108595 PARAMETER Experiment Name: At_Ler-pi_Ovule_cDNA_P Parameter: Plant Line Value: null
  misc_feature: MA Experiment ID: 20000111 Result: Up-regulated in Transcription
  misc_feature: MA Experiment 20000111 PARAMETER Experiment Name: At_42deg_Heat_cDNA_P Parameter: Temperature (deg C) Value: 42 vs. 22
  misc_feature: MA Experiment 20000111 PARAMETER Experiment Name: At_42deg_Heat_cDNA_P Parameter: Timepoint (hr) Value: 6
  misc_feature: MA Experiment 20000111 PARAMETER Experiment Name: At_42deg_Heat_cDNA_P Parameter: Tissue Value: Aerial
  misc_feature: MA Experiment ID: 20000113 Result: Up-regulated in Transcription
  misc_feature: MA Experiment 20000113 PARAMETER Experiment Name: At_42deg_Heat_cDNA_P Parameter: Temperature (deg C) Value: 42 vs. 22
  misc_feature: MA Experiment 20000113 PARAMETER Experiment Name: At_42deg_Heat_cDNA_P Parameter: Timepoint (hr) Value: 8
  misc_feature: MA Experiment 20000113 PARAMETER Experiment Name: At_42deg_Heat_cDNA_P Parameter: Tissue Value: Aerial
  misc_feature: MA Experiment ID: 20000117 Result: Down-regulated in Transcription
  misc_feature: MA Experiment 20000117 PARAMETER Experiment Name: At_100uM_ABA_Mutants_cDNA_P Parameter: Plant Line Value: Columbia
  misc_feature: MA Experiment 20000117 PARAMETER Experiment Name: At_100uM_ABA_Mutants_cDNA_P Parameter: Timepoint (hr) Value: 6
  misc_feature: MA Experiment 20000117 PARAMETER Experiment Name: At_100uM_ABA_Mutants_cDNA_P Parameter: Tissue Value: Aerial
  misc_feature: MA Experiment 20000117 PARAMETER Experiment Name: At_100uM_ABA_Mutants_cDNA_P Parameter: Treatment Value: 100uM ABA vs. No Treatment
  misc_feature: MA Experiment ID: 20000184 Result: Up-regulated in Transcription
  misc_feature: MA Experiment 20000184 PARAMETER Experiment Name: At_Shoots__P Parameter: Age (day) Value: 7
  misc_feature: MA Experiment 20000184 PARAMETER Experiment Name: At_Shoots__P Parameter: Tissue Value: Shoots vs. Whole Plant
  misc_feature: MA Experiment ID: 20000227 Result: Down-regulated in Transcription
  misc_feature: MA Experiment 20000227 PARAMETER Experiment Name: At_Root-Tips-vs-Tops_P Parameter: Tissue Value: Root Tips vs. Root Tops
  misc_feature: MA Experiment ID: 20000234 Result: Up-regulated in Transcription
  misc_feature: MA Experiment 20000234 PARAMETER Experiment Name: At_Siliques_P Parameter: Age (day) Value: 21
  misc_feature: MA Experiment 20000234 PARAMETER Experiment Name: At_Siliques_P Parameter: Organism Value: A. thaliana
  misc_feature: MA Experiment 20000234 PARAMETER Experiment Name: At_Siliques_P Parameter: Plant Line Value: WS
  misc_feature: MA Experiment 20000234 PARAMETER Experiment Name: At_Siliques_P Parameter: Tissue Value: Less Than 5mm Siliques vs. Whole Plant
  misc_feature: MA Experiment ID: 20000437 Result: Down-regulated in Transcription
  misc_feature: MA Experiment 20000437 PARAMETER Experiment Name: At_Drought_P Parameter: Age (day) Value: 8
  misc_feature: MA Experiment 20000437 PARAMETER Experiment Name: At_Drought_P Parameter: Organism Value: A. thaliana
  misc_feature: MA Experiment 20000437 PARAMETER Experiment Name: At_Drought_P Parameter: Plant Line Value: WS
  misc_feature: MA Experiment 20000437 PARAMETER Experiment Name: At_Drought_P Parameter: Timepoint (hr) Value: 24
  misc_feature: MA Experiment 20000437 PARAMETER Experiment Name: At_Drought_P Parameter: Tissue Value: Whole Plant
  misc_feature: MA Experiment 20000437 PARAMETER Experiment Name: At_Drought_P Parameter: Treatment Value: Drought vs. No Drought
  misc_feature: MA Experiment ID: 20000438 Result: Up-regulated in Transcription
  misc_feature: MA Experiment 20000438 PARAMETER Experiment Name: At_Shoots__P Parameter: Age (day) Value: 14
  misc_feature: MA Experiment 20000438 PARAMETER Experiment Name: At_Shoots__P Parameter: Tissue Value: Shoots vs. Whole Plant
  misc_feature: MA Experiment ID: 20001757 Result: Up-regulated in Transcription
  misc_feature: MA Experiment 20001757 PARAMETER Experiment Name: At_50mM_NH4NO3_L-to-H_P Parameter: Timepoint (hr) Value: 6
  misc_feature: MA Experiment 20001757 PARAMETER Experiment Name: At_50mM_NH4NO3_L-to-H_P Parameter: Tissue Value: Leaf
  misc_feature: MA Experiment 20001757 PARAMETER Experiment Name: At_50mM_NH4NO3_L-to-H_P Parameter: Treatment Value: 50mM NH4NO3 vs 100mM Mannitol
aatcaatcctcttgcggagaaactttgggaagagccgaagagaagtcgaggtctctctatctctctctttcgtacacttcgcgcttctcttcctgtcagaggcgtttctcatggctcctcttactctctccgttgatgtgaagagctcttcagcgacctctcatgatgtttcgaagagggtaatgcagagttcacagctcaaaataaacaaaggcttttttgcatctgttaatacacaagaagataaaccctttgatttcttccgcactctctttgaggggtttatagcaggaggtacagctggagttgtagttgaaacagctttatacccaattgatactattaagactagacttcaggcagctcgtggaggtggaaaaattgttttgaagggtctttattcaggattagctggaaatatcgctggtgtcttaccggcttcggctttatttgttggagtttacgaacccacaaagcagaaactgctgaagacctttcctgatcatttaagcgcagttgctcacctgactgcaggggccatcggtggacttgctgcatctctgattcgagtgcctacagaggttgtgaagcaaagaatgcagaccggacagtttacatcagctcccagtgctgttcgaatgattgcatcaaaagagggatttaggggtctctatgcaggataccggtccttccttttgcgagatttgccatttgatgctatacagttctgcatatatgagcagctttgcttggggtataaaaaagccgcgcgtagagagcttagtgatcctgagaacgctctaatcggtgcatttgctggtgctctgaccggagcagtcaccactccgcttgatgttattaagacaagattaatggttcagggatcagccaaacaatatcaaggaatcgttgactgtgttcaaacaattgtaagagaggaaggagctcctgctctcttaaagggtattgggccaagagtgttgtggataggtattggaggatcaatcttctttggtgtcctcgagagcactaagagaacacttgcacagagacgtcccaatacggttaaagaaaccaaagaagaataagtttctggccgcacaagaaaatgagtgtaaggtgacaatgtaacccctttgtgagttctatgtggtgtgagtttgtttaagtaccaattcaactttcattaaaaaaaaataaaaaaattagtgttcattttagattatataatttcttgattatttatatctg

SEQ ID NO: 103815 - protein, 361 aa, Arabidopsis thaliana; identical to SEQ ID NO: 22114
  peptide (1)..(361): Ceres Seq. ID no. 13613616
  misc_feature (37)..(361): Homolog of NCBI NO: 18420458 NR Description: mitochondrial carrier protein family [Arabidopsis >gi|15028275|gb|AAK76726.1| putative mitochondrial carrier [Arabidopsis thaliana] >gi|19310699|gb|AAL85080.1| putative
  misc_feature (37)..(320): Homolog of NCBI NO: 7486053 NR Description: hypothetical protein F23K16.90 - Arabidopsis
  misc_feature (80)..(356): Homolog of NCBI NO: 34394981 NR Description: mitochondrial aspartate-glutamate carrier
  misc_feature (43)..(350): Homolog of NCBI NO: 18399114 NR Description: mitochondrial carrier protein family [Arabidopsis
  misc_feature (95)..(349): Homolog of NCBI NO: 27754081 NR Description: RIKEN cDNA 4930433D19 [Mus musculus]
  misc_feature (91)..(347): Homolog of NCBI NO: 31208625 NR Description: ENSANGP00000011068 [Anopheles gambiae]
  misc_feature (75)..(347): Homolog of NCBI NO: 24650120 NR Description: CG4743-PA [Drosophila melanogaster]
  misc_feature (89)..(342): Homolog of NCBI NO: 3171731 NR Description: AgPET8 [Eremothecium gossypii]
  misc_feature (89)..(338): Homolog of NCBI NO: 19115553 NR Description: agpet8 protein. [Schizosaccharomyces pombe]
  misc_feature (89)..(352): Homolog of NCBI NO: 6324325 NR Description: Member of family of mitochondrial carrier Pet8p [Saccharomyces cerevisiae] >gi|730302|sp|P38921|PET8_YEAST

SEQ ID NO: 103816 - protein, 325 aa, Arabidopsis thaliana; identical to SEQ ID NO: 22115
  peptide (1)..(325): Ceres Seq. ID no. 13613617
  misc_feature (1)..(325): Homolog of NCBI NO: 18420458 NR Description: mitochondrial carrier protein family [Arabidopsis >gi|15028275|gb|AAK76726.1| putative mitochondrial carrier [Arabidopsis thaliana] >gi|19310699|gb|AAL85080.1| putative
  misc_feature (1)..(284): Homolog of NCBI NO: 7486053 NR Description: hypothetical protein F23K16.90 - Arabidopsis
  misc_feature (44)..(320): Homolog of NCBI NO: 34394981 NR Description: mitochondrial aspartate-glutamate carrier
  misc_feature (7)..(314): Homolog of NCBI NO: 18399114 NR Description: mitochondrial carrier protein family [Arabidopsis
  misc_feature (59)..(313): Homolog of NCBI NO: 27754081 NR Description: RIKEN cDNA 4930433D19 [Mus musculus]
  misc_feature (55)..(311): Homolog of NCBI NO: 31208625 NR Description: ENSANGP00000011068 [Anopheles gambiae]
  misc_feature (39)..(311): Homolog of NCBI NO: 24650120 NR Description: CG4743-PA [Drosophila melanogaster]
  misc_feature (53)..(306): Homolog of NCBI NO: 3171731 NR Description: AgPET8 [Eremothecium gossypii]
  misc_feature (53)..(302): Homolog of NCBI NO: 19115553 NR Description: agpet8 protein. [Schizosaccharomyces pombe]
  misc_feature (53)..(316): Homolog of NCBI NO: 6324325 NR Description: Member of family of mitochondrial carrier Pet8p [Saccharomyces cerevisiae] >gi|730302|sp|P38921|PET8_YEAST

SEQ ID NO: 103817 - protein, 301 aa, Arabidopsis thaliana; identical to SEQ ID NO: 22116
  peptide (1)..(301): Ceres Seq. ID no. 13613618
  misc_feature (1)..(301): Homolog of NCBI NO: 18420458 NR Description: mitochondrial carrier protein family [Arabidopsis >gi|15028275|gb|AAK76726.1| putative mitochondrial carrier [Arabidopsis thaliana] >gi|19310699|gb|AAL85080.1| putative
  misc_feature (1)..(260): Homolog of NCBI NO: 7486053 NR Description: hypothetical protein F23K16.90 - Arabidopsis
  misc_feature (20)..(296): Homolog of NCBI NO: 34394981 NR Description: mitochondrial aspartate-glutamate carrier
  misc_feature (1)..(290): Homolog of NCBI NO: 18399114 NR Description: mitochondrial carrier protein family [Arabidopsis
  misc_feature (35)..(289): Homolog of NCBI NO: 27754081 NR Description: RIKEN cDNA 4930433D19 [Mus musculus]
  misc_feature (31)..(287): Homolog of NCBI NO: 31208625 NR Description: ENSANGP00000011068 [Anopheles gambiae]
  misc_feature (15)..(287): Homolog of NCBI NO: 24650120 NR Description: CG4743-PA [Drosophila melanogaster]
  misc_feature (29)..(282): Homolog of NCBI NO: 3171731 NR Description: AgPET8 [Eremothecium gossypii]
  misc_feature (29)..(278): Homolog of NCBI NO: 19115553 NR Description: agpet8 protein. [Schizosaccharomyces pombe]
  misc_feature (29)..(292): Homolog of NCBI NO: 6324325 NR Description: Member of family of mitochondrial carrier Pet8p [Saccharomyces cerevisiae] >gi|730302|sp|P38921|PET8_YEAST

SEQ ID NO: 103818 - DNA, 1366 bp, Arabidopsis thaliana
  misc_feature (1)..(1366): Ceres Seq. ID no. 13613635
  misc_feature: MA Experiment ID: 108577 Result: Down-regulated in Transcription
  misc_feature: MA Experiment 108577 PARAMETER Experiment Name: At_42deg_Heat_cDNA_P Parameter: Temperature (deg C) Value: 42 vs. 22
  misc_feature: MA Experiment 108577 PARAMETER Experiment Name: At_42deg_Heat_cDNA_P Parameter: Timepoint (hr) Value: 6
  misc_feature: MA Experiment 108577 PARAMETER Experiment Name: At_42deg_Heat_cDNA_P Parameter: Tissue Value: Aerial
  misc_feature: MA Experiment ID: 20001807 Result: Up-regulated in Transcription
  misc_feature: MA Experiment 20001807 PARAMETER Experiment Name: At_50mM_NH4NO3_L-to-H_Sub_P Parameter: Timepoint (hr) Value: 6
  misc_feature: MA Experiment 20001807 PARAMETER Experiment Name: At_50mM_NH4NO3_L-to-H_Sub_P Parameter: Tissue Value: Leaf
  misc_feature: MA Experiment 20001807 PARAMETER Experiment Name: At_50mM_NH4NO3_L-to-H_Sub_P Parameter: Treatment Value: 50mM NH4NO3 vs 100mM Mannitol
atattgaaaagaaccattgctctctagattaaaagcttctctctctctctctctctctcttttggactttctcaatccatatccctctctctgttttttctaatttgagcctctaaagtctcctcgttttgttcatgttgttgttcaagtgaagaagctcaattatgtttacaacattgttgtaatttcaaaacttcataagaatttctctgataataaagaaaaagctggagtagaactattttaaagtgtcatcatgaagagactaagcagctcagattcaatgtgtggtctaatctccacttctacagatgaacagagtccaagagggtacggaagtaattaccaatctatgcttgaaggttacgatgaagatgctacactaatcgaggaatattccggcaaccaccaccacatgggtctatcggagaagaagagaagattaaaagttgaccaagtcaaagctcttgagaagaatttcgaacttgagaataaactcgaacctgagaggaaaactaaattagcacaagagcttggacttcaacctcgtcaagtagctgtttggtttcagaaccgtcgtgcacggtggaaaacaaaacagcttgaaaaagattacggtgttcttaagggtcaatacgattctctccgccacaatttcgattctctccgccgtgacaatgattcccttctccaagagattagtaaaatcaaagctaaggtaaacggtgaagaagataacaacaacaacaaagctattacggagggtgttaaggaagaggaagttcacaagacggattcgattccttcgtctcctctgcagtttctagaacattcctctggttttaactaccggcgaagcttcactgacctccgtgaccttctaccgaattccaccgttgtcgaggctggatcttccgatagttgcgattcaagcgccgttcttaacgacgaaacaagttctgataacggaagattgacgccgcctgtgacggttactggcgggagtttcttacagtttgtgaaaacagagcaaacagaggatcacgaggattttctaagcggtgaagaagcttgtggtttcttctccgatgaacagccgccgtcacttcattggtactctgcttcagatcattggacttgagaattgtttatcaaattggtgctctgtttagtctcaatgggaaaacagagaagagggcaaaggtggaataattgataaataaggattaaggatgaaggggattattaaattaaatccgcgggagaagttaattttgggtttaagattgtaatggctcttcatgtaattaacgatgtcgagaggggctttcacagaaataggaatcaatggggacactctgatatg

SEQ ID NO: 103819 - protein, 294 aa, Arabidopsis thaliana; identical to SEQ ID NO: 38954
  peptide (1)..(294): Ceres Seq. ID no. 13613636
  misc_feature (59)..(113): Pfam Name: Homeobox domain Pfam Description: Homeobox domain
  misc_feature (1)..(294): Homolog of NCBI NO: 15236109 NR Description: homeodomain-leucine zipper protein ATHB-16 (HD-Zip
  misc_feature (1)..(294): Homolog of NCBI NO: 15450982 NR Description: homeodomain-like protein [Arabidopsis thaliana]
  misc_feature (1)..(294): Homolog of NCBI NO: 7446295 NR Description: homeotic protein T5J17.230 - Arabidopsis thaliana
  misc_feature (1)..(293): Homolog of NCBI NO: 18399966 NR Description: homeobox-leucine zipper protein ATHB-6 (HD-Zip
  misc_feature (1)..(293): Homolog of NCBI NO: 25386231 NR Description: homeodomain transcription factor (ATHB-6)
  misc_feature (1)..(293): Homolog of NCBI NO: 8133126 NR Description: hb-6-like protein [Brassica rapa subsp.
  misc_feature (1)..(273): Homolog of NCBI NO: 5305602 NR Description: homeobox protein ATHB6 [Arabidopsis thaliana]
  misc_feature (1)..(293): Homolog of NCBI NO: 15238405 NR Description: homeobox-leucine zipper protein ATHB-5 (HD-Zip
  misc_feature (52)..(294): Homolog of NCBI NO: 15148916 NR Description: homeodomain leucine zipper protein HDZ1
  misc_feature (1)..(191): Homolog of NCBI NO: 11231065 NR Description: homeobox-leucine zipper protein [Zinnia elegans]

SEQ ID NO: 103820 - protein, 285 aa, Arabidopsis thaliana; identical to SEQ ID NO: 38955
  peptide (1)..(285): Ceres Seq. ID no. 13613637
  misc_feature (50)..(104): Pfam Name: Homeobox domain Pfam Description: Homeobox domain
  misc_feature (1)..(285): Homolog of NCBI NO: 15236109 NR Description: homeodomain-leucine zipper protein ATHB-16 (HD-Zip
  misc_feature (1)..(285): Homolog of NCBI NO: 15450982 NR Description: homeodomain-like protein [Arabidopsis thaliana]
  misc_feature (1)..(285): Homolog of NCBI NO: 7446295 NR Description: homeotic protein T5J17.230 - Arabidopsis thaliana
  misc_feature (1)..(284): Homolog of NCBI NO: 18399966 NR Description: homeobox-leucine zipper protein ATHB-6 (HD-Zip
  misc_feature (1)..(284): Homolog of NCBI NO: 25386231 NR Description: homeodomain transcription factor (ATHB-6)
  misc_feature (1)..(284): Homolog of NCBI NO: 8133126 NR Description: hb-6-like protein [Brassica rapa subsp.
  misc_feature (1)..(264): Homolog of NCBI NO: 5305602 NR Description: homeobox protein ATHB6 [Arabidopsis thaliana]
  misc_feature (1)..(284): Homolog of NCBI NO: 15238405 NR Description: homeobox-leucine zipper protein ATHB-5 (HD-Zip
  misc_feature (43)..(285): Homolog of NCBI NO: 15148916 NR Description: homeodomain leucine zipper protein HDZ1
  misc_feature (1)..(182): Homolog of NCBI NO: 11231065 NR Description: homeobox-leucine zipper protein [Zinnia elegans]

SEQ ID NO: 103821 - protein, 262 aa, Arabidopsis thaliana; identical to SEQ ID NO: 38956
  peptide (1)..(262): Ceres Seq. ID no. 13613638
  misc_feature (27)..(81): Pfam Name: Homeobox domain Pfam Description: Homeobox domain
  misc_feature (1)..(262): Homolog of NCBI NO: 15236109 NR Description: homeodomain-leucine zipper protein ATHB-16 (HD-Zip
  misc_feature (1)..(262): Homolog of NCBI NO: 15450982 NR Description: homeodomain-like protein [Arabidopsis thaliana]
  misc_feature (1)..(262): Homolog of NCBI NO: 7446295 NR Description: homeotic protein T5J17.230 - Arabidopsis thaliana
  misc_feature (1)..(261): Homolog of NCBI NO: 18399966 NR Description: homeobox-leucine zipper protein ATHB-6 (HD-Zip
  misc_feature (1)..(261): Homolog of NCBI NO: 25386231 NR Description: homeodomain transcription factor (ATHB-6)
  misc_feature (1)..(261): Homolog of NCBI NO: 8133126 NR Description: hb-6-like protein [Brassica rapa subsp.
  misc_feature (1)..(241): Homolog of NCBI NO: 5305602 NR Description: homeobox protein ATHB6 [Arabidopsis thaliana]
  misc_feature (1)..(261): Homolog of NCBI NO: 15238405 NR Description: homeobox-leucine zipper protein ATHB-5 (HD-Zip
  misc_feature (20)..(262): Homolog of NCBI NO: 15148916 NR Description: homeodomain leucine zipper protein HDZ1
  misc_feature (1)..(159): Homolog of NCBI NO: 11231065 NR Description: homeobox-leucine zipper protein [Zinnia elegans]

SEQ ID NO: 103822 - DNA, 1289 bp, Arabidopsis thaliana
  misc_feature (1)..(1289): Ceres Seq. ID no. 13613656
  misc_feature: MA Experiment ID: 108585 Result: Up-regulated in Transcription
  misc_feature: MA Experiment 108585 PARAMETER Experiment Name: At_5mM_NaNP_cDNA_P Parameter: Timepoint (hr) Value: 6
  misc_feature: MA Experiment 108585 PARAMETER Experiment Name: At_5mM_NaNP_cDNA_P Parameter: Tissue Value: Aerial
  misc_feature: MA Experiment 108585 PARAMETER Experiment Name: At_5mM_NaNP_cDNA_P Parameter: Treatment Value: null
  misc_feature: MA Experiment ID: 20000180 Result: Down-regulated in Transcription
  misc_feature: MA Experiment 20000180 PARAMETER Experiment Name: At_Germinating_Seeds_P Parameter: Age (hr) Value: 24 vs. 0
  misc_feature: MA Experiment 20000180 PARAMETER Experiment Name: At_Germinating_Seeds_P Parameter: Tissue Value: Germinating Seeds
  misc_feature: MA Experiment ID: 20000184 Result: Down-regulated in Transcription
  misc_feature: MA Experiment 20000184 PARAMETER Experiment Name: At_Shoots__P Parameter: Age (day) Value: 7
  misc_feature: MA Experiment 20000184 PARAMETER Experiment Name: At_Shoots__P Parameter: Tissue Value: Shoots vs. Whole Plant
  misc_feature: MA Experiment ID: 20000227 Result: Down-regulated in Transcription
  misc_feature: MA Experiment 20000227 PARAMETER Experiment Name: At_Root-Tips-vs-Tops_P Parameter: Tissue Value: Root Tips vs. Root Tops
  misc_feature: MA Experiment ID: 20001557 Result: Down-regulated in Transcription
  misc_feature: MA Experiment 20001557 PARAMETER Experiment Name: At_Drought_Soil_Dry_P Parameter: Age (day) Value: 27
  misc_feature: MA Experiment 20001557 PARAMETER Experiment Name: At_Drought_Soil_Dry_P Parameter: Organism Value: A. thaliana
  misc_feature: MA Experiment 20001557 PARAMETER Experiment Name: At_Drought_Soil_Dry_P Parameter: Plant Line Value: WS
  misc_feature: MA Experiment 20001557 PARAMETER Experiment Name: At_Drought_Soil_Dry_P Parameter: Post Timepoint (hr) Value: 3
  misc_feature: MA Experiment 20001557 PARAMETER Experiment Name: At_Drought_Soil_Dry_P Parameter: Post-Treatment Value: Re-Water vs. No Drought
  misc_feature: MA Experiment 20001557 PARAMETER Experiment Name: At_Drought_Soil_Dry_P Parameter: Timepoint (day) Value: 13
  misc_feature: MA Experiment 20001557 PARAMETER Experiment Name: At_Drought_Soil_Dry_P Parameter: Treatment Value: Drought vs. No Drought
acagagatttgtgtagaactctctctctctctataacaaaattggacagaattgggcaatcgagagagaaagatgcaagccatctccaaagtttcttctgcagcatcattctttagatgttctaggaagctagttagtcagccatgtgtgaggccttgcgtgagacagcttcacgtcagaaagggtcttgtctctggtgtcatgaagctgttctcttcacctcttaggactttgcgtgatgctggtaaatccgttcgcatttcaagattctgcagtgtctccaatgtctcttcctcattgcaaattgaactggtgccatgtcttacggacaactatgcttatatcttacatgatgaggataccggtacagttggtgtggttgacccttctgaagctgtacctgttatggatgccctccagaagaatagtcgaaatctaacttatatattaaatacacatcaccattatgatcacactggtggcaatttggaattaaaagacaggtatggtgcaaaggtgatcggctcagctgcagatagggaccggattcctggaattgatgtagccttgaaagatgctgacaaatggatgtttgctggccatgaagtccatattatggaaactcctggccacaccagaggccatattagtttctactttccaggggcacgagcaattttcaccggggacaccttgtttagcttatcatgtggtaaactcttcgaaggtactccagagcagatgctagcttctctacagaggataattgcgttgccagatgacacaagcgtatactgtggccatgaatatacactgagtaattccaagtttgcattgtctatagaaccaacaaacgaagtgctccagtcttatgcagcctacgttgcagaactccgtgacaagaaattaccaacgattccaacgacgatgaagatggagaaagcttgtaacccgtttctccgcactgagaacacagatatccgtcgagctttaggtattccagagacagcagatgaagcagaagctctgggtattataagaagagcaaaggacaatttcaaagcttagctaaaatataataagaatggttcctctgtacagtgatgatgcgatcctggtttaatctgtaataaggtgttttgagttttgaccgtgacgttacgtctcctagtagttttcatggtcatactcgaaatgattttttttttccttttgatcaaacggtcctaagtacccaagtttctactttgatgaaccctcgaattttgttattatttgtttttggatct

SEQ ID NO: 103823 - protein, 331 aa, Arabidopsis thaliana
  peptide (1)..(331): Ceres Seq. ID no. 13613657
  misc_feature (86)..(244): Pfam Name: Metallo-beta-lactamase superfamily Pfam Description: Metallo-beta-lactamase superfamily
  misc_feature (1)..(331): Homolog of NCBI NO: 18390616 NR Description: glyoxalase II, putative (hydroxyacylglutathione [Arabidopsis thaliana] >gi|21553879|gb|AAM62972.1| glyoxalase II
  misc_feature (1)..(331): Homolog of NCBI NO: 30679573 NR Description: glyoxalase II, putative (hydroxyacylglutathione [Arabidopsis thaliana] >gi|20466237|gb|AAM20436.1| glyoxalase II putative [Arabidopsis thaliana] >gi|22136310|gb|AAM91233.1|
  misc_feature (19)..(331): Homolog of NCBI NO: 25406895 NR Description: hypothetical protein [imported] - Arabidopsis >gi|8810475|gb|AAF80136.1|AC024174_18 Contains similarity to II isozyme from Arabidopsis thaliana gb|U90927 and is a
  misc_feature (1)..(329): Homolog of NCBI NO: 15224661 NR Description: glyoxalase II, putative (hydroxyacylglutathione [Arabidopsis thaliana] >gi|25408148|pir||F84719 probable
  misc_feature (1)..(329): Homolog of NCBI NO: 30684920 NR Description: glyoxalase II, putative (hydroxyacylglutathione
  misc_feature (1)..(329): Homolog of NCBI NO: 18406237 NR Description: glyoxalase II (hydroxyacylglutathione [Arabidopsis thaliana] >gi|21264419|sp|O24495|GL2M_ARATH hydrolase, mitochondrial precursor (Glyoxalase II) (Glx II)
  misc_feature (1)..(329): Homolog of NCBI NO: 2570340 NR Description: glyoxalase II mitochondrial isozyme [Arabidopsis
  misc_feature (1)..(329): Homolog of NCBI NO: 16209608 NR Description: glyoxalase II [Oryza sativa]
  misc_feature (1)..(329): Homolog of NCBI NO: 21070362 NR Description: glyoxalase II [Pennisetum glaucum]
  misc_feature (4)..(329): Homolog of NCBI NO: 28143946 NR Description: glyoxalase II [Brassica juncea]
MQAISKVSSAASFFRCSRKLVSQPCVRPCVRQLHVRKGLVSGVMKLFSSPLRTLRDAGKSVRISRFCSVSNVSSSLQIELVPCLTDNYAYILHDEDTGTVGVVDPSEAVPVMDALQKNSRNLTYILNTHHHYDHTGGNLELKDRYGAKVIGSAADRDRIPGIDVALKDADKWMFAGHEVHIMETPGHTRGHISFYFPGARAIFTGDTLFSLSCGKLFEGTPEQMLASLQRIIALPDDTSVYCGHEYTLSNSKFALSIEPTNEVLQSYAAYVAELRDKKLPTIPTTMKMEKACNPFLRTENTDIRRALGIPETADEAEALGIIRRAKDNFKA

SEQ ID NO: 103824 - protein, 288 aa, Arabidopsis thaliana; identical to SEQ ID NO: 30417
  peptide (1)..(288): Ceres Seq. ID no. 13613658
  misc_feature (43)..(201): Pfam Name: Metallo-beta-lactamase superfamily Pfam Description: Metallo-beta-lactamase superfamily
  misc_feature (1)..(288): Homolog of NCBI NO: 18390616 NR Description: glyoxalase II, putative (hydroxyacylglutathione [Arabidopsis thaliana] >gi|21553879|gb|AAM62972.1| glyoxalase II
  misc_feature (1)..(288): Homolog of NCBI NO: 30679573 NR Description: glyoxalase II, putative (hydroxyacylglutathione [Arabidopsis thaliana] >gi|20466237|gb|AAM20436.1| glyoxalase II putative [Arabidopsis thaliana] >gi|22136310|gb|AAM91233.1|
  misc_feature (1)..(288): Homolog of NCBI NO: 25406895 NR Description: hypothetical protein [imported] - Arabidopsis >gi|8810475|gb|AAF80136.1|AC024174_18 Contains similarity to II isozyme from Arabidopsis thaliana gb|U90927 and is a
  misc_feature (1)..(286): Homolog of NCBI NO: 15224661 NR Description: glyoxalase II, putative (hydroxyacylglutathione [Arabidopsis thaliana] >gi|25408148|pir||F84719 probable
  misc_feature (1)..(286): Homolog of NCBI NO: 30684920 NR Description: glyoxalase II, putative (hydroxyacylglutathione
  misc_feature (1)..(286): Homolog of NCBI NO: 18406237 NR Description: glyoxalase II (hydroxyacylglutathione [Arabidopsis thaliana] >gi|21264419|sp|O24495|GL2M_ARATH hydrolase, mitochondrial precursor (Glyoxalase II) (Glx II)
  misc_feature (1)..(286): Homolog of NCBI NO: 2570340 NR Description: glyoxalase II mitochondrial isozyme [Arabidopsis
  misc_feature (1)..(286): Homolog of NCBI NO: 16209608 NR Description: glyoxalase II [Oryza sativa]
  misc_feature (1)..(286): Homolog of NCBI NO: 21070362 NR Description: glyoxalase II [Pennisetum glaucum]
  misc_feature (1)..(286): Homolog of NCBI NO: 28143946 NR Description: glyoxalase II [Brassica juncea]

SEQ ID NO: 103825 - protein, 220 aa, Arabidopsis thaliana; identical to SEQ ID NO: 30418
  peptide (1)..(220): Ceres Seq. ID no. 13613659
  misc_feature (1)..(133): Pfam Name: Metallo-beta-lactamase superfamily Pfam Description: Metallo-beta-lactamase superfamily
  misc_feature (1)..(220): Homolog of NCBI NO: 18390616 NR Description: glyoxalase II, putative (hydroxyacylglutathione [Arabidopsis thaliana] >gi|21553879|gb|AAM62972.1| glyoxalase II
  misc_feature (1)..(220): Homolog of NCBI NO: 30679573 NR Description: glyoxalase II, putative (hydroxyacylglutathione [Arabidopsis thaliana] >gi|20466237|gb|AAM20436.1| glyoxalase II putative [Arabidopsis thaliana] >gi|22136310|gb|AAM91233.1|
  misc_feature (1)..(220): Homolog of NCBI NO: 25406895 NR Description: hypothetical protein [imported] - Arabidopsis >gi|8810475|gb|AAF80136.1|AC024174_18 Contains similarity to II isozyme from Arabidopsis thaliana gb|U90927 and is a
  misc_feature (1)..(218): Homolog of NCBI NO: 15224661 NR Description: glyoxalase II, putative (hydroxyacylglutathione [Arabidopsis thaliana] >gi|25408148|pir||F84719 probable
  misc_feature (1)..(218): Homolog of NCBI NO: 30684920 NR Description: glyoxalase II, putative (hydroxyacylglutathione
  misc_feature (1)..(218): Homolog of NCBI NO: 18406237 NR Description: glyoxalase II (hydroxyacylglutathione [Arabidopsis thaliana] >gi|21264419|sp|O24495|GL2M_ARATH hydrolase, mitochondrial precursor (Glyoxalase II) (Glx II)
  misc_feature (1)..(218): Homolog of NCBI NO: 2570340 NR Description: glyoxalase II mitochondrial isozyme [Arabidopsis
  misc_feature (1)..(218): Homolog of NCBI NO: 16209608 NR Description: glyoxalase II [Oryza sativa]
  misc_feature (1)..(218): Homolog of NCBI NO: 21070362 NR Description: glyoxalase II [Pennisetum glaucum]
  misc_feature (1)..(218): Homolog of NCBI NO: 28143946 NR Description: glyoxalase II [Brassica juncea]

SEQ ID NO: 103826 - DNA, 1596 bp, Arabidopsis thaliana
  misc_feature (1)..(1596): Ceres Seq. ID no. 13613670
  misc_feature: MA Experiment ID: 108434 Result: Up-regulated in Transcription
  misc_feature: MA Experiment 108434 PARAMETER Experiment Name: At_Root_Tips_cDNA_P Parameter: Tissue Value: Root Tips
  misc_feature: MA Experiment ID: 108573 Result: Up-regulated in Transcription
  misc_feature: MA Experiment 108573 PARAMETER Experiment Name: At_Drought_cDNA_P Parameter: Timepoint (hr) Value: 6
  misc_feature: MA Experiment 108573 PARAMETER Experiment Name: At_Drought_cDNA_P Parameter: Tissue Value: Aerial
  misc_feature: MA Experiment 108573 PARAMETER Experiment Name: At_Drought_cDNA_P Parameter: Treatment Value: Drought vs. No Drought
  misc_feature: MA Experiment ID: 108595 Result: Down-regulated in Transcription
  misc_feature: MA Experiment 108595 PARAMETER Experiment Name: At_Ler-pi_Ovule_cDNA_P Parameter: Plant Line Value: null
  misc_feature: MA Experiment ID: 20000087 Result: Down-regulated in Transcription
  misc_feature: MA Experiment 20000087 PARAMETER Experiment Name: At_100uM_ABA_Mutants_cDNA_P Parameter: Plant Line Value: WS
  misc_feature: MA Experiment 20000087 PARAMETER Experiment Name: At_100uM_ABA_Mutants_cDNA_P Parameter: Timepoint (hr) Value: 6
  misc_feature: MA Experiment 20000087 PARAMETER Experiment Name: At_100uM_ABA_Mutants_cDNA_P Parameter: Tissue Value: Aerial
  misc_feature: MA Experiment 20000087 PARAMETER Experiment Name: At_100uM_ABA_Mutants_cDNA_P Parameter: Treatment Value: 100uM ABA vs. No Treatment
  misc_feature: MA Experiment ID: 20000117 Result: Down-regulated in Transcription
  misc_feature: MA Experiment 20000117 PARAMETER Experiment Name: At_100uM_ABA_Mutants_cDNA_P Parameter: Plant Line Value: Columbia
  misc_feature: MA Experiment 20000117 PARAMETER Experiment Name: At_100uM_ABA_Mutants_cDNA_P Parameter: Timepoint (hr) Value: 6
  misc_feature: MA Experiment 20000117 PARAMETER Experiment Name: At_100uM_ABA_Mutants_cDNA_P Parameter: Tissue Value: Aerial
  misc_feature: MA Experiment 20000117 PARAMETER Experiment Name: At_100uM_ABA_Mutants_cDNA_P Parameter: Treatment Value: 100uM ABA vs. No Treatment
  misc_feature: MA Experiment ID: 20000495 Result: Up-regulated in Transcription
  misc_feature: MA Experiment 20000495 PARAMETER Experiment Name: At_Guard_Cells_P Parameter: Harvest Date Value: 8/2/2002
  misc_feature: MA Experiment 20000495 PARAMETER Experiment Name: At_Guard_Cells_P Parameter: Organism Value: A. thaliana
  misc_feature: MA Experiment 20000495 PARAMETER Experiment Name: At_Guard_Cells_P Parameter: Tissue Value: Guard Cells vs. Leaves
  misc_feature: MA Experiment ID: 20001248 Result: Up-regulated in Transcription
  misc_feature: MA Experiment 20001248 PARAMETER Experiment Name: At_Far-red-induction_P Parameter: Age (day) Value: 7
  misc_feature: MA Experiment 20001248 PARAMETER Experiment Name: At_Far-red-induction_P Parameter: Light Value: Far-red vs. White
  misc_feature: MA Experiment 20001248 PARAMETER Experiment Name: At_Far-red-induction_P Parameter: Organism Value: A. thaliana
  misc_feature: MA Experiment 20001248 PARAMETER Experiment Name: At_Far-red-induction_P Parameter: Plant Line Value: Columbia
  misc_feature: MA Experiment 20001248 PARAMETER Experiment Name: At_Far-red-induction_P Parameter: Timepoint (hr) Value: 4
  misc_feature: MA Experiment 20001248 PARAMETER Experiment Name: At_Far-red-induction_P Parameter: Tissue Value: Whole Plant
  misc_feature: MA Experiment ID: 20001451 Result: Up-regulated in Transcription
  misc_feature: MA Experiment 20001451 PARAMETER Experiment Name: At_Far-red-induction_P Parameter: Age (day) Value: 7
  misc_feature: MA Experiment 20001451 PARAMETER Experiment Name: At_Far-red-induction_P Parameter: Light Value: Far-red vs. White
  misc_feature: MA Experiment 20001451 PARAMETER Experiment Name: At_Far-red-induction_P Parameter: Organism Value: A. thaliana
  misc_feature: MA Experiment 20001451 PARAMETER Experiment Name: At_Far-red-induction_P Parameter: Plant Line Value: Columbia
  misc_feature: MA Experiment 20001451 PARAMETER Experiment Name: At_Far-red-induction_P Parameter: Timepoint (hr) Value: 24
  misc_feature: MA Experiment 20001451 PARAMETER Experiment Name: At_Far-red-induction_P Parameter: Tissue Value: Whole Plant
aagcaaagagagaggaaaaattagactttactcattgttcagtggttgagagagaaaagagtaaaaaagcacatggcctcattaccattggggcctcagcctcatgctcttgctccgccgctgcagcttcacgacggcgacgctttgaaacgccgtcctgaattggattctgataaggaaatgtctgcagctgttattgagggaaatgacgctgttactggtcatatcatttccactactattggaggcaaaaacggcgaaccaaagcagaccattagttacatggctgagcgggttgttggaacaggttcattcgggattgtttttcaggcgaaatgcttggaaactggagaatcagtagccattaaaaaggtcttgcaagatcgacgctataaaaaccgtgagttgcaactaatgcgaccaatggatcacccaaatgtcatctccttgaagcactgtttcttctctacaacgagtagagatgagctcttcctcaaccttgttatggagtatgtacctgagactttataccgggttttgaggcactatactagttctaatcagaggatgccaattttctatgtcaagctttacacatatcaaatctttagaggtttggcttacatccatactgttcccggtgtttgccacagagatgtgaaaccacaaaatctcttggttgatcccttgacccatcaggttaagctgtgtgattttggaagtgcaaaagtattggtcaaaggtgaaccaaacatatcatatatctgctcccgttattatcgtgctccagaactgatctttggcgccacagagtatacagcatccatagatatatggtctgctggttgtgtactggcagagcttcttctgggccagccgttatttccaggagaaaattcagttgatcagcttgtggagatcataaaggttcttggtactccaactcgtgaagaaattcgatgtatgaacccgaactacacagattttaggttcccacaaatcaaagctcacccttggcacaaggtttttcataaacggatgcctccagaagcaatagaccttgcatctcggcttcttcaatattcaccaagtctacgctgcactgcgctcgaagcatgtgctcatccgtttttcaatgaactccgagagccaaacgcccgtcttccaaatggtcgtccattaccgccattgttcaatttcaaacaagagttaggtggagcttcaatggagctaatcaacaggctaatacctgagcatgtgagacgacaaatgagcacaggattacaaaacagttaaaaactgtgcatgtctgaagagaaagaggagaaaagcaggtttactacttttatttgatagttgacaggttcaacagtatattaaccacgactattatcagcttctatacccgtagtaaagtcatattcagctttttgagaaatcagatgctgataattgcgttttttttttttttattccgtagcctggagagtggagagagacactgttcctcgtgtatttttgtatatgtttttgtctgtaaaacaattctgacagatacgtagagacaaaagaaaaacgaggtgataatattaaacc

SEQ ID NO: 103827 - protein, 407 aa, Arabidopsis thaliana; identical to SEQ ID NO: 30700
  peptide (1)..(407): Ceres Seq. ID no. 13613671
  misc_feature (70)..(354): Pfam Name: Protein kinase domain Pfam Description: Protein kinase domain
  misc_feature (1)..(407): Homolog of NCBI NO: 15221476 NR Description: shaggy-related kinase [Arabidopsis thaliana]
  misc_feature (1)..(403): Homolog of NCBI NO: 12643750 NR Description: Shaggy-related protein kinase delta (ASK-delta)
  misc_feature (1)..(403): Homolog of NCBI NO: 15224593 NR Description: shaggy-related protein kinase dzeta [Arabidopsis
  misc_feature (1)..(403): Homolog of NCBI NO: 21593135 NR Description: putative shaggy-like protein kinase dzeta
  misc_feature (34)..(406): Homolog of NCBI NO: 12643751 NR Description: Shaggy-related protein kinase eta (ASK-eta)
  misc_feature (34)..(406): Homolog of NCBI NO: 15233984 NR Description: shaggy-related protein kinase etha (EC 2.7.1.-)
  misc_feature (34)..(406): Homolog of NCBI NO: 18700188 NR Description: AT4g18710/F28A21_120 [Arabidopsis thaliana]
  misc_feature (1)..(398): Homolog of NCBI NO: 7434281 NR Description: probable shaggy-like protein kinase etha (EC
  misc_feature (30)..(401): Homolog of NCBI NO: 22326813 NR Description: serine/threonine protein kinase, Msk family thaliana] >gi|18086450|gb|AAL57679.1| AT5g14640/T15N1_130
  misc_feature (16)..(398): Homolog of NCBI NO: 7434282 NR Description: shaggy protein kinase (EC 2.7.1.-) 6 - common

SEQ ID NO: 103828 - protein, 371 aa, Arabidopsis thaliana; identical to SEQ ID NO: 30701
  peptide (1)..(371): Ceres Seq. ID no. 13613672
  misc_feature (34)..(318): Pfam Name: Protein kinase domain Pfam Description: Protein kinase domain
  misc_feature (1)..(371): Homolog of NCBI NO: 15221476 NR Description: shaggy-related kinase [Arabidopsis thaliana]
  misc_feature (1)..(367): Homolog of NCBI NO: 12643750 NR Description: Shaggy-related protein kinase delta (ASK-delta)
  misc_feature (1)..(367): Homolog of NCBI NO: 15224593 NR Description: shaggy-related protein kinase dzeta [Arabidopsis
  misc_feature (1)..(367): Homolog of NCBI NO: 21593135 NR Description: putative shaggy-like protein kinase dzeta
  misc_feature (1)..(370): Homolog of NCBI NO: 12643751 NR Description: Shaggy-related protein kinase eta (ASK-eta)
  misc_feature (1)..(370): Homolog of NCBI NO: 15233984 NR Description: shaggy-related protein kinase etha (EC 2.7.1.-)
  misc_feature (1)..(370): Homolog of NCBI NO: 18700188 NR Description: AT4g18710/F28A21_120 [Arabidopsis thaliana]
  misc_feature (1)..(362): Homolog of NCBI NO: 7434281 NR Description: probable shaggy-like protein kinase etha (EC
  misc_feature (1)..(365): Homolog of NCBI NO: 22326813 NR Description: serine/threonine protein kinase, Msk family thaliana] >gi|18086450|gb|AAL57679.1| AT5g14640/T15N1_130
  misc_feature (1)..(362): Homolog of NCBI NO: 7434282 NR Description: shaggy protein kinase (EC 2.7.1.-) 6 - common

SEQ ID NO: 103829 - protein, 337 aa, Arabidopsis thaliana; identical to SEQ ID NO: 30702
  peptide (1)..(337): Ceres Seq. ID no. 13613673
  misc_feature (1)..(284): Pfam Name: Protein kinase domain Pfam Description: Protein kinase domain
  misc_feature (1)..(337): Homolog of NCBI NO: 15221476 NR Description: shaggy-related kinase [Arabidopsis thaliana]
  misc_feature (1)..(333): Homolog of NCBI NO: 12643750 NR Description: Shaggy-related protein kinase delta (ASK-delta)
  misc_feature (1)..(333): Homolog of NCBI NO: 15224593 NR Description: shaggy-related protein kinase dzeta [Arabidopsis
  misc_feature (1)..(333): Homolog of NCBI NO: 21593135 NR Description: putative shaggy-like protein kinase dzeta
  misc_feature (1)..(336): Homolog of NCBI NO: 12643751 NR Description: Shaggy-related protein kinase eta (ASK-eta)
  misc_feature (1)..(336): Homolog of NCBI NO: 15233984 NR Description: shaggy-related protein kinase etha (EC 2.7.1.-)
  misc_feature (1)..(336): Homolog of NCBI NO: 18700188 NR Description: AT4g18710/F28A21_120 [Arabidopsis thaliana]
  misc_feature (1)..(328): Homolog of NCBI NO: 7434281 NR Description: probable shaggy-like protein kinase etha (EC
  misc_feature (1)..(331): Homolog of NCBI NO: 22326813 NR Description: serine/threonine protein kinase, Msk family thaliana] >gi|18086450|gb|AAL57679.1| AT5g14640/T15N1_130
  misc_feature (1)..(328): Homolog of NCBI NO: 7434282 NR Description: shaggy protein kinase (EC 2.7.1.-) 6 - common

SEQ ID NO: 103830 - DNA, 785 bp, Arabidopsis thaliana
  misc_feature (1)..(785): Ceres Seq. ID no. 13613674
  misc_feature: MA Experiment ID: 108434 Result: Up-regulated in Transcription
  misc_feature: MA Experiment 108434 PARAMETER Experiment Name: At_Root_Tips_cDNA_P Parameter: Tissue Value: Root Tips
  misc_feature: MA Experiment ID: 108461 Result: Up-regulated in Transcription
  misc_feature: MA Experiment 108461 PARAMETER Experiment Name: At_Germinating_Seeds_cDNA_P Parameter: Age (day) Value: 1 vs. 0
  misc_feature: MA Experiment 108461 PARAMETER Experiment Name: At_Germinating_Seeds_cDNA_P Parameter: Tissue Value: Germinating Seeds
  misc_feature: MA Experiment ID: 108573 Result: Down-regulated in Transcription
  misc_feature: MA Experiment 108573 PARAMETER Experiment Name: At_Drought_cDNA_P Parameter: Timepoint (hr) Value: 6
  misc_feature: MA Experiment 108573 PARAMETER Experiment Name: At_Drought_cDNA_P Parameter: Tissue Value: Aerial
  misc_feature: MA Experiment 108573 PARAMETER Experiment Name: At_Drought_cDNA_P Parameter: Treatment Value: Drought vs. No Drought
  misc_feature: MA Experiment ID: 108585 Result: Down-regulated in Transcription
  misc_feature: MA Experiment 108585 PARAMETER Experiment Name: At_5mM_NaNP_cDNA_P Parameter: Timepoint (hr) Value: 6
  misc_feature: MA Experiment 108585 PARAMETER Experiment Name: At_5mM_NaNP_cDNA_P Parameter: Tissue Value: Aerial
  misc_feature: MA Experiment 108585 PARAMETER Experiment Name: At_5mM_NaNP_cDNA_P Parameter: Treatment Value: null
  misc_feature: MA Experiment ID: 20000179 Result: Up-regulated in Transcription
  misc_feature: MA Experiment 20000179 PARAMETER Experiment Name: At_Germinating_Seeds_P Parameter: Age (hr) Value: 6 vs. 0
  misc_feature: MA Experiment 20000179 PARAMETER Experiment Name: At_Germinating_Seeds_P Parameter: Tissue Value: Germinating Seeds
  misc_feature: MA Experiment ID: 20000180 Result: Up-regulated in Transcription
  misc_feature: MA Experiment 20000180 PARAMETER Experiment Name: At_Germinating_Seeds_P Parameter: Age (hr) Value: 24 vs. 0
  misc_feature: MA Experiment 20000180 PARAMETER Experiment Name: At_Germinating_Seeds_P Parameter: Tissue Value: Germinating Seeds
  misc_feature: MA Experiment ID: 20000224 Result: Up-regulated in Transcription
  misc_feature: MA Experiment ID: 20000227 Result: Up-regulated in Transcription
  misc_feature: MA Experiment 20000227 PARAMETER Experiment Name: At_Root-Tips-vs-Tops_P Parameter: Tissue Value: Root Tips vs. Root Tops
  misc_feature: MA Experiment ID: 20000234 Result: Up-regulated in Transcription
  misc_feature: MA Experiment 20000234 PARAMETER Experiment Name: At_Siliques_P Parameter: Age (day) Value: 21
  misc_feature: MA Experiment 20000234 PARAMETER Experiment Name: At_Siliques_P Parameter: Organism Value: A. thaliana
  misc_feature: MA Experiment 20000234 PARAMETER Experiment Name: At_Siliques_P Parameter: Plant Line Value: WS
  misc_feature: MA Experiment 20000234 PARAMETER Experiment Name: At_Siliques_P Parameter: Tissue Value: Less Than 5mm Siliques vs. Whole Plant
  misc_feature: MA Experiment ID: 20000264 Result: Up-regulated in Transcription
  misc_feature: MA Experiment 20000264 PARAMETER Experiment Name: At_Open_Flower_P Parameter: Age (day) Value: 21
  misc_feature: MA Experiment 20000264 PARAMETER Experiment Name: At_Open_Flower_P Parameter: Plant Line Value: WS
  misc_feature: MA Experiment 20000264 PARAMETER Experiment Name: At_Open_Flower_P Parameter: Tissue Value: Open Flower vs. Whole Plant
  misc_feature: MA Experiment ID: 20000265 Result: Up-regulated in Transcription
  misc_feature: MA Experiment 20000265 PARAMETER Experiment Name: At_Open_Flower_P Parameter: Age (day) Value: 21
  misc_feature: MA Experiment 20000265 PARAMETER Experiment Name: At_Open_Flower_P Parameter: Plant Line Value: WS
  misc_feature: MA Experiment 20000265 PARAMETER Experiment Name: At_Open_Flower_P Parameter: Tissue Value: Closed Flower vs. Whole Plant
  misc_feature: MA Experiment ID: 20000286 Result: Up-regulated in Transcription
  misc_feature: MA Experiment 20000286 PARAMETER Experiment Name: At_Open_Flower_P Parameter: Age (day) Value: 21
  misc_feature: MA Experiment 20000286 PARAMETER Experiment Name: At_Open_Flower_P Parameter: Plant Line Value: WS
  misc_feature: MA Experiment 20000286 PARAMETER Experiment Name: At_Open_Flower_P Parameter: Tissue Value: Half Open vs. Whole Plant
  misc_feature: MA Experiment ID: 20000495 Result: Up-regulated in Transcription
  misc_feature: MA Experiment 20000495 PARAMETER Experiment Name: At_Guard_Cells_P Parameter: Harvest Date Value: 8/2/2002
  misc_feature: MA Experiment 20000495 PARAMETER Experiment Name: At_Guard_Cells_P Parameter: Organism Value: A. thaliana
  misc_feature: MA Experiment 20000495 PARAMETER Experiment Name: At_Guard_Cells_P Parameter: Tissue Value: Guard Cells vs. Leaves
acatttttcaaaaatctcttttgcccagagagagaagaagagacagatcggaaggagttgagtaagaatggcgaagctggtgctcttcaccgccgtaattatcgctattttctcccatggatcctccgtcgatgacaaatgcgccgcttgtaacgccgtcgctgaggaattagagttacagcttttaaaggaaaagccacgaaaccatcttgatatgagaaaccggctcaattctaaaggccagcgtgaaggaaaggtcattgattacagaataagcgacctgagggtggttgatttgttggacggtctgtgtgatagaatgcaggactatactctacaaaaggtggaacctaagaatagacaatgggtgaaagtaggaaattttgacaatctaacaaataaacaggaagcgaaagcgcatgcaaatgacatttcaacttattgtggaagattgctggaggaaactgaagatgagctaggtgaggtgataaagaatggctccctaaaagcaggagaagtccgaaaggttctgtgtcaaactttgagtaaccactgccgacaatcaagtgaaacagactcagaggatgaggaggacgacgatgcagatgaattataactcaatccagtgaaaagttcacgtcaaattaagatcccatcttggtagctatgttatagatacatccatccacaactcatatgtaacttaagacacctttcactttttaagttatgtcgaaactcgggtctagattcttatttatattgtggcaattgttcgttttccc

SEQ ID NO: 103831 - protein, 182 aa, Arabidopsis thaliana; identical to SEQ ID NO: 37793
  peptide (1)..(182): Ceres Seq. ID no. 13613675
  misc_feature (1)..(182): Homolog of NCBI NO: 18400653 NR Description: expressed protein [Arabidopsis thaliana]
  misc_feature (1)..(182): Homolog of NCBI NO: 21593763 NR Description: unknown [Arabidopsis thaliana]
  misc_feature (112)..(182): Homolog of NCBI NO: 25373216 NR Description: unknown protein [imported] - Arabidopsis thaliana
  misc_feature (1)..(64): Homolog of NCBI NO: 25373216 NR Description: unknown protein [imported] - Arabidopsis thaliana
  misc_feature (73)..(110): Homolog of NCBI NO: 25373216 NR Description: unknown protein [imported] - Arabidopsis thaliana

SEQ ID NO: 103832 - protein, 133 aa, Arabidopsis thaliana; identical to SEQ ID NO: 37794
  peptide (1)..(133): Ceres Seq. ID no. 13613676
  misc_feature (1)..(133): Homolog of NCBI NO: 18400653 NR Description: expressed protein [Arabidopsis thaliana]
  misc_feature (1)..(133): Homolog of NCBI NO: 21593763 NR Description: unknown [Arabidopsis thaliana]
  misc_feature (63)..(133): Homolog of NCBI NO: 25373216 NR Description: unknown protein [imported] - Arabidopsis thaliana
  misc_feature (1)..(15): Homolog of NCBI NO: 25373216 NR Description: unknown protein [imported] - Arabidopsis thaliana
  misc_feature (24)..(61): Homolog of NCBI NO: 25373216 NR Description: unknown protein [imported] - Arabidopsis thaliana

SEQ ID NO: 103833 - protein, 98 aa, Arabidopsis thaliana; identical to SEQ ID NO: 37795
  peptide (1)..(98): Ceres Seq. ID no. 13613677
  misc_feature (1)..(98): Homolog of NCBI NO: 18400653 NR Description: expressed protein [Arabidopsis thaliana]
  misc_feature (1)..(98): Homolog of NCBI NO: 21593763 NR Description: unknown [Arabidopsis thaliana]
  misc_feature (28)..(98): Homolog of NCBI NO: 25373216 NR Description: unknown protein [imported] - Arabidopsis thaliana
  misc_feature (1)..(26): Homolog of NCBI NO: 25373216 NR Description: unknown protein [imported] - Arabidopsis thaliana

SEQ ID NO: 103834 - DNA, 1090 bp, Arabidopsis thaliana
  misc_feature (1)..(1090): Ceres Seq. ID no. 13613678
  misc_feature: MA Experiment ID: 108434 Result: Down-regulated in Transcription
  misc_feature: MA Experiment 108434 PARAMETER Experiment Name: At_Root_Tips_cDNA_P Parameter: Tissue Value: Root Tips
  misc_feature: MA Experiment ID: 108435 Result: Down-regulated in Transcription
  misc_feature: MA Experiment 108435 PARAMETER Experiment Name: At_stm_Mutants_cDNA_P Parameter: Plant Line Value: wt Landsburg vs stm
  misc_feature: MA Experiment 108435 PARAMETER Experiment Name: At_stm_Mutants_cDNA_P Parameter: Tissue Value: Shoot Apical Meristem Region
  misc_feature: MA Experiment ID: 108462 Result: Up-regulated in Transcription
  misc_feature: MA Experiment 108462 PARAMETER Experiment Name: At_Germinating_Seeds_cDNA_P Parameter: Age (day) Value: 2 vs. 0
  misc_feature: MA Experiment 108462 PARAMETER Experiment Name: At_Germinating_Seeds_cDNA_P Parameter: Tissue Value: Germinating Seeds
  misc_feature: MA Experiment ID: 108463 Result: Up-regulated in Transcription
  misc_feature: MA Experiment 108463 PARAMETER Experiment Name: At_Germinating_Seeds_cDNA_P Parameter: Age (day) Value: 3 vs. 0
  misc_feature: MA Experiment 108463 PARAMETER Experiment Name: At_Germinating_Seeds_cDNA_P Parameter: Tissue Value: Germinating Seeds
  misc_feature: MA Experiment ID: 108501 Result: Down-regulated in Transcription
  misc_feature: MA Experiment 108501 PARAMETER Experiment Name: At_ap2_floral_buds_cDNA_P Parameter: Plant Line Value: ap2 (Ler.)
  misc_feature: MA Experiment 108501 PARAMETER Experiment Name: At_ap2_floral_buds_cDNA_P Parameter: Tissue Value: Closed Flower
  misc_feature: MA Experiment ID: 108561 Result: Up-regulated in Transcription
  misc_feature: MA Experiment 108561 PARAMETER Experiment Name: At_100uM_ABA_cDNA_P Parameter: Timepoint (hr) Value: 6
  misc_feature: MA Experiment 108561 PARAMETER Experiment Name: At_100uM_ABA_cDNA_P Parameter: Tissue Value: Aerial
  misc_feature: MA Experiment 108561 PARAMETER Experiment Name: At_100uM_ABA_cDNA_P Parameter: Treatment Value: 100uM ABA vs. No Treatment
  misc_feature: MA Experiment ID: 108574 Result: Down-regulated in Transcription
  misc_feature: MA Experiment 108574 PARAMETER Experiment Name: At_Wounding__cDNA_P Parameter: Timepoint (hr) Value: 1
  misc_feature: MA Experiment 108574 PARAMETER Experiment Name: At_Wounding__cDNA_P Parameter: Tissue Value: Aerial
  misc_feature: MA Experiment 108574 PARAMETER Experiment Name: At_Wounding__cDNA_P Parameter: Treatment Value: Wounding vs. No Wounding
  misc_feature: MA Experiment ID: 108594 Result: Up-regulated in Transcription
  misc_feature: MA Experiment 108594 PARAMETER Experiment Name: At_Ler-rhl_Root_cDNA_P Parameter: Plant Line Value: null
  misc_feature: MA Experiment ID: 108595 Result: Down-regulated in Transcription
  misc_feature: MA Experiment 108595 PARAMETER Experiment Name: At_Ler-pi_Ovule_cDNA_P Parameter: Plant Line Value: null
  misc_feature: MA Experiment ID: 108605 Result: Up-regulated in Transcription
  misc_feature: MA Experiment 108605 PARAMETER Experiment Name: At_100uM_ABA_cDNA_P Parameter: Timepoint (hr) Value: 6
  misc_feature: MA Experiment 108605 PARAMETER Experiment Name: At_100uM_ABA_cDNA_P Parameter: Tissue Value: Aerial
  misc_feature: MA Experiment 108605 PARAMETER Experiment Name: At_100uM_ABA_cDNA_P Parameter: Treatment Value: 100uM ABA vs. No Treatment
  misc_feature: MA Experiment ID: 20000069 Result: Up-regulated in Transcription
  misc_feature: MA Experiment 20000069 PARAMETER Experiment Name: At_100uM_ABA_Mutants_cDNA_P Parameter: Plant Line Value: CS23
  misc_feature: MA Experiment 20000069 PARAMETER Experiment Name: At_100uM_ABA_Mutants_cDNA_P Parameter: Timepoint (hr) Value: 6
  misc_feature: MA Experiment 20000069 PARAMETER Experiment Name: At_100uM_ABA_Mutants_cDNA_P Parameter: Tissue Value: Aerial
  misc_feature: MA Experiment 20000069 PARAMETER Experiment Name: At_100uM_ABA_Mutants_cDNA_P Parameter: Treatment Value: 100uM ABA vs. No Treatment
  misc_feature: MA Experiment ID: 20000070 Result: Up-regulated in Transcription
  misc_feature: MA Experiment 20000070 PARAMETER Experiment Name: At_100uM_ABA_Mutants_cDNA_P Parameter: Plant Line Value: CS24
  misc_feature: MA Experiment 20000070 PARAMETER Experiment Name: At_100uM_ABA_Mutants_cDNA_P Parameter: Timepoint (hr) Value: 6
  misc_feature: MA Experiment 20000070 PARAMETER Experiment Name: At_100uM_ABA_Mutants_cDNA_P Parameter: Tissue Value: Aerial
  misc_feature: MA Experiment 20000070 PARAMETER Experiment Name: At_100uM_ABA_Mutants_cDNA_P Parameter: Treatment Value: 100uM ABA vs. No Treatment
  misc_feature: MA Experiment ID: 20000071 Result: Up-regulated in Transcription
  misc_feature: MA Experiment 20000071 PARAMETER Experiment Name: At_100uM_ABA_Mutants_cDNA_P Parameter: Plant Line Value: CS8104
  misc_feature: MA Experiment 20000071 PARAMETER Experiment Name: At_100uM_ABA_Mutants_cDNA_P Parameter: Timepoint (hr) Value: 6
  misc_feature: MA Experiment 20000071 PARAMETER Experiment Name: At_100uM_ABA_Mutants_cDNA_P Parameter: Tissue Value: Aerial
  misc_feature: MA Experiment 20000071 PARAMETER Experiment Name: At_100uM_ABA_Mutants_cDNA_P Parameter: Treatment Value: 100uM ABA vs. No Treatment
  misc_feature: MA Experiment ID: 20000087 Result: Up-regulated in Transcription
  misc_feature: MA Experiment 20000087 PARAMETER Experiment Name: At_100uM_ABA_Mutants_cDNA_P Parameter: Plant Line Value: WS
  misc_feature: MA Experiment 20000087 PARAMETER Experiment Name: At_100uM_ABA_Mutants_cDNA_P Parameter: Timepoint (hr) Value: 6
  misc_feature: MA Experiment 20000087 PARAMETER Experiment Name: At_100uM_ABA_Mutants_cDNA_P Parameter: Tissue Value: Aerial
  misc_feature: MA Experiment 20000087 PARAMETER Experiment Name: At_100uM_ABA_Mutants_cDNA_P Parameter: Treatment Value: 100uM ABA vs. No Treatment
  misc_feature: MA Experiment ID: 20000117 Result: Up-regulated in Transcription
  misc_feature: MA Experiment 20000117 PARAMETER Experiment Name: At_100uM_ABA_Mutants_cDNA_P Parameter: Plant Line Value: Columbia
  misc_feature: MA Experiment 20000117 PARAMETER Experiment Name: At_100uM_ABA_Mutants_cDNA_P Parameter: Timepoint (hr) Value: 6
  misc_feature: MA Experiment 20000117 PARAMETER Experiment Name: At_100uM_ABA_Mutants_cDNA_P Parameter: Tissue Value: Aerial
  misc_feature: MA Experiment 20000117 PARAMETER Experiment Name: At_100uM_ABA_Mutants_cDNA_P Parameter: Treatment Value: 100uM ABA vs. No Treatment
  misc_feature: MA Experiment ID: 20000169 Result: Up-regulated in Transcription
  misc_feature: MA Experiment 20000169 PARAMETER Experiment Name: At_100uM_ABA_P Parameter: Age (day) Value: 14
  misc_feature: MA Experiment 20000169 PARAMETER Experiment Name: At_100uM_ABA_P Parameter: Organism Value: A. thaliana
  misc_feature: MA Experiment 20000169 PARAMETER Experiment Name: At_100uM_ABA_P Parameter: Plant Line Value: WS
  misc_feature: MA Experiment 20000169 PARAMETER Experiment Name: At_100uM_ABA_P Parameter: Timepoint (hr) Value: 6
  misc_feature: MA Experiment 20000169 PARAMETER Experiment Name: At_100uM_ABA_P Parameter: Tissue Value: Aerial
  misc_feature: MA Experiment 20000169 PARAMETER Experiment Name: At_100uM_ABA_P Parameter: Treatment Value: 100uM ABA vs. No Treatment
  misc_feature: MA Experiment ID: 20000173 Result: Down-regulated in Transcription
  misc_feature: MA Experiment 20000173 PARAMETER Experiment Name: At_42deg_Heat_P Parameter: Age (day) Value: 14
  misc_feature: MA Experiment 20000173 PARAMETER Experiment Name: At_42deg_Heat_P Parameter: Organism Value: A. thaliana
  misc_feature: MA Experiment 20000173 PARAMETER Experiment Name: At_42deg_Heat_P Parameter: Plant Line Value: WS
  misc_feature: MA Experiment 20000173 PARAMETER Experiment Name: At_42deg_Heat_P Parameter: Temperature (deg C) Value: 42 vs. 22
  misc_feature: MA Experiment 20000173 PARAMETER Experiment Name: At_42deg_Heat_P Parameter: Timepoint (hr) Value: 6
  misc_feature: MA Experiment 20000173 PARAMETER Experiment Name: At_42deg_Heat_P Parameter: Tissue Value: Aerial
  misc_feature: MA Experiment ID: 20000179 Result: Up-regulated in Transcription
  misc_feature: MA Experiment 20000179 PARAMETER Experiment Name: At_Germinating_Seeds_P Parameter: Age (hr) Value: 6 vs. 0
  misc_feature: MA Experiment 20000179 PARAMETER Experiment Name: At_Germinating_Seeds_P Parameter: Tissue Value: Germinating Seeds
  misc_feature: MA Experiment ID: 20000180 Result: Up-regulated in Transcription
  misc_feature: MA Experiment 20000180 PARAMETER Experiment Name: At_Germinating_Seeds_P Parameter: Age (hr) Value: 24 vs. 0
  misc_feature: MA Experiment 20000180 PARAMETER Experiment Name: At_Germinating_Seeds_P Parameter: Tissue Value: Germinating Seeds
  misc_feature: MA Experiment ID: 20000184 Result: Down-regulated in Transcription
  misc_feature: MA Experiment 20000184 PARAMETER Experiment Name: At_Shoots__P Parameter: Age (day) Value: 7
  misc_feature: MA Experiment 20000184 PARAMETER Experiment Name: At_Shoots__P Parameter: Tissue Value: Shoots vs. Whole Plant
  misc_feature: MA Experiment ID: 20000224 Result: Up-regulated in Transcription
  misc_feature: MA Experiment ID: 20000234 Result: Down-regulated in Transcription
  misc_feature: MA Experiment 20000234 PARAMETER Experiment Name: At_Siliques_P Parameter: Age (day) Value: 21
  misc_feature: MA Experiment 20000234 PARAMETER Experiment Name: At_Siliques_P Parameter: Organism Value: A. thaliana
  misc_feature: MA Experiment 20000234 PARAMETER Experiment Name: At_Siliques_P Parameter: Plant Line Value: WS
  misc_feature: MA Experiment 20000234 PARAMETER Experiment Name: At_Siliques_P Parameter: Tissue Value: Less Than 5mm Siliques vs. Whole Plant
  misc_feature: MA Experiment ID: 20000235 Result: Down-regulated in Transcription
  misc_feature: MA Experiment 20000235 PARAMETER Experiment Name: At_Siliques_P Parameter: Age (day) Value: 21
  misc_feature: MA Experiment 20000235 PARAMETER Experiment Name: At_Siliques_P Parameter: Organism Value: A. thaliana
  misc_feature: MA Experiment 20000235 PARAMETER Experiment Name: At_Siliques_P Parameter: Plant Line Value: WS
  misc_feature: MA Experiment 20000235 PARAMETER Experiment Name: At_Siliques_P Parameter: Tissue Value: 5-10mm Siliques vs. Whole Plant
  misc_feature: MA Experiment ID: 20000265 Result: Down-regulated in Transcription
  misc_feature: MA Experiment 20000265 PARAMETER Experiment Name: At_Open_Flower_P Parameter: Age (day) Value: 21
  misc_feature: MA Experiment 20000265 PARAMETER Experiment Name: At_Open_Flower_P Parameter: Plant Line Value: WS
  misc_feature: MA Experiment 20000265 PARAMETER Experiment Name: At_Open_Flower_P Parameter: Tissue Value: Closed Flower vs. Whole Plant
  misc_feature: MA Experiment ID: 20000437 Result: Up-regulated in Transcription
  misc_feature: MA Experiment 20000437 PARAMETER Experiment Name: At_Drought_P Parameter: Age (day) Value: 8
  misc_feature: MA Experiment 20000437 PARAMETER Experiment Name: At_Drought_P Parameter: Organism Value: A. thaliana
  misc_feature: MA Experiment 20000437 PARAMETER Experiment Name: At_Drought_P Parameter: Plant Line Value: WS
  misc_feature: MA Experiment 20000437 PARAMETER Experiment Name: At_Drought_P Parameter: Timepoint (hr) Value: 24
  misc_feature: MA Experiment 20000437 PARAMETER Experiment Name: At_Drought_P Parameter: Tissue Value: Whole Plant
  misc_feature: MA Experiment 20000437 PARAMETER Experiment Name: At_Drought_P Parameter: Treatment Value: Drought vs. No Drought
  misc_feature: MA Experiment ID: 20000573 Result: Up-regulated in Transcription
  misc_feature: MA Experiment 20000573 PARAMETER Experiment Name: At_100uM_ABA_Mutants__P Parameter: Organism Value: A. thaliana
  misc_feature: MA Experiment 20000573 PARAMETER Experiment Name: At_100uM_ABA_Mutants__P Parameter: Plant Line Value: CS22 vs. Ler wt
  misc_feature: MA Experiment 20000573 PARAMETER Experiment Name: At_100uM_ABA_Mutants__P Parameter: Timepoint (hr) Value: N/A
  misc_feature: MA Experiment 20000573 PARAMETER Experiment Name: At_100uM_ABA_Mutants__P Parameter: Tissue Value: Whole Plant
  misc_feature: MA Experiment 20000573 PARAMETER Experiment Name: At_100uM_ABA_Mutants__P Parameter: Treatment Value: None
  misc_feature: MA Experiment ID: 20000794 Result: Up-regulated in Transcription
  misc_feature: MA Experiment 20000794 PARAMETER Experiment Name: At_Petals_P Parameter: Age (day) Value: 23-25 days
  misc_feature: MA Experiment 20000794 PARAMETER Experiment Name: At_Petals_P Parameter: Plant Line Value: WS
  misc_feature: MA Experiment 20000794 PARAMETER Experiment Name: At_Petals_P Parameter: Tissue Value: Petals vs. Whole plant
  misc_feature: MA Experiment ID: 20001247 Result: Up-regulated in Transcription
  misc_feature: MA Experiment 20001247 PARAMETER Experiment Name: At_Far-red-induction_P Parameter: Age (day) Value: 7
  misc_feature: MA Experiment 20001247 PARAMETER Experiment Name: At_Far-red-induction_P Parameter: Light Value: Far-red vs. White
  misc_feature: MA Experiment 20001247 PARAMETER Experiment Name: At_Far-red-induction_P Parameter: Organism Value: A. thaliana
  misc_feature: MA Experiment 20001247 PARAMETER Experiment Name: At_Far-red-induction_P Parameter: Plant Line Value: Columbia
  misc_feature: MA Experiment 20001247 PARAMETER Experiment Name: At_Far-red-induction_P Parameter: Timepoint (hr) Value: 1
  misc_feature: MA Experiment 20001247 PARAMETER Experiment Name: At_Far-red-induction_P Parameter: Tissue Value: Whole Plant
  misc_feature: MA Experiment ID: 20001248 Result: Up-regulated in Transcription
  misc_feature: MA Experiment 20001248 PARAMETER Experiment Name: At_Far-red-induction_P Parameter: Age (day) Value: 7
  misc_feature: MA Experiment 20001248 PARAMETER Experiment Name: At_Far-red-induction_P Parameter: Light Value: Far-red vs. White
  misc_feature: MA Experiment 20001248 PARAMETER Experiment Name: At_Far-red-induction_P Parameter: Organism Value: A. thaliana
  misc_feature: MA Experiment 20001248 PARAMETER Experiment Name: At_Far-red-induction_P Parameter: Plant Line Value: Columbia
  misc_feature: MA Experiment 20001248 PARAMETER Experiment Name: At_Far-red-induction_P Parameter: Timepoint (hr) Value: 4
  misc_feature: MA Experiment 20001248 PARAMETER Experiment Name: At_Far-red-induction_P Parameter: Tissue Value: Whole Plant
  misc_feature: MA Experiment ID: 20001450 Result: Up-regulated in Transcription
  misc_feature: MA Experiment 20001450 PARAMETER Experiment Name: At_Far-red-induction_P Parameter: Age (day) Value: 7
  misc_feature: MA Experiment 20001450 PARAMETER Experiment Name: At_Far-red-induction_P Parameter: Light Value: Far-red vs. White
  misc_feature: MA Experiment 20001450 PARAMETER Experiment Name: At_Far-red-induction_P Parameter: Organism Value: A. thaliana
  misc_feature: MA Experiment 20001450 PARAMETER Experiment Name: At_Far-red-induction_P Parameter: Plant Line Value: Columbia
  misc_feature: MA Experiment 20001450 PARAMETER Experiment Name: At_Far-red-induction_P Parameter: Timepoint (hr) Value: 8
  misc_feature: MA Experiment 20001450 PARAMETER Experiment Name: At_Far-red-induction_P Parameter: Tissue Value: Whole Plant
  misc_feature: MA Experiment ID: 20001451 Result: Up-regulated in Transcription
  misc_feature: MA Experiment 20001451 PARAMETER Experiment Name: At_Far-red-induction_P Parameter: Age (day) Value: 7
  misc_feature: MA Experiment 20001451 PARAMETER Experiment Name: At_Far-red-induction_P Parameter: Light Value: Far-red vs. White
  misc_feature: MA Experiment 20001451 PARAMETER Experiment Name: At_Far-red-induction_P Parameter: Organism Value: A. thaliana
  misc_feature: MA Experiment 20001451 PARAMETER Experiment Name: At_Far-red-induction_P Parameter: Plant Line Value: Columbia
  misc_feature: MA Experiment 20001451 PARAMETER Experiment Name: At_Far-red-induction_P Parameter: Timepoint (hr) Value: 24
  misc_feature: MA Experiment 20001451 PARAMETER Experiment Name: At_Far-red-induction_P Parameter: Tissue Value: Whole Plant
  misc_feature: MA Experiment ID: 20001557 Result: Down-regulated in Transcription
  misc_feature: MA Experiment 20001557 PARAMETER Experiment Name: At_Drought_Soil_Dry_P Parameter: Age (day) Value: 27
  misc_feature: MA Experiment 20001557 PARAMETER Experiment Name: At_Drought_Soil_Dry_P Parameter: Organism Value: A. thaliana
  misc_feature: MA Experiment 20001557 PARAMETER Experiment Name: At_Drought_Soil_Dry_P Parameter: Plant Line Value: WS
  misc_feature: MA Experiment 20001557 PARAMETER Experiment Name: At_Drought_Soil_Dry_P Parameter: Post Timepoint (hr) Value: 3
  misc_feature: MA Experiment 20001557 PARAMETER Experiment Name: At_Drought_Soil_Dry_P Parameter: Post-Treatment Value: Re-Water vs. No Drought
  misc_feature: MA Experiment 20001557 PARAMETER Experiment Name: At_Drought_Soil_Dry_P Parameter: Timepoint (day) Value: 13
  misc_feature: MA Experiment 20001557 PARAMETER Experiment Name: At_Drought_Soil_Dry_P Parameter: Treatment Value: Drought vs. No Drought
  misc_feature: MA Experiment ID: 20001558 Result: Down-regulated in Transcription
  misc_feature: MA Experiment 20001558 PARAMETER Experiment Name: At_Drought_Soil_Dry_P Parameter: Age (day) Value: 27
  misc_feature: MA Experiment 20001558 PARAMETER Experiment Name: At_Drought_Soil_Dry_P Parameter: Organism Value: A. thaliana
  misc_feature: MA Experiment 20001558 PARAMETER Experiment Name: At_Drought_Soil_Dry_P Parameter: Plant Line Value: WS
  misc_feature: MA Experiment 20001558 PARAMETER Experiment Name: At_Drought_Soil_Dry_P Parameter: Post Timepoint (hr) Value: 6
  misc_feature: MA Experiment 20001558 PARAMETER Experiment Name: At_Drought_Soil_Dry_P Parameter: Post-Treatment Value: Re-Water vs. No Drought
  misc_feature: MA Experiment 20001558 PARAMETER Experiment Name: At_Drought_Soil_Dry_P Parameter: Timepoint (day) Value: 13
  misc_feature: MA Experiment 20001558 PARAMETER Experiment Name: At_Drought_Soil_Dry_P Parameter: Treatment Value: Drought vs. No Drought
aaaagatactataatagtagagatcaaagacctgagcaaaaactgaaagaaaaaaaaaaaaaaaaaaaaagacttctcctcaaaaatggcgtttacactaggtggaagagctcgtcgtctagtctctgcaacatcagttcatcaaaatggttgcttacacaaactgcaacaaattggatcggatcggtttcagcttggtgaagcaaaagcaataagattactacccaggagaacaaacatggttcaagaattaggaatcagggaagaatttatggatctaaacagagaaacagagacaagttatgattttctggatgaaatgagacacagatttctgaaattcaagagacaaaagtatctaccggagatagaaaagtttaaagctttggccatagctcaatcaccaaaggtaatggtgataggatgtgcagattcaagggtatgtccatcttatgtactaggatttcaacctggtgaagcttttactatccgaaatgtcgccaatctcgttaccccggttcagaatggaccaacagaaaccaactcggctcttgagtttgcggtcaccactcttcaggttgagaacattatagttatgggtcatagcaattgtggaggaattgcagcacttatgagtcatcaaaaccaccaagggcaacactctagtttagtagaaaggtgggttatgaatgggaaagccgctaagttaagaacacaattagcttcatcacatttatcctttgatgaacaatgcagaaactgtgagaaggaatctataaaggattctgtgatgaatttgataacttattcatggataagagatagagtaaagagaggtgaagtcaagattcatggatgttattacaatttgtcagattgtagtcttgagaagtggagattaagttcagacaagactaactatggattctatatttcagacagagagatatggagttgagtaaatattgaacaatcctcagttctaatattcagatgtatctttgtacatacgaaatgatatttacacaattggaaaaaaagaaaaaaaaaaaagtaatattgtaataacggaataaaaggtgaattggtc

SEQ ID NO: 103835 - protein, 290 aa, Arabidopsis thaliana
  peptide (1)..(290): Ceres Seq. ID no. 13613679
  misc_feature (1)..(290): Homolog of NCBI NO: 30696223 NR Description: carbonic anhydrase -related [Arabidopsis >gi|12321261|gb|AAG50705.1|AC079604_12 carbonic anhydrase,
  misc_feature (1)..(290): Homolog of NCBI NO: 25404198 NR Description: probable carbonic anhydrase T18I24.9 [imported] - thaliana >gi|12321393|gb|AAG50771.1|AC079131_16 carbonic
  misc_feature (1)..(250): Homolog of NCBI NO: 30696219 NR Description: carbonic anhydrase -related [Arabidopsis thaliana]
  misc_feature (1)..(250): Homolog of NCBI NO: 21539555 NR Description: putative carbonic anhydrase [Arabidopsis >gi|23197874|gb|AAN15464.1| putative carbonic anhydrase
  misc_feature (57)..(290): Homolog of NCBI NO: 18418245 NR Description: carbonate dehydratase - like protein [Arabidopsis >gi|14334478|gb|AAK59437.1| putative carbonate dehydratase
  misc_feature (67)..(284): Homolog of NCBI NO: 15223141 NR Description: carbonic anhydrase -related [Arabidopsis >gi|14334470|gb|AAK59433.1| putative carbonic anhydrase thaliana] >gi|21281000|gb|AAM44970.1| putative carbonic anhydrase
  misc_feature (67)..(284): Homolog of NCBI NO: 30698715 NR Description: carbonic anhydrase -related [Arabidopsis thaliana]
  misc_feature (44)..(273): Homolog of NCBI NO: 27652184 NR Description: carbonic anhydrase 2 [Flaveria bidentis]
  misc_feature (37)..(272): Homolog of NCBI NO: 27652186 NR Description: carbonic anhydrase 3 [Flaveria bidentis]
  misc_feature (58)..(272): Homolog of NCBI NO: 30685030 NR Description: CARBONIC ANHYDRASE 2 [Arabidopsis thaliana]
MAFTLGGRARRLVSATSVHQNGCLHKLQQIGSDRFQLGEAKAIRLLPRRTNMVQELGIREEFMDLNRETETSYDFLDEMRHRFLKFKRQKYLPEIEKFKALAIAQSPKVMVIGCADSRVCPSYVLGFQPGEAFTIRNVANLVTPVQNGPTETNSALEFAVTTLQVENIIVMGHSNCGGIAALMSHQNHQGQHSSLVERWVMNGKAAKLRTQLASSHLSFDEQCRNCEKESIKDSVMNLITYSWIRDRVKRGEVKIHGCYYNLSDCSLEKWRLSSDKTNYGFYISDREIWS

SEQ ID NO: 103836 - protein, 239 aa, Arabidopsis thaliana
  peptide (1)..(239): Ceres Seq. ID no. 13613680
  misc_feature (1)..(239): Homolog of NCBI NO: 30696223 NR Description: carbonic anhydrase -related [Arabidopsis >gi|12321261|gb|AAG50705.1|AC079604_12 carbonic anhydrase,
  misc_feature (1)..(239): Homolog of NCBI NO: 25404198 NR Description: probable carbonic anhydrase T18I24.9 [imported] - thaliana >gi|12321393|gb|AAG50771.1|AC079131_16 carbonic
  misc_feature (1)..(199): Homolog of NCBI NO: 30696219 NR Description: carbonic anhydrase -related [Arabidopsis thaliana]
  misc_feature (1)..(199): Homolog of NCBI NO: 21539555 NR Description: putative carbonic anhydrase [Arabidopsis >gi|23197874|gb|AAN15464.1| putative carbonic anhydrase
  misc_feature (6)..(239): Homolog of NCBI NO: 18418245 NR Description: carbonate dehydratase - like protein [Arabidopsis >gi|14334478|gb|AAK59437.1| putative carbonate dehydratase
  misc_feature (16)..(233): Homolog of NCBI NO: 15223141 NR Description: carbonic anhydrase -related [Arabidopsis >gi|14334470|gb|AAK59433.1| putative carbonic anhydrase thaliana] >gi|21281000|gb|AAM44970.1| putative carbonic anhydrase
  misc_feature (16)..(233): Homolog of NCBI NO: 30698715 NR Description: carbonic anhydrase -related [Arabidopsis thaliana]
  misc_feature (1)..(222): Homolog of NCBI NO: 27652184 NR Description: carbonic anhydrase 2 [Flaveria bidentis]
  misc_feature (1)..(221): Homolog of NCBI NO: 27652186 NR Description: carbonic anhydrase 3 [Flaveria bidentis]
  misc_feature (7)..(221): Homolog of NCBI NO: 30685030 NR Description: CARBONIC ANHYDRASE 2 [Arabidopsis thaliana]
MVQELGIREEFMDLNRETETSYDFLDEMRHRFLKFKRQKYLPEIEKFKALAIAQSPKVMVIGCADSRVCPSYVLGFQPGEAFTIRNVANLVTPVQNGPTETNSALEFAVTTLQVENIIVMGHSNCGGIAALMSHQNHQGQHSSLVERWVMNGKAAKLRTQLASSHLSFDEQCRNCEKESIKDSVMNLITYSWIRDRVKRGEVKIHGCYYNLSDCSLEKWRLSSDKTNYGFYISDREIWS

SEQ ID NO: 103837 - protein, 228 aa, Arabidopsis thaliana
  peptide (1)..(228): Ceres Seq. ID no. 13613681
  misc_feature (1)..(228): Homolog of NCBI NO: 30696223 NR Description: carbonic anhydrase -related [Arabidopsis >gi|12321261|gb|AAG50705.1|AC079604_12 carbonic anhydrase,
  misc_feature (1)..(228): Homolog of NCBI NO: 25404198 NR Description: probable carbonic anhydrase T18I24.9 [imported] - thaliana >gi|12321393|gb|AAG50771.1|AC079131_16 carbonic
  misc_feature (1)..(188): Homolog of NCBI NO: 30696219 NR Description: carbonic anhydrase -related [Arabidopsis thaliana]
  misc_feature (1)..(188): Homolog of NCBI NO: 21539555 NR Description: putative carbonic anhydrase [Arabidopsis >gi|23197874|gb|AAN15464.1| putative carbonic anhydrase
  misc_feature (1)..(228): Homolog of NCBI NO: 18418245 NR Description: carbonate dehydratase - like protein [Arabidopsis >gi|14334478|gb|AAK59437.1| putative carbonate dehydratase
  misc_feature (5)..(222): Homolog of NCBI NO: 15223141 NR Description: carbonic anhydrase -related [Arabidopsis >gi|14334470|gb|AAK59433.1| putative carbonic anhydrase thaliana] >gi|21281000|gb|AAM44970.1| putative carbonic anhydrase
  misc_feature (5)..(222): Homolog of NCBI NO: 30698715 NR Description: carbonic anhydrase -related [Arabidopsis thaliana]
  misc_feature (1)..(211): Homolog of NCBI NO: 27652184 NR Description: carbonic anhydrase 2 [Flaveria bidentis]
  misc_feature (1)..(210): Homolog of NCBI NO: 27652186 NR Description: carbonic anhydrase 3 [Flaveria bidentis]
  misc_feature (1)..(210): Homolog of NCBI NO: 30685030 NR Description: CARBONIC ANHYDRASE 2 [Arabidopsis thaliana]
MDLNRETETSYDFLDEMRHRFLKFKRQKYLPEIEKFKALAIAQSPKVMVIGCADSRVCPSYVLGFQPGEAFTIRNVANLVTPVQNGPTETNSALEFAVTTLQVENIIVMGHSNCGGIAALMSHQNHQGQHSSLVERWVMNGKAAKLRTQLASSHLSFDEQCRNCEKESIKDSVMNLITYSWIRDRVKRGEVKIHGCYYNLSDCSLEKWRLSSDKTNYGFYISDREIWS

SEQ ID NO: 103838 - DNA, 1709 bp, Arabidopsis thaliana
  misc_feature (1)..(1709): Ceres Seq. ID no. 13613693
  misc_feature: MA Experiment ID: 108501 Result: Up-regulated in Transcription
  misc_feature: MA Experiment 108501 PARAMETER Experiment Name: At_ap2_floral_buds_cDNA_P Parameter: Plant Line Value: ap2 (Ler.)
  misc_feature: MA Experiment 108501 PARAMETER Experiment Name: At_ap2_floral_buds_cDNA_P Parameter: Tissue Value: Closed Flower
  misc_feature: MA Experiment ID: 108595 Result: Up-regulated in Transcription
  misc_feature: MA Experiment 108595 PARAMETER Experiment Name: At_Ler-pi_Ovule_cDNA_P Parameter: Plant Line Value: null
  misc_feature: MA Experiment ID: 20000169 Result: Up-regulated in Transcription
  misc_feature: MA Experiment 20000169 PARAMETER Experiment Name: At_100uM_ABA_P Parameter: Age (day) Value: 14
  misc_feature: MA Experiment 20000169 PARAMETER Experiment Name: At_100uM_ABA_P Parameter: Organism Value: A. thaliana
  misc_feature: MA Experiment 20000169 PARAMETER Experiment Name: At_100uM_ABA_P Parameter: Plant Line Value: WS
  misc_feature: MA Experiment 20000169 PARAMETER Experiment Name: At_100uM_ABA_P Parameter: Timepoint (hr) Value: 6
  misc_feature: MA Experiment 20000169 PARAMETER Experiment Name: At_100uM_ABA_P Parameter: Tissue Value: Aerial
  misc_feature: MA Experiment 20000169 PARAMETER Experiment Name: At_100uM_ABA_P Parameter: Treatment Value: 100uM ABA vs. No Treatment
  misc_feature: MA Experiment ID: 20000214 Result: Down-regulated in Transcription
  misc_feature: MA Experiment 20000214 PARAMETER Experiment Name: At_4deg_Cold_P Parameter: Timepoint (hr) Value: 6
  misc_feature: MA Experiment ID: 20000267 Result: Up-regulated in Transcription
  misc_feature: MA Experiment 20000267 PARAMETER Experiment Name: At_Drought_P Parameter: Age (day) Value: 7
  misc_feature: MA Experiment 20000267 PARAMETER Experiment Name: At_Drought_P Parameter: Organism Value: A. thaliana
  misc_feature: MA Experiment 20000267 PARAMETER Experiment Name: At_Drought_P Parameter: Plant Line Value: WS
  misc_feature: MA Experiment 20000267 PARAMETER Experiment Name: At_Drought_P Parameter: Timepoint (hr) Value: 6
  misc_feature: MA Experiment 20000267 PARAMETER Experiment Name: At_Drought_P Parameter: Tissue Value: Whole Plant
  misc_feature: MA Experiment 20000267 PARAMETER Experiment Name: At_Drought_P Parameter: Treatment Value: Drought vs. No Drought
  misc_feature: MA Experiment ID: 20000268 Result: Up-regulated in Transcription
  misc_feature: MA Experiment 20000268 PARAMETER Experiment Name: At_100mM_NaCl__P Parameter: Age (day) Value: 14
  misc_feature: MA Experiment 20000268 PARAMETER Experiment Name: At_100mM_NaCl__P Parameter: Organism Value: A. thaliana
  misc_feature: MA Experiment 20000268 PARAMETER Experiment Name: At_100mM_NaCl__P Parameter: Plant Line Value: WS
  misc_feature: MA Experiment 20000268 PARAMETER Experiment Name: At_100mM_NaCl__P Parameter: Timepoint (hr) Value: 6
  misc_feature: MA Experiment 20000268 PARAMETER Experiment Name: At_100mM_NaCl__P Parameter: Tissue Value: Whole Plant
  misc_feature: MA Experiment 20000268 PARAMETER Experiment Name: At_100mM_NaCl__P Parameter: Treatment Value: 100mM NaCl vs. No Treatment
  misc_feature: MA Experiment ID: 20000436 Result: Up-regulated in Transcription
  misc_feature: MA Experiment 20000436 PARAMETER Experiment Name: At_Drought_P Parameter: Age (day) Value: 7
  misc_feature: MA Experiment 20000436 PARAMETER Experiment Name: At_Drought_P Parameter: Organism Value: A. thaliana
  misc_feature: MA Experiment 20000436 PARAMETER Experiment Name: At_Drought_P Parameter: Plant Line Value: WS
  misc_feature: MA Experiment 20000436 PARAMETER Experiment Name: At_Drought_P Parameter: Timepoint (hr) Value: 12
  misc_feature: MA Experiment 20000436 PARAMETER Experiment Name: At_Drought_P Parameter: Tissue Value: Whole Plant
  misc_feature: MA Experiment 20000436 PARAMETER Experiment Name: At_Drought_P Parameter: Treatment Value: Drought vs. No Drought
  misc_feature: MA Experiment ID: 20000437 Result: Up-regulated in Transcription
  misc_feature: MA Experiment 20000437 PARAMETER Experiment Name: At_Drought_P Parameter: Age (day) Value: 8
  misc_feature: MA Experiment 20000437 PARAMETER Experiment Name: At_Drought_P Parameter: Organism Value: A. thaliana
  misc_feature: MA Experiment 20000437 PARAMETER Experiment Name: At_Drought_P Parameter: Plant Line Value: WS
  misc_feature: MA Experiment 20000437 PARAMETER Experiment Name: At_Drought_P Parameter: Timepoint (hr) Value: 24
  misc_feature: MA Experiment 20000437 PARAMETER Experiment Name: At_Drought_P Parameter: Tissue Value: Whole Plant
  misc_feature: MA Experiment 20000437 PARAMETER Experiment Name: At_Drought_P Parameter: Treatment Value: Drought vs. No Drought
  misc_feature: MA Experiment ID: 20000439 Result: Down-regulated in Transcription
  misc_feature: MA Experiment 20000439 PARAMETER Experiment Name: At_Roots__P Parameter: Age (day) Value: 14 vs. 21
  misc_feature: MA Experiment 20000439 PARAMETER Experiment Name: At_Roots__P Parameter: Organism Value: A. thaliana
  misc_feature: MA Experiment 20000439 PARAMETER Experiment Name: At_Roots__P Parameter: Tissue Value: Roots vs. Whole Plant
  misc_feature: MA Experiment ID: 20000453 Result: Up-regulated in Transcription
  misc_feature: MA Experiment 20000453 PARAMETER Experiment Name: At_100uM_ABA_P Parameter: Age (day) Value: 15
  misc_feature: MA Experiment 20000453 PARAMETER Experiment Name: At_100uM_ABA_P Parameter: Organism Value: A. thaliana
  misc_feature: MA Experiment 20000453 PARAMETER Experiment Name: At_100uM_ABA_P Parameter: Plant Line Value: WS
  misc_feature: MA Experiment 20000453 PARAMETER Experiment Name: At_100uM_ABA_P Parameter: Timepoint (hr) Value: 24
  misc_feature: MA Experiment 20000453 PARAMETER Experiment Name: At_100uM_ABA_P Parameter: Tissue Value: Aerial
  misc_feature: MA Experiment 20000453 PARAMETER Experiment Name: At_100uM_ABA_P Parameter: Treatment Value: 100uM ABA vs. No Treatment
  misc_feature: MA Experiment ID: 20000455 Result: Up-regulated in Transcription
  misc_feature: MA Experiment 20000455 PARAMETER Experiment Name: At_100uM_ABA_P Parameter: Age (day) Value: 16
  misc_feature: MA Experiment 20000455 PARAMETER Experiment Name: At_100uM_ABA_P Parameter: Organism Value: A. thaliana
  misc_feature: MA Experiment 20000455 PARAMETER Experiment Name: At_100uM_ABA_P Parameter: Plant Line Value: WS
  misc_feature: MA Experiment 20000455 PARAMETER Experiment Name: At_100uM_ABA_P Parameter: Timepoint (hr) Value: 48
  misc_feature: MA Experiment 20000455 PARAMETER Experiment Name: At_100uM_ABA_P Parameter: Tissue Value: Aerial
  misc_feature: MA Experiment 20000455 PARAMETER Experiment Name: At_100uM_ABA_P Parameter: Treatment Value: 100uM ABA vs. No Treatment
  misc_feature: MA Experiment ID: 20000794 Result: Up-regulated in Transcription
  misc_feature: MA Experiment 20000794 PARAMETER Experiment Name: At_Petals_P Parameter: Age (day) Value: 23-25 days
  misc_feature: MA Experiment 20000794 PARAMETER Experiment Name: At_Petals_P Parameter: Plant Line Value: WS
  misc_feature: MA Experiment 20000794 PARAMETER Experiment Name: At_Petals_P Parameter: Tissue Value: Petals vs. Whole plant
  misc_feature: MA Experiment ID: 20001554 Result: Up-regulated in Transcription
  misc_feature: MA Experiment 20001554 PARAMETER Experiment Name: At_Drought_Soil_Dry_P Parameter: Age (day) Value: 21
  misc_feature: MA Experiment 20001554 PARAMETER Experiment Name: At_Drought_Soil_Dry_P Parameter: Organism Value: A. thaliana
  misc_feature: MA Experiment 20001554 PARAMETER Experiment Name: At_Drought_Soil_Dry_P Parameter: Plant Line Value: WS
  misc_feature: MA Experiment 20001554 PARAMETER Experiment Name: At_Drought_Soil_Dry_P Parameter: Post Timepoint (hr) Value: None
  misc_feature: MA Experiment 20001554 PARAMETER Experiment Name: At_Drought_Soil_Dry_P Parameter: Post-Treatment Value: None
  misc_feature: MA Experiment 20001554 PARAMETER Experiment Name: At_Drought_Soil_Dry_P Parameter: Timepoint (day) Value: 7
  misc_feature: MA Experiment 20001554 PARAMETER Experiment Name: At_Drought_Soil_Dry_P Parameter: Treatment Value: Drought vs. No Drought
  misc_feature: MA Experiment ID: 20001555 Result: Up-regulated in Transcription
  misc_feature: MA Experiment 20001555 PARAMETER Experiment Name: At_Drought_Soil_Dry_P Parameter: Age (day) Value: 24
  misc_feature: MA Experiment 20001555 PARAMETER Experiment Name: At_Drought_Soil_Dry_P Parameter: Organism Value: A. thaliana
  misc_feature: MA Experiment 20001555 PARAMETER Experiment Name: At_Drought_Soil_Dry_P Parameter: Plant Line Value: WS
  misc_feature: MA Experiment 20001555 PARAMETER Experiment Name: At_Drought_Soil_Dry_P Parameter: Post Timepoint (hr) Value: None
  misc_feature: MA Experiment 20001555 PARAMETER Experiment Name: At_Drought_Soil_Dry_P Parameter: Post-Treatment Value: None
  misc_feature: MA Experiment 20001555 PARAMETER Experiment Name: At_Drought_Soil_Dry_P Parameter: Timepoint (day) Value: 10
  misc_feature: MA Experiment 20001555 PARAMETER Experiment Name: At_Drought_Soil_Dry_P Parameter: Treatment Value: Drought vs. No Drought
  misc_feature: MA Experiment ID: 20001559 Result: Up-regulated in Transcription
  misc_feature: MA Experiment 20001559 PARAMETER Experiment Name: At_Drought_Soil_Dry_P Parameter: Age (day) Value: 28
  misc_feature: MA Experiment 20001559 PARAMETER Experiment Name: At_Drought_Soil_Dry_P Parameter: Organism Value: A. thaliana
  misc_feature: MA Experiment 20001559 PARAMETER Experiment Name: At_Drought_Soil_Dry_P Parameter: Plant Line Value: WS
  misc_feature: MA Experiment 20001559 PARAMETER Experiment Name: At_Drought_Soil_Dry_P Parameter: Post Timepoint (hr) Value: 29
  misc_feature: MA Experiment 20001559 PARAMETER Experiment Name: At_Drought_Soil_Dry_P Parameter: Post-Treatment Value: Re-Water vs. No Drought
  misc_feature: MA Experiment 20001559 PARAMETER Experiment Name: At_Drought_Soil_Dry_P Parameter: Timepoint (day) Value: 14
  misc_feature: MA Experiment 20001559 PARAMETER Experiment Name: At_Drought_Soil_Dry_P Parameter: Treatment Value: Drought vs. No Drought
  misc_feature: MA Experiment ID: 20001904 Result: Up-regulated in Transcription
  misc_feature: MA Experiment 20001904 PARAMETER Experiment Name: At_Drought_Reproduction_P Parameter: Age (day) Value: 37
  misc_feature: MA Experiment 20001904 PARAMETER Experiment Name: At_Drought_Reproduction_P Parameter: Organism Value: A. thaliana
  misc_feature: MA Experiment 20001904 PARAMETER Experiment Name: At_Drought_Reproduction_P Parameter: Plant Line Value: WS
  misc_feature: MA Experiment 20001904 PARAMETER Experiment Name: At_Drought_Reproduction_P Parameter: Timepoint (day) Value: 7
  misc_feature: MA Experiment 20001904 PARAMETER Experiment Name: At_Drought_Reproduction_P Parameter: Tissue Value: Rosettes
  misc_feature: MA Experiment 20001904 PARAMETER Experiment Name: At_Drought_Reproduction_P Parameter: Treatment Value: Drought vs. No Drought
gttgactataattagacttcttcatttactctctctctgacttaaaacatttattttatcttcttcttgttctctctttctctttctctcatcactatgaagagtttcaacacagaaggacacaaccactccacggcggaatccggcgatgcctacaccgtgtcggacccgacaaagaacgtcgatgaagatggtcgagagaagcgtaccgggacgtggcttacggcgagtgcgcatattatcacggcggtgataggctccggagtgttgtctttagcatgggctatagctcagcttggttggatcgcagggacatcgatcttactcattttctcgttcattacttacttcacctccaccatgcttgccgattgctaccgtgcgccggatcccgtcaccggaaaacggaattacacttacatggacgttgttcgatcttacctcggtggtaggaaagtgcagctctgtggagtggcacaatatgggaatctgattggggtcactgttggttacaccatcactgcttctattagtttggtagcggtagggaaatcgaactgcttccacgataaagggcacactgcggattgtactatatcgaattatccgtatatggcggtttttggcattattcaggttattcttagccagatcccaaatttccacaagctctcttttctttccattatggccgcggtcatgtcctttacttatgcaactattggaatcggtctagccatcgcaaccgtcgcaggtgggaaagtgggtaagacgagtatgacgggcacagcggttggagtagatgtaaccgcagctcaaaagatatggagatcgtttcaagcggttggggacatagcgttcgcctatgcttatgccacggttctcatcgagattcaggatacactaagatctagcccagctgagaacaaagccatgaaaagagcaagtcttgtgggagtatcaaccaccacttttttctacatcttatgtggatgcatcggctatgctgcatttggaaacaatgcccctggagatttcctcacagatttcgggtttttcgagcccttttggctcattgactttgcaaacgcttgcatcgctgtccaccttattggtgcctatcaggtgttcgcgcagccgatattccagtttgttgagaaaaaatgcaacagaaactatccagacaacaagttcatcacttctgaatattcagtaaacgtacctttccttggaaaattcaacattagcctcttcagattggtgtggaggacagcttatgtggttataaccactgttgtagctatgatattccctttcttcaacgcgatcttaggtcttatcggagcagcttccttctggcctttaacggtttatttccctgtggagatgcacattgcacaaaccaagattaagaagtactctgctagatggattgcgctgaaaacgatgtgctatgtttgcttgatcgtctcgctcttagctgcagccggatccatcgcaggacttataagtagtgtcaaaacctacaagcccttccggactatgcatgagtgagtttgagatcctcaagagagtcaaaaatatatgtagtagtttggtctttctgttaaactatctggtgtctaaatccaatgagaatgctttattgctaaaacttcatgaatctctctgtatctacatctttcaatctaatacatatgagctcttcc

SEQ ID NO: 103839 - protein, 485 aa, Arabidopsis thaliana; identical to SEQ ID NO: 24657
  peptide (1)..(485): Ceres Seq. ID no. 13613694
  misc_feature (1)..(485): Homolog of NCBI NO: 15217945 NR Description: amino acid permease I (AAP1) [Arabidopsis
  misc_feature (1)..(485): Homolog of NCBI NO: 2654019 NR Description: neutral amino acid transport system II
  misc_feature (1)..(485): Homolog of NCBI NO: 31455391 NR Description: amino acid permease 1 [Brassica napus]
  misc_feature (9)..(483): Homolog of NCBI NO: 15218370 NR Description: amino acid permease, putative [Arabidopsis
  misc_feature (24)..(481): Homolog of NCBI NO: 31455393 NR Description: amino acid permease 6 [Brassica napus]
  misc_feature (15)..(481): Homolog of NCBI NO: 15240523 NR Description: amino acid permease 6 (AAP6) [Arabidopsis
  misc_feature (24)..(457): Homolog of NCBI NO: 24370975 NR Description: amino acid transporter [Solanum tuberosum]
  misc_feature (24)..(482): Homolog of NCBI NO: 27447655 NR Description: amino acid transporter [Lycopersicon esculentum]
  misc_feature (47)..(430): Homolog of NCBI NO: 7442731 NR Description: probable amino acid transporter protein AAP1 -
  misc_feature (20)..(482): Homolog of NCBI NO: 27447657 NR Description: amino acid transporter [Lycopersicon esculentum]

SEQ ID NO: 103840 - protein, 397 aa, Arabidopsis thaliana; identical to SEQ ID NO: 24658
  peptide (1)..(397): Ceres Seq. ID no. 13613695
  misc_feature (1)..(397): Homolog of NCBI NO: 15217945 NR Description: amino acid permease I (AAP1) [Arabidopsis
  misc_feature (1)..(397): Homolog of NCBI NO: 2654019 NR Description: neutral amino acid transport system II
  misc_feature (1)..(397): Homolog of NCBI NO: 31455391 NR Description: amino acid permease 1 [Brassica napus]
  misc_feature (1)..(395): Homolog of NCBI NO: 15218370 NR Description: amino acid permease, putative [Arabidopsis
  misc_feature (1)..(393): Homolog of NCBI NO: 31455393 NR Description: amino acid permease 6 [Brassica napus]
  misc_feature (1)..(393): Homolog of NCBI NO: 15240523 NR Description: amino acid permease 6 (AAP6) [Arabidopsis
  misc_feature (1)..(369): Homolog of NCBI NO: 24370975 NR Description: amino acid transporter [Solanum tuberosum]
  misc_feature (1)..(394): Homolog of NCBI NO: 27447655 NR Description: amino acid transporter [Lycopersicon esculentum]
  misc_feature (1)..(342): Homolog of NCBI NO: 7442731 NR Description: probable amino acid transporter protein AAP1 -
  misc_feature (1)..(394): Homolog of NCBI NO: 27447657 NR Description: amino acid transporter [Lycopersicon esculentum]

SEQ ID NO: 103841 - protein, 377 aa, Arabidopsis thaliana; identical to SEQ ID NO: 24659
  peptide (1)..(377): Ceres Seq. ID no. 13613696
  misc_feature (1)..(377): Homolog of NCBI NO: 15217945 NR Description: amino acid permease I (AAP1) [Arabidopsis
  misc_feature (1)..(377): Homolog of NCBI NO: 2654019 NR Description: neutral amino acid transport system II
  misc_feature (1)..(377): Homolog of NCBI NO: 31455391 NR Description: amino acid permease 1 [Brassica napus]
  misc_feature (1)..(375): Homolog of NCBI NO: 15218370 NR Description: amino acid permease, putative [Arabidopsis
  misc_feature (1)..(373): Homolog of NCBI NO: 31455393 NR Description: amino acid permease 6 [Brassica napus]
  misc_feature (1)..(373): Homolog of NCBI NO: 15240523 NR Description: amino acid permease 6 (AAP6) [Arabidopsis
  misc_feature (1)..(349): Homolog of NCBI NO: 24370975 NR Description: amino acid transporter [Solanum tuberosum]
  misc_feature (1)..(374): Homolog of NCBI NO: 27447655 NR Description: amino acid transporter [Lycopersicon esculentum]
  misc_feature (1)..(322): Homolog of NCBI NO: 7442731 NR Description: probable amino acid transporter protein AAP1 -
  misc_feature (1)..(374): Homolog of NCBI NO: 27447657 NR Description: amino acid transporter [Lycopersicon esculentum]

SEQ ID NO: 103842 - DNA, 1290 bp, Arabidopsis thaliana
  misc_feature (1)..(1290): Ceres Seq. ID no. 13613697
  misc_feature: MA Experiment ID: 108463 Result: Down-regulated in Transcription
  misc_feature: MA Experiment 108463 PARAMETER Experiment Name: At_Germinating_Seeds_cDNA_P Parameter: Age (day) Value: 3 vs. 0
  misc_feature: MA Experiment 108463 PARAMETER Experiment Name: At_Germinating_Seeds_cDNA_P Parameter: Tissue Value: Germinating Seeds
  misc_feature: MA Experiment ID: 108464 Result: Down-regulated in Transcription
  misc_feature: MA Experiment 108464 PARAMETER Experiment Name: At_Germinating_Seeds_cDNA_P Parameter: Age (day) Value: 4 vs. 0
  misc_feature: MA Experiment 108464 PARAMETER Experiment Name: At_Germinating_Seeds_cDNA_P Parameter: Tissue Value: Germinating Seeds
  misc_feature: MA Experiment ID: 108473 Result: Down-regulated in Transcription
  misc_feature: MA Experiment 108473 PARAMETER Experiment Name: At_Drought_Flowers_cDNA_P Parameter: Timepoint (hr) Value: 7 d
  misc_feature: MA Experiment 108473 PARAMETER Experiment Name: At_Drought_Flowers_cDNA_P Parameter: Tissue Value: Flower
  misc_feature: MA Experiment 108473 PARAMETER Experiment Name: At_Drought_Flowers_cDNA_P Parameter: Treatment Value: Drought vs. No Drought
  misc_feature: MA Experiment ID: 108501 Result: Down-regulated in Transcription
  misc_feature: MA Experiment 108501 PARAMETER Experiment Name: At_ap2_floral_buds_cDNA_P Parameter: Plant Line Value: ap2 (Ler.)
  misc_feature: MA Experiment 108501 PARAMETER Experiment Name: At_ap2_floral_buds_cDNA_P Parameter: Tissue Value: Closed Flower
  misc_feature: MA Experiment ID: 108561 Result: Down-regulated in Transcription
  misc_feature: MA Experiment 108561 PARAMETER Experiment Name: At_100uM_ABA_cDNA_P Parameter: Timepoint (hr) Value: 6
  misc_feature: MA Experiment 108561 PARAMETER Experiment Name: At_100uM_ABA_cDNA_P Parameter: Tissue Value: Aerial
  misc_feature: MA Experiment 108561 PARAMETER Experiment Name: At_100uM_ABA_cDNA_P Parameter: Treatment Value: 100uM ABA vs. No Treatment
  misc_feature: MA Experiment ID: 108576 Result: Up-regulated in Transcription
  misc_feature: MA Experiment 108576 PARAMETER Experiment Name: At_42deg_Heat_cDNA_P Parameter: Temperature (deg C) Value: 42 vs. 22
  misc_feature: MA Experiment 108576 PARAMETER Experiment Name: At_42deg_Heat_cDNA_P Parameter: Timepoint (hr) Value: 1
  misc_feature: MA Experiment 108576 PARAMETER Experiment Name: At_42deg_Heat_cDNA_P Parameter: Tissue Value: Aerial
  misc_feature: MA Experiment ID: 108595 Result: Up-regulated in Transcription
  misc_feature: MA Experiment 108595 PARAMETER Experiment Name: At_Ler-pi_Ovule_cDNA_P Parameter: Plant Line Value: null
  misc_feature: MA Experiment ID: 108668 Result: Down-regulated in Transcription
  misc_feature: MA Experiment 108668 PARAMETER Experiment Name: At_2mM_SA_cDNA_P Parameter: Plant Line Value: WS
  misc_feature: MA Experiment 108668 PARAMETER Experiment Name: At_2mM_SA_cDNA_P Parameter: Timepoint (hr) Value: 6
  misc_feature: MA Experiment 108668 PARAMETER Experiment Name: At_2mM_SA_cDNA_P Parameter: Treatment Value: 2mM SA vs. No Treatment
  misc_feature: MA Experiment ID: 20000112 Result: Down-regulated in Transcription
  misc_feature: MA Experiment 20000112 PARAMETER Experiment Name: At_42deg_Heat_cDNA_P Parameter: Temperature (deg C) Value: 42 vs. 22
  misc_feature: MA Experiment 20000112 PARAMETER Experiment Name: At_42deg_Heat_cDNA_P Parameter: Timepoint (hr) Value: 2
  misc_feature: MA Experiment 20000112 PARAMETER Experiment Name: At_42deg_Heat_cDNA_P Parameter: Tissue Value: Aerial
  misc_feature: MA Experiment ID: 20000185 Result: Down-regulated in Transcription
  misc_feature: MA Experiment 20000185 PARAMETER Experiment Name: At_Roots__P Parameter: Age (day) Value: 7 vs. 21
  misc_feature: MA Experiment 20000185 PARAMETER Experiment Name: At_Roots__P Parameter: Organism Value: A. thaliana
  misc_feature: MA Experiment 20000185 PARAMETER Experiment Name: At_Roots__P Parameter: Tissue Value: Roots vs. Whole Plant
  misc_feature: MA Experiment ID: 20000234 Result: Up-regulated in Transcription
  misc_feature: MA Experiment 20000234 PARAMETER Experiment Name: At_Siliques_P Parameter: Age (day) Value: 21
  misc_feature: MA Experiment 20000234 PARAMETER Experiment Name: At_Siliques_P Parameter: Organism Value: A. thaliana
  misc_feature: MA Experiment 20000234 PARAMETER Experiment Name: At_Siliques_P Parameter: Plant Line Value: WS
  misc_feature: MA Experiment 20000234 PARAMETER Experiment Name: At_Siliques_P Parameter: Tissue Value: Less Than 5mm Siliques vs. Whole Plant
  misc_feature: MA Experiment ID: 20000235 Result: Up-regulated in Transcription
  misc_feature: MA Experiment 20000235 PARAMETER Experiment Name: At_Siliques_P Parameter: Age (day) Value: 21
  misc_feature: MA Experiment 20000235 PARAMETER Experiment Name: At_Siliques_P Parameter: Organism Value: A. thaliana
  misc_feature: MA Experiment 20000235 PARAMETER Experiment Name: At_Siliques_P Parameter: Plant Line Value: WS
  misc_feature: MA Experiment 20000235 PARAMETER Experiment Name: At_Siliques_P Parameter: Tissue Value: 5-10mm Siliques vs. Whole Plant
  misc_feature: MA Experiment ID: 20000264 Result: Up-regulated in Transcription
  misc_feature: MA Experiment 20000264 PARAMETER Experiment Name: At_Open_Flower_P Parameter: Age (day) Value: 21
  misc_feature: MA Experiment 20000264 PARAMETER Experiment Name: At_Open_Flower_P Parameter: Plant Line Value: WS
  misc_feature: MA Experiment 20000264 PARAMETER Experiment Name: At_Open_Flower_P Parameter: Tissue Value: Open Flower vs. Whole Plant
  misc_feature: MA Experiment ID: 20000265 Result: Up-regulated in Transcription
  misc_feature: MA Experiment 20000265 PARAMETER Experiment Name: At_Open_Flower_P Parameter: Age (day) Value: 21
  misc_feature: MA Experiment 20000265 PARAMETER Experiment Name: At_Open_Flower_P Parameter: Plant Line Value: WS
  misc_feature: MA Experiment 20000265 PARAMETER Experiment Name: At_Open_Flower_P Parameter: Tissue Value: Closed Flower vs. Whole Plant
  misc_feature: MA Experiment ID: 20000286 Result: Up-regulated in Transcription
  misc_feature: MA Experiment 20000286 PARAMETER Experiment Name: At_Open_Flower_P Parameter: Age (day) Value: 21
  misc_feature: MA Experiment 20000286 PARAMETER Experiment Name: At_Open_Flower_P Parameter: Plant Line Value: WS
  misc_feature: MA Experiment 20000286 PARAMETER Experiment Name: At_Open_Flower_P Parameter: Tissue Value: Half Open vs. Whole Plant
  misc_feature: MA Experiment ID: 20000438 Result: Down-regulated in Transcription
  misc_feature: MA Experiment 20000438 PARAMETER Experiment Name: At_Shoots__P Parameter: Age (day) Value: 14
  misc_feature: MA Experiment 20000438 PARAMETER Experiment Name: At_Shoots__P Parameter: Tissue Value: Shoots vs. Whole Plant
  misc_feature: MA Experiment ID: 20000439 Result: Down-regulated in Transcription
  misc_feature: MA Experiment 20000439 PARAMETER Experiment Name: At_Roots__P Parameter: Age (day) Value: 14 vs. 21
  misc_feature: MA Experiment 20000439 PARAMETER Experiment Name: At_Roots__P Parameter: Organism Value: A. thaliana
  misc_feature: MA Experiment 20000439 PARAMETER Experiment Name: At_Roots__P Parameter: Tissue Value: Roots vs. Whole Plant
  misc_feature: MA Experiment ID: 20000441 Result: Down-regulated in Transcription
  misc_feature: MA Experiment 20000441 PARAMETER Experiment Name: At_1uM_BR-BRZ__P Parameter: Tissue Value: Shoot Apices
  misc_feature: MA Experiment 20000441 PARAMETER Experiment Name: At_1uM_BR-BRZ__P Parameter: Treatment Value: 1uM BR vs. No Treatment
  misc_feature: MA Experiment ID: 20000443 Result: Down-regulated in Transcription
  misc_feature: MA Experiment 20000443 PARAMETER Experiment Name: At_1uM_BR-BRZ__P Parameter: Tissue Value: Shoot Apices
  misc_feature: MA Experiment 20000443 PARAMETER Experiment Name: At_1uM_BR-BRZ__P Parameter: Treatment Value: 1uM BRZ vs. No Treatment
  misc_feature: MA Experiment ID: 20000527 Result: Down-regulated in Transcription
  misc_feature: MA Experiment 20000527 PARAMETER Experiment Name: At_10percent_PEG_P Parameter: Age (day) Value: 20
  misc_feature: MA Experiment 20000527 PARAMETER Experiment Name: At_10percent_PEG_P Parameter: Organism Value: A. thaliana
  misc_feature: MA Experiment 20000527 PARAMETER Experiment Name: At_10percent_PEG_P Parameter: Plant Line Value: WS
  misc_feature: MA Experiment 20000527 PARAMETER Experiment Name: At_10percent_PEG_P Parameter: Timepoint (day) Value: 20
  misc_feature: MA Experiment 20000527 PARAMETER Experiment Name: At_10percent_PEG_P Parameter: Tissue Value: Whole Plant
  misc_feature: MA Experiment 20000527 PARAMETER Experiment Name: At_10percent_PEG_P Parameter: Treatment Value: 10percent PEG vs. No Treatment
  misc_feature: MA Experiment ID: 20001560 Result: Up-regulated in Transcription
  misc_feature: MA Experiment 20001560 PARAMETER Experiment Name: At_Drought_Soil_Dry_P Parameter: Age (day) Value: 28
  misc_feature: MA Experiment 20001560 PARAMETER Experiment Name: At_Drought_Soil_Dry_P Parameter: Organism Value: A. thaliana
  misc_feature: MA Experiment 20001560 PARAMETER Experiment Name: At_Drought_Soil_Dry_P Parameter: Plant Line Value: WS
  misc_feature: MA Experiment 20001560 PARAMETER Experiment Name: At_Drought_Soil_Dry_P Parameter: Post Timepoint (hr) Value: None
  misc_feature: MA Experiment 20001560 PARAMETER Experiment Name: At_Drought_Soil_Dry_P Parameter: Post-Treatment Value: None
  misc_feature: MA Experiment 20001560 PARAMETER Experiment Name: At_Drought_Soil_Dry_P Parameter: Timepoint (day) Value: 14
  misc_feature: MA Experiment 20001560 PARAMETER Experiment Name: At_Drought_Soil_Dry_P Parameter: Treatment Value: Drought vs. No Drought
  misc_feature: MA Experiment ID: 20001771 Result: Up-regulated in Transcription
  misc_feature: MA Experiment 20001771 PARAMETER Experiment Name: At_Far-red-enriched-adult_P Parameter: Age (day) Value: 28
  misc_feature: MA Experiment 20001771 PARAMETER Experiment Name: At_Far-red-enriched-adult_P Parameter: Light Value: Far-red enriched vs. White
  misc_feature: MA Experiment 20001771 PARAMETER Experiment Name: At_Far-red-enriched-adult_P Parameter: Organism Value: A. thaliana
  misc_feature: MA Experiment 20001771 PARAMETER Experiment Name: At_Far-red-enriched-adult_P Parameter: Plant Line Value: Columbia
  misc_feature: MA Experiment 20001771 PARAMETER Experiment Name: At_Far-red-enriched-adult_P Parameter: Timepoint (hr) Value: 16
  misc_feature: MA Experiment 20001771 PARAMETER Experiment Name: At_Far-red-enriched-adult_P Parameter: Tissue Value: Aerial
  misc_feature: MA Experiment ID: 20001773 Result: Up-regulated in Transcription
  misc_feature: MA Experiment 20001773 PARAMETER Experiment Name: At_Far-red-enriched-adult_P Parameter: Age (day) Value: 30
  misc_feature: MA Experiment 20001773 PARAMETER Experiment Name: At_Far-red-enriched-adult_P Parameter: Light Value: Far-red enriched vs. White
  misc_feature: MA Experiment 20001773 PARAMETER Experiment Name: At_Far-red-enriched-adult_P Parameter: Organism Value: A. thaliana
  misc_feature: MA Experiment 20001773 PARAMETER Experiment Name: At_Far-red-enriched-adult_P Parameter: Plant Line Value: Columbia
  misc_feature: MA Experiment 20001773 PARAMETER Experiment Name: At_Far-red-enriched-adult_P Parameter: Timepoint (hr) Value: 48
  misc_feature: MA Experiment 20001773 PARAMETER Experiment Name: At_Far-red-enriched-adult_P Parameter: Tissue Value: Aerial
  misc_feature: MA Experiment ID: 20001910 Result: Down-regulated in Transcription
  misc_feature: MA Experiment 20001910 PARAMETER Experiment Name: At_Drought_Reproduction_P Parameter: Age (day) Value: 37
  misc_feature: MA Experiment 20001910 PARAMETER Experiment Name: At_Drought_Reproduction_P Parameter: Organism Value: A. thaliana
  misc_feature: MA Experiment 20001910 PARAMETER Experiment Name: At_Drought_Reproduction_P Parameter: Plant Line Value: WS
  misc_feature: MA Experiment 20001910 PARAMETER Experiment Name: At_Drought_Reproduction_P Parameter: Timepoint (day) Value: 7
  misc_feature: MA Experiment 20001910 PARAMETER Experiment Name: At_Drought_Reproduction_P Parameter: Tissue Value: Flowers
  misc_feature: MA Experiment 20001910 PARAMETER Experiment Name: At_Drought_Reproduction_P Parameter: Treatment Value: Drought vs. No Drought
tggttatataacactaatcaggagtgaaatttcatccacaaaaattccttataaattcacgaccaaacacacacatttctttaattccataaaaacaaaaacaaaaatataatgtggacttctaaaaccataagcttcactctcttcatcacaacaacacttctcgggtcctgcaacgcatctgcaaaggccaaaacgcaaccgctattcccagcgattctaatctttggtgattcaacagtcgacacaggcaacaataattacccttcacaaacaatcttcagagctaaacatgttccttacggaattgatctcccaaaccactcacctaacggaagattctcaaacgggaaaattttctccgacataatcgcaaccaaactcaacatcaaacagtttgttcctcctttcttacaaccaaatctcaccgaccaagaaattgtaaccggagtctgtttcgcatcagcaggtgccggttacgatgaccaaaccagtctcacgacacaagcgattcgtgtctcggaacaaccaaatatgttcaagagttacattgctcgtcttaagagtatcgtaggagacaagaaagccatgaagatcataaacaatgctttggtggttgtgagtgcagggcctaatgatttcatcttgaattattacgaggttccctcatggcgtcgcatgtatcctagcatttctgattaccaagattttgttcttagtaggcttaacaatttcgtgaaggagctttacagcctaggttgccggaaaattttggtcggaggtttaccgccaatgggatgtttaccgattcaaatgactgctcaattccgcaacgtcctaaggttttgcttggaacaagagaacagagactctgttttatacaatcagaaacttcagaagctcttacctcagacacaagcatctcttacaggaagcaagatcctttactctgatgtctatgaccctatgatggagatgctccaaaaccctagcaaatacggatttaaagagacgacgagaggatgttgtggaacagggttcttggagacgagcttcatgtgtaatgcttattcttccatgtgtcagaatcgctcggagtttctgttctttgactcgattcatccatctgaagctacctacaattacattggtaatgttctggatactaagattcgtgggtggcttaaggcttaagttatcaagatttgcaaagattgaacaaaattatctgtttcataatgtgactatttgtggacttcgtttgtttatcaactattaactttggctctt

SEQ ID NO: 103843 - protein, 360 aa, Arabidopsis thaliana
  peptide (1)..(360): Ceres Seq. ID no. 13613698
  misc_feature (36)..(350): Pfam Name: GDSL-like Lipase/Acylhydrolase Pfam Description: GDSL-like Lipase/Acylhydrolase
  misc_feature (1)..(360): Homolog of NCBI NO: 15217963 NR Description: GDSL-motif lipase/hydrolase protein [Arabidopsis
  misc_feature (1)..(360): Homolog of NCBI NO: 25336283 NR Description: hypothetical protein RXF26 [imported] -
  misc_feature (1)..(360): Homolog of NCBI NO: 21592974 NR Description: proline-rich protein, putative [Arabidopsis
  misc_feature (1)..(360): Homolog of NCBI NO: 15225096 NR Description: GDSL-motif lipase/hydrolase protein [Arabidopsis
  misc_feature (1)..(360): Homolog of NCBI NO: 21537117 NR Description: putative GDSL-motif lipase/hydrolase [Arabidopsis
  misc_feature (1)..(301): Homolog of NCBI NO: 15224162 NR Description: GDSL-motif lipase/hydrolase protein [Arabidopsis
  misc_feature (1)..(360): Homolog of NCBI NO: 15227734 NR Description: GDSL-motif lipase/hydrolase protein [Arabidopsis
  misc_feature (1)..(359): Homolog of NCBI NO: 15227723 NR Description: GDSL-motif lipase/hydrolase protein [Arabidopsis
  misc_feature (153)..(360): Homolog of NCBI NO: 25336273 NR Description: probable GDSL-motif lipase/hydrolase [imported] -
  misc_feature (1)..(143): Homolog of NCBI NO: 25336273 NR Description: probable GDSL-motif lipase/hydrolase [imported] -
MWTSKTISFTLFITTTLLGSCNASAKAKTQPLFPAILIFGDSTVDTGNNNYPSQTIFRAKHVPYGIDLPNHSPNGRFSNGKIFSDIIATKLNIKQFVPPFLQPNLTDQEIVTGVCFASAGAGYDDQTSLTTQAIRVSEQPNMFKSYIARLKSIVGDKKAMKIINNALVVVSAGPNDFILNYYEVPSWRRMYPSISDYQDFVLSRLNNFVKELYSLGCRKILVGGLPPMGCLPIQMTAQFRNVLRFCLEQENRDSVLYNQKLQKLLPQTQASLTGSKILYSDVYDPMMEMLQNPSKYGFKETTRGCCGTGFLETSFMCNAYSSMCQNRSEFLFFDSIHPSEATYNYIGNVLDTKIRGWLKA

SEQ ID NO: 103844 - protein, 219 aa, Arabidopsis thaliana
  peptide (1)..(219): Ceres Seq. ID no. 13613699
  misc_feature (1)..(209): Pfam Name: GDSL-like Lipase/Acylhydrolase Pfam Description: GDSL-like Lipase/Acylhydrolase
  misc_feature (1)..(219): Homolog of NCBI NO: 15217963 NR Description: GDSL-motif lipase/hydrolase protein [Arabidopsis
  misc_feature (1)..(219): Homolog of NCBI NO: 25336283 NR Description: hypothetical protein RXF26 [imported] -
  misc_feature (1)..(219): Homolog of NCBI NO: 21592974 NR Description: proline-rich protein, putative [Arabidopsis
  misc_feature (1)..(219): Homolog of NCBI NO: 15225096 NR Description: GDSL-motif lipase/hydrolase protein [Arabidopsis
  misc_feature (1)..(219): Homolog of NCBI NO: 21537117 NR Description: putative GDSL-motif lipase/hydrolase [Arabidopsis
  misc_feature (1)..(160): Homolog of NCBI NO: 15224162 NR Description: GDSL-motif lipase/hydrolase protein [Arabidopsis
  misc_feature (1)..(219): Homolog of NCBI NO: 15227734 NR Description: GDSL-motif lipase/hydrolase protein [Arabidopsis
  misc_feature (1)..(218): Homolog of NCBI NO: 15227723 NR Description: GDSL-motif lipase/hydrolase protein [Arabidopsis
  misc_feature (12)..(219): Homolog of NCBI NO: 25336273 NR Description: probable GDSL-motif lipase/hydrolase [imported] -
  misc_feature (1)..(219): Homolog of NCBI NO: 18402700 NR Description: GDSL-motif lipase/hydrolase protein [Arabidopsis
MFKSYIARLKSIVGDKKAMKIINNALVVVSAGPNDFILNYYEVPSWRRMYPSISDYQDFVLSRLNNFVKELYSLGCRKILVGGLPPMGCLPIQMTAQFRNVLRFCLEQENRDSVLYNQKLQKLLPQTQASLTGSKILYSDVYDPMMEMLQNPSKYGFKETTRGCCGTGFLETSFMCNAYSSMCQNRSEFLFFDSIHPSEATYNYIGNVLDTKIRGWLKA

SEQ ID NO: 103845 - protein, 201 aa, Arabidopsis thaliana
  peptide (1)..(201): Ceres Seq. ID no. 13613700
  misc_feature (1)..(191): Pfam Name: GDSL-like Lipase/Acylhydrolase Pfam Description: GDSL-like Lipase/Acylhydrolase
  misc_feature (1)..(201): Homolog of NCBI NO: 15217963 NR Description: GDSL-motif lipase/hydrolase protein [Arabidopsis
  misc_feature (1)..(201): Homolog of NCBI NO: 25336283 NR Description: hypothetical protein RXF26 [imported] -
  misc_feature (1)..(201): Homolog of NCBI NO: 21592974 NR Description: proline-rich protein, putative [Arabidopsis
  misc_feature (1)..(201): Homolog of NCBI NO: 15225096 NR Description: GDSL-motif lipase/hydrolase protein [Arabidopsis
  misc_feature (1)..(201): Homolog of NCBI NO: 21537117 NR Description: putative GDSL-motif lipase/hydrolase [Arabidopsis
  misc_feature (1)..(142): Homolog of NCBI NO: 15224162 NR Description: GDSL-motif lipase/hydrolase protein [Arabidopsis
  misc_feature (1)..(201): Homolog of NCBI NO: 15227734 NR Description: GDSL-motif lipase/hydrolase protein [Arabidopsis
  misc_feature (1)..(200): Homolog of NCBI NO: 15227723 NR Description: GDSL-motif lipase/hydrolase protein [Arabidopsis
  misc_feature (1)..(201): Homolog of NCBI NO: 25336273 NR Description: probable GDSL-motif lipase/hydrolase [imported] -
  misc_feature (1)..(201): Homolog of NCBI NO: 18402700 NR Description: GDSL-motif lipase/hydrolase protein [Arabidopsis
MKIINNALVVVSAGPNDFILNYYEVPSWRRMYPSISDYQDFVLSRLNNFVKELYSLGCRKILVGGLPPMGCLPIQMTAQFRNVLRFCLEQENRDSVLYNQKLQKLLPQTQASLTGSKILYSDVYDPMMEMLQNPSKYGFKETTRGCCGTGFLETSFMCNAYSSMCQNRSEFLFFDSIHPSEATYNYIGNVLDTKIRGWLKA

SEQ ID NO: 103846 - DNA, 1747 bp, Arabidopsis thaliana
  misc_feature (1)..(1747): Ceres Seq. ID no. 13613701
  misc_feature: MA Experiment ID: 20000179 Result: Up-regulated in Transcription
  misc_feature: MA Experiment 20000179 PARAMETER Experiment Name: At_Germinating_Seeds_P Parameter: Age (hr) Value: 6 vs. 0
  misc_feature: MA Experiment 20000179 PARAMETER Experiment Name: At_Germinating_Seeds_P Parameter: Tissue Value: Germinating Seeds
  misc_feature: MA Experiment ID: 20001556 Result: Down-regulated in Transcription
  misc_feature: MA Experiment 20001556 PARAMETER Experiment Name: At_Drought_Soil_Dry_P Parameter: Age (day) Value: 26
  misc_feature: MA Experiment 20001556 PARAMETER Experiment Name: At_Drought_Soil_Dry_P Parameter: Organism Value: A. thaliana
  misc_feature: MA Experiment 20001556 PARAMETER Experiment Name: At_Drought_Soil_Dry_P Parameter: Plant Line Value: WS
  misc_feature: MA Experiment 20001556 PARAMETER Experiment Name: At_Drought_Soil_Dry_P Parameter: Post Timepoint (hr) Value: None
  misc_feature: MA Experiment 20001556 PARAMETER Experiment Name: At_Drought_Soil_Dry_P Parameter: Post-Treatment Value: None
  misc_feature: MA Experiment 20001556 PARAMETER Experiment Name: At_Drought_Soil_Dry_P Parameter: Timepoint (day) Value: 12
  misc_feature: MA Experiment 20001556 PARAMETER Experiment Name: At_Drought_Soil_Dry_P Parameter: Treatment Value: Drought vs. No Drought
gcacaaagcaaaaaaatctctgtaaaagcagaacgataatggagtcacaattatggaattggatcttacctcttttgatctcttctctcctcatctccttcgtcgctttctatggattcttcgtcaaaccgaagcggaacggtctccgtcacgatcggaaaactgtttctaccgtcacctccgacgtcggatctgttaatattaccggagatactgtcgctgatgtcattgttgttggagctggtgttgctggttctgctcttgcttatactcttggaaaggataaacgccgagttcatgtgattgaaagagatttatcggagcctgatcgtattgttggggagttgttacagcctgggggttacctcaagttactggagttgggaattgaagattgtgtggaagaaatagatgctcagcgtgtgtatggttatgcactttttaaaaatgggaaacgcattcgcttagcttatcctttggagaagtttcacgaagatgtatctggaaggagctttcacaatggacgttttattcaaagaatgcgggagaaagctgcttcacttcccaatgttcagctagagcaaggaacagttctttctcttctagaagagaatgggactatcaaaggtgtgagatataagaataaagcaggagaggaacaaaccgcatttgcagctttgactatagtttgtgatggttgtttctcaaacctgcgtcgctctttgtgcaatcctcaggtcgaggtgccttcttgttttgtcgggttggtcctagagaactgcaatctcccatatgcaaaccatggacatgtcgtcttagcagatccatcaccaattttgatgtatccaattagtagcacagaggtgcggtgcctagttgatgttcccggccagaaagtgccgtccattgcaaatggtgaaatgaaaaactatttgaagactgttgtggctcctcagatgcctcatgaggtctatgactctttcattgctgcggttgataaaggaaatattaagtccatgccaaacagaagcatgccagcttctccttatcctactccaggggctctgttaatgggagatgcatttaacatgcgtcatcctttgacgggtggaggaatgacggttgcattagctgacattgttgtcctgcgtaatctccttagaccgctgcgtgatcttagtgacggcgctagtctctgcaaatatcttgaatcattttacactctgcgaaagccagttgcagcaacaatcaacacccttgcgaatgctctttaccaagtgttctgttcatcagaaaatgaagcaagaaacgagatgagggaagcttgcttcgattatctgggcctcgggggtatgtgcacaagtggaccagtatctttgctttcgggtttgaaccctcgaccattaacacttgtctgccatttctttgcggttgcggtttatggagtcatacggttgttaatcccattcccttccccaaaacgaatctggcttggagccaaattaatctcgggagcatcggggataatatttccgataataaaagcggaaggagttaggcagatgtttttcccagcaactgtacctgcatactactacaaagctcctacagttggagaaaccaaatgttcatagttccaaataattctgtcacgagaaatgccatacaaaagaaaatgaaagttgtggattgcatttggtgtgtttgttgtgtaagtgttctttaaacgtataaaagtgatgatact

SEQ ID NO: 103847 - protein, 543 aa, Arabidopsis thaliana; identical to SEQ ID NO: 27102
  peptide (1)..(543): Ceres Seq. ID no. 13613702
  misc_feature (223)..(421): Pfam Name: Monooxygenase Pfam Description: Monooxygenase
  misc_feature (13)..(543): Homolog of NCBI NO: 18406296 NR Description: squalene monooxygenase (squalene epoxidase) (SE), [Arabidopsis thaliana] >gi|25455713|pir||T52462 hypothetical
  misc_feature (13)..(543): Homolog of NCBI NO: 25404216 NR Description: probable squalene monooxygenase F9K23.3 - Arabidopsis thaliana >gi|12321049|gb|AAG50645.1|AC082643_9
  misc_feature (17)..(537): Homolog of NCBI NO: 27475610 NR Description: squalene monooxygenase 2 [Medicago truncatula]
  misc_feature (26)..(535): Homolog of NCBI NO: 27475612 NR Description: squalene monooxygenase 1 [Medicago truncatula]
  misc_feature (69)..(543): Homolog of NCBI NO: 27311241 NR Description: Putative Squalene monooxygenase [Oryza sativa
  misc_feature (24)..(537): Homolog of NCBI NO: 6685403 NR Description: Squalene monooxygenase (Squalene epoxidase) (SE)
  misc_feature (40)..(535): Homolog of NCBI NO: 27311240 NR Description: Putative Squalene monooxygenase [Oryza sativa
  misc_feature (24)..(536): Homolog of NCBI NO: 18420113 NR Description: squalene monooxygenase (squalene epoxidase) (SE), [Arabidopsis thaliana] >gi|18086577|gb|AAL57712.1| [Arabidopsis thaliana] >gi|24111375|gb|AAN46811.1|
  misc_feature (24)..(536): Homolog of NCBI NO: 21537043 NR Description: squalene epoxidase-like protein [Arabidopsis
  misc_feature (22)..(535): Homolog of NCBI NO: 15227757 NR Description: squalene monooxygenase (squalene epoxidase) (SE), [Arabidopsis thaliana] >gi|25412143|pir||D84617 probable squalene

SEQ ID NO: 103848 - protein, 531 aa, Arabidopsis thaliana; identical to SEQ ID NO: 27103
  peptide (1)..(531): Ceres Seq. ID no. 13613703
  misc_feature (211)..(409): Pfam Name: Monooxygenase Pfam Description: Monooxygenase
  misc_feature (1)..(531): Homolog of NCBI NO: 18406296 NR Description: squalene monooxygenase (squalene epoxidase) (SE), [Arabidopsis thaliana] >gi|25455713|pir||T52462 hypothetical
  misc_feature (1)..(531): Homolog of NCBI NO: 25404216 NR Description: probable squalene monooxygenase F9K23.3 - Arabidopsis thaliana >gi|12321049|gb|AAG50645.1|AC082643_9
  misc_feature (5)..(525): Homolog of NCBI NO: 27475610 NR Description: squalene monooxygenase 2 [Medicago truncatula]
  misc_feature (14)..(523): Homolog of NCBI NO: 27475612 NR Description: squalene monooxygenase 1 [Medicago truncatula]
  misc_feature (57)..(531): Homolog of NCBI NO: 27311241 NR Description: Putative Squalene monooxygenase [Oryza sativa
  misc_feature (12)..(525): Homolog of NCBI NO: 6685403 NR Description: Squalene monooxygenase (Squalene epoxidase) (SE)
  misc_feature (28)..(523): Homolog of NCBI NO: 27311240 NR Description: Putative Squalene monooxygenase [Oryza sativa
  misc_feature (12)..(524): Homolog of NCBI NO: 18420113 NR Description: squalene monooxygenase (squalene epoxidase) (SE), [Arabidopsis thaliana] >gi|18086577|gb|AAL57712.1| [Arabidopsis thaliana] >gi|24111375|gb|AAN46811.1|
  misc_feature (12)..(524): Homolog of NCBI NO: 21537043 NR Description: squalene epoxidase-like protein [Arabidopsis
  misc_feature (10)..(523): Homolog of NCBI NO: 15227757 NR Description: squalene monooxygenase (squalene epoxidase) (SE), [Arabidopsis thaliana] >gi|25412143|pir||D84617 probable squalene

SEQ ID NO: 103849 - protein, 364 aa, Arabidopsis thaliana; identical to SEQ ID NO: 27104
  peptide (1)..(364): Ceres Seq. ID no. 13613704
  misc_feature (44)..(242): Pfam Name: Monooxygenase Pfam Description: Monooxygenase
  misc_feature (1)..(364): Homolog of NCBI NO: 18406296 NR Description: squalene monooxygenase (squalene epoxidase) (SE), [Arabidopsis thaliana] >gi|25455713|pir||T52462 hypothetical
  misc_feature (1)..(364): Homolog of NCBI NO: 25404216 NR Description: probable squalene monooxygenase F9K23.3 - Arabidopsis thaliana >gi|12321049|gb|AAG50645.1|AC082643_9
  misc_feature (1)..(358): Homolog of NCBI NO: 27475610 NR Description: squalene monooxygenase 2 [Medicago truncatula]
  misc_feature (1)..(356): Homolog of NCBI NO: 27475612 NR Description: squalene monooxygenase 1 [Medicago truncatula]
  misc_feature (1)..(364): Homolog of NCBI NO: 27311241 NR Description: Putative Squalene monooxygenase [Oryza sativa
  misc_feature (1)..(358): Homolog of NCBI NO: 6685403 NR Description: Squalene monooxygenase (Squalene epoxidase) (SE)
  misc_feature (1)..(356): Homolog of NCBI NO: 27311240 NR Description: Putative Squalene monooxygenase [Oryza sativa
  misc_feature (1)..(357): Homolog of NCBI NO: 18420113 NR Description: squalene monooxygenase (squalene epoxidase) (SE), [Arabidopsis thaliana] >gi|18086577|gb|AAL57712.1| [Arabidopsis thaliana] >gi|24111375|gb|AAN46811.1|
  misc_feature (1)..(357): Homolog of NCBI NO: 21537043 NR Description: squalene epoxidase-like protein [Arabidopsis
  misc_feature (1)..(356): Homolog of NCBI NO: 15227757 NR Description: squalene monooxygenase (squalene epoxidase) (SE), [Arabidopsis thaliana] >gi|25412143|pir||D84617 probable squalene

SEQ ID NO: 103850 - DNA, 1437 bp, Arabidopsis thaliana
  misc_feature (1)..(1437): Ceres Seq. ID no. 13613709
  misc_feature: MA Experiment ID: 108462 Result: Down-regulated in Transcription
  misc_feature: MA Experiment 108462 PARAMETER Experiment Name: At_Germinating_Seeds_cDNA_P Parameter: Age (day) Value: 2 vs. 0
  misc_feature: MA Experiment 108462 PARAMETER Experiment Name: At_Germinating_Seeds_cDNA_P Parameter: Tissue Value: Germinating Seeds
  misc_feature: MA Experiment ID: 108463 Result: Down-regulated in Transcription
  misc_feature: MA Experiment 108463 PARAMETER Experiment Name: At_Germinating_Seeds_cDNA_P Parameter: Age (day) Value: 3 vs. 0
  misc_feature: MA Experiment 108463 PARAMETER Experiment Name: At_Germinating_Seeds_cDNA_P Parameter: Tissue Value: Germinating Seeds
  misc_feature: MA Experiment ID: 108464 Result: Down-regulated in Transcription
  misc_feature: MA Experiment 108464 PARAMETER Experiment Name: At_Germinating_Seeds_cDNA_P Parameter: Age (day) Value: 4 vs. 0
  misc_feature: MA Experiment 108464 PARAMETER Experiment Name: At_Germinating_Seeds_cDNA_P Parameter: Tissue Value: Germinating Seeds
  misc_feature: MA Experiment ID: 20000087 Result: Down-regulated in Transcription
  misc_feature: MA Experiment 20000087 PARAMETER Experiment Name: At_100uM_ABA_Mutants_cDNA_P Parameter: Plant Line Value: WS
  misc_feature: MA Experiment 20000087 PARAMETER Experiment Name: At_100uM_ABA_Mutants_cDNA_P Parameter: Timepoint (hr) Value: 6
  misc_feature: MA Experiment 20000087 PARAMETER Experiment Name: At_100uM_ABA_Mutants_cDNA_P Parameter: Tissue Value: Aerial
  misc_feature: MA Experiment 20000087 PARAMETER Experiment Name: At_100uM_ABA_Mutants_cDNA_P Parameter: Treatment Value: 100uM ABA vs. No Treatment
  misc_feature: MA Experiment ID: 20001557 Result: Up-regulated in Transcription
  misc_feature: MA Experiment 20001557 PARAMETER Experiment Name: At_Drought_Soil_Dry_P Parameter: Age (day) Value: 27
  misc_feature: MA Experiment 20001557 PARAMETER Experiment Name: At_Drought_Soil_Dry_P Parameter: Organism Value: A. thaliana
  misc_feature: MA Experiment 20001557 PARAMETER Experiment Name: At_Drought_Soil_Dry_P Parameter: Plant Line Value: WS
  misc_feature: MA Experiment 20001557 PARAMETER Experiment Name: At_Drought_Soil_Dry_P Parameter: Post Timepoint (hr) Value: 3
  misc_feature: MA Experiment 20001557 PARAMETER Experiment Name: At_Drought_Soil_Dry_P Parameter: Post-Treatment Value: Re-Water vs. No Drought
  misc_feature: MA Experiment 20001557 PARAMETER Experiment Name: At_Drought_Soil_Dry_P Parameter: Timepoint (day) Value: 13
  misc_feature: MA Experiment 20001557 PARAMETER Experiment Name: At_Drought_Soil_Dry_P Parameter: Treatment Value: Drought vs. No Drought
ttcattcatgtctctatccaaatctatctggtaactcaaaatcatcacttcttctactcaacaatttcacaatcccatccccaattttacaatccctagatctccctccctcttcaattcgctgtagttttcatggaccttgttcgattgagagacataggttcaatttcacctcagagaagaaggaaatggctgattctattagcggttttcggtgtttcgggttacggagtttacagggtttacaattctcaatacatcgctaagaagacgaagcgtcttatgaaactcttctcaggcattgtttcattcgccgaaatggtcatcgattccgcggagacgataagtatcgtttctcgagatttgaaagagtttctcgaatcaaattcccacgaaatccctaatagcttgaaacagctatcgaaaatcaccaaatcaaaagagttcactgattctctagctagggtttctgaagctgtagcgattggtgttttccgtgggtataattccgatccaaacgtcgaaaaagaatcgaatttgagtgtagttgatagagttttctcagaggaaggagctggttttgtttctgttgttgttggtagttttgctaagaatcttgttcttggattttactctggtgagattgagattggtagtgatgattctttaaaacctagatggatgaatttgcttagtgatgataagtgtagagagcttttagcagattgtattgagagattcactagctcagctgtatcggtgtatatcgataaaacggttggtgttaatacttatgatcagatattcgctggtttgacgaatccgaaacatcgagatagtgctcgagatgttcttgtttcggtttgtaatggagctcttgagacgttcatgagaacttctcatgatgtcttcacatcttcaggagagaaaaccgattcctccttgaggaagtcggagaatcgagaaaacggatgggcagaggcgctttcgactactttagcagtgccgagtaataggaagttcatgtttgatgttacgggaagagtgacgctagagacgatgagatcaattcttgagtttgtaatcttgaaaacgtcacaaagttttaagaggagtttggatgtgattcatgaagaagttacagagagaggacgtcaagtagttggatacgttggtgccaaatcttcagtgataatcactgtttgtcttgcggtttactttcacatctttaaccgctttgttcgaggccctccggtttgtttaagccagcaattctagttaatcggatcgatctattagcttgttagagttgttagggacattagatcttcagccttccatattcttattggtaagttggagctgaatagcgtagtagagtcttagcagtgttatgtacccacatattcattattgtttatttatagaggattcttg

SEQ ID NO: 103851 - protein, 381 aa, Arabidopsis thaliana; identical to SEQ ID NO: 42684
  peptide (1)..(381): Ceres Seq. ID no. 13613710
  misc_feature (1)..(381): Homolog of NCBI NO: 18406365 NR Description: expressed protein [Arabidopsis thaliana]
  misc_feature (1)..(374): Homolog of NCBI NO: 14475940 NR Description: unknown protein [Arabidopsis thaliana]
  misc_feature (1)..(381): Homolog of NCBI NO: 21553547 NR Description: unknown [Arabidopsis thaliana]
  misc_feature (1)..(284): Homolog of NCBI NO: 18391117 NR Description: expressed protein [Arabidopsis thaliana]
  misc_feature (258)..(381): Homolog of NCBI NO: 18391117 NR Description: expressed protein [Arabidopsis thaliana]
  misc_feature (1)..(284): Homolog of NCBI NO: 21554418 NR Description: unknown [Arabidopsis thaliana]
  misc_feature (258)..(381): Homolog of NCBI NO: 21554418 NR Description: unknown [Arabidopsis thaliana]
  misc_feature (16)..(365): Homolog of NCBI NO: 15229610 NR Description: expressed protein [Arabidopsis thaliana]
  misc_feature (16)..(367): Homolog of NCBI NO: 40539064 NR Description: expressed protein [Oryza sativa (japonica
  misc_feature (15)..(367): Homolog of NCBI NO: 22093613 NR Description: hypothetical protein~similar to Arabidopsis

SEQ ID NO: 103852 - protein, 331 aa, Arabidopsis thaliana; identical to SEQ ID NO: 42685
  peptide (1)..(331): Ceres Seq. ID no. 13613711
  misc_feature (1)..(331): Homolog of NCBI NO: 18406365 NR Description: expressed protein [Arabidopsis thaliana]
  misc_feature (1)..(324): Homolog of NCBI NO: 14475940 NR Description: unknown protein [Arabidopsis thaliana]
  misc_feature (1)..(331): Homolog of NCBI NO: 21553547 NR Description: unknown [Arabidopsis thaliana]
  misc_feature (1)..(234): Homolog of NCBI NO: 18391117 NR Description: expressed protein [Arabidopsis thaliana]
  misc_feature (208)..(331): Homolog of NCBI NO: 18391117 NR Description: expressed protein [Arabidopsis thaliana]
  misc_feature (1)..(234): Homolog of NCBI NO: 21554418 NR Description: unknown [Arabidopsis thaliana]
  misc_feature (208)..(331): Homolog of NCBI NO: 21554418 NR Description: unknown [Arabidopsis thaliana]
  misc_feature (1)..(315): Homolog of NCBI NO: 15229610 NR Description: expressed protein [Arabidopsis thaliana]
  misc_feature (1)..(317): Homolog of NCBI NO: 40539064 NR Description: expressed protein [Oryza sativa (japonica
  misc_feature (1)..(317): Homolog of NCBI NO: 22093613 NR Description: hypothetical protein~similar to Arabidopsis

SEQ ID NO: 103853 - protein, 319 aa, Arabidopsis thaliana; identical to SEQ ID NO: 42686
  peptide (1)..(319): Ceres Seq. ID no. 13613712
  misc_feature (1)..(319): Homolog of NCBI NO: 18406365 NR Description: expressed protein [Arabidopsis thaliana]
  misc_feature (1)..(312): Homolog of NCBI NO: 14475940 NR Description: unknown protein [Arabidopsis thaliana]
  misc_feature (1)..(319): Homolog of NCBI NO: 21553547 NR Description: unknown [Arabidopsis thaliana]
  misc_feature (1)..(222): Homolog of NCBI NO: 18391117 NR Description: expressed protein [Arabidopsis thaliana]
  misc_feature (196)..(319): Homolog of NCBI NO: 18391117 NR Description: expressed protein [Arabidopsis thaliana]
  misc_feature (1)..(222): Homolog of NCBI NO: 21554418 NR Description: unknown [Arabidopsis thaliana]
  misc_feature (196)..(319): Homolog of NCBI NO: 21554418 NR Description: unknown [Arabidopsis thaliana]
  misc_feature (1)..(303): Homolog of NCBI NO: 15229610 NR Description: expressed protein [Arabidopsis thaliana]
  misc_feature (1)..(305): Homolog of NCBI NO: 40539064 NR Description: expressed protein [Oryza sativa (japonica
  misc_feature (1)..(305): Homolog of NCBI NO: 22093613 NR Description: hypothetical protein~similar to Arabidopsis

SEQ ID NO: 103854 - DNA, 1564 bp, Arabidopsis thaliana
  misc_feature (1)..(1564): Ceres Seq. ID no. 13613723
  misc_feature: MA Experiment ID: 108461 Result: Down-regulated in Transcription
  misc_feature: MA Experiment 108461 PARAMETER Experiment Name: At_Germinating_Seeds_cDNA_P Parameter: Age (day) Value: 1 vs. 0
  misc_feature: MA Experiment 108461 PARAMETER Experiment Name: At_Germinating_Seeds_cDNA_P Parameter: Tissue Value: Germinating Seeds
  misc_feature: MA Experiment ID: 108464 Result: Down-regulated in Transcription
  misc_feature: MA Experiment 108464 PARAMETER Experiment Name: At_Germinating_Seeds_cDNA_P Parameter: Age (day) Value: 4 vs. 0
  misc_feature: MA Experiment 108464 PARAMETER Experiment Name: At_Germinating_Seeds_cDNA_P Parameter: Tissue Value: Germinating Seeds
  misc_feature: MA Experiment ID: 108668 Result: Up-regulated in Transcription
  misc_feature: MA Experiment 108668 PARAMETER Experiment Name: At_2mM_SA_cDNA_P Parameter: Plant Line Value: WS
  misc_feature: MA Experiment 108668 PARAMETER Experiment Name: At_2mM_SA_cDNA_P Parameter: Timepoint (hr) Value: 6
  misc_feature: MA Experiment 108668 PARAMETER Experiment Name: At_2mM_SA_cDNA_P Parameter: Treatment Value: 2mM SA vs. No Treatment
  misc_feature: MA Experiment ID: 20000179 Result: Down-regulated in Transcription
  misc_feature: MA Experiment 20000179 PARAMETER Experiment Name: At_Germinating_Seeds_P Parameter: Age (hr) Value: 6 vs. 0
  misc_feature: MA Experiment 20000179 PARAMETER Experiment Name: At_Germinating_Seeds_P Parameter: Tissue Value: Germinating Seeds
  misc_feature: MA Experiment ID: 20000180 Result: Down-regulated in Transcription
  misc_feature: MA Experiment 20000180 PARAMETER Experiment Name: At_Germinating_Seeds_P Parameter: Age (hr) Value: 24 vs. 0
  misc_feature: MA Experiment 20000180 PARAMETER Experiment Name: At_Germinating_Seeds_P Parameter: Tissue Value: Germinating Seeds
  misc_feature: MA Experiment ID: 20001755 Result: Down-regulated in Transcription
  misc_feature: MA Experiment 20001755 PARAMETER Experiment Name: At_50mM_NH4NO3_L-to-H_P Parameter: Timepoint (hr) Value: 2
  misc_feature: MA Experiment 20001755 PARAMETER Experiment Name: At_50mM_NH4NO3_L-to-H_P Parameter: Tissue Value: Leaf
  misc_feature: MA Experiment 20001755 PARAMETER Experiment Name: At_50mM_NH4NO3_L-to-H_P Parameter: Treatment Value: 50mM NH4NO3 vs 100mM Mannitol
aacgacaaattaattaaacttctccaaaactcttttcctctaaaaaatctcccaaatacagaaaaaaaaacaaagtcagtaagaaaaatggaagagagaaaagggaggagaataatcatgttccctcttccatttccagggcacttcaaccccatgatcgagctcgctggaatattccaccaccgtggcttctccgtgacgatcctccacacttcctacaacttccccgatccttctcgccacccacacttcacttttcgaaccatctctcacaacaaagaaggagaagaagatcctctgtctcagtcagaaacttcgagtatggacctaatcgttctcgttcgtcggctgaaacaacgctacgccgaaccgtttcgtaagtctgtggcggcggaagtaggtggaggagagacggtgtgttgtttggtctccgacgctatatgggggaagaacacggaggttgtagcggaagagattggagttcgtagggtggtgttgaggacaggtggtgcgtcgtcgttttgtgcttttgccgctttccctctccttagggataagggttacctccctatacaagattctagattagatgagccagtgacagagcttccacctttgaaagtgaaggatcttccggtaatggaaacgaatgagccggaggaactttaccgggtagttaacgacatggtggaaggagccaagtcttcttcaggagtcatatggaacacatttgaagatcttgaaagactatcacttatgaattgtagcagcaaattacaagttccatttttcccgatcggaccgtttcacaaatatagcgaagatcctacaccgaagacagagaacaaggaagataccgattggctcgacaagcaagacccacagtcggtggtctatgcgagtttcggaagccttgcagctatagaagagaaggagtttctcgagattgcttggggtctaagaaacagtgaacgaccgtttttgtgggtggttaggccggggtctgtcagggggaccgagtggctcgagtcattgcctttagggtttatggaaaacattggagataagggaaaaatcgtgaaatgggcgaatcagttagaggtattggcgcatcctgccattggagcgttttggacacattgtggatggaactcgacactagagagcatatgtgaaggtgttcctatgatatgtacgtcatgtttcacggaccagcatgtgaacgcgagatacatcgttgatgtatggcgagtcgggatgttgttagagagaagtaagatggaaaagaaggagattgaaaaggtgctaagaagtgtaatgatggagaagggagatggattgagggaaaggagtttgaagttgaaagagagagctgatttttgcttaagtaaagatgggtcttcttccaagtatttagacaaacttgtgagtcatgtcctgtcttttgattcttatgcttttgcaagttaagaaaacttatgaatgagtaacgtattctaagcactctccaaaagttccaaaaccattggatgttttgtttcttcaaataataatgttcttgagt

SEQ ID NO: 103855 - protein, 489 aa, Arabidopsis thaliana
  peptide (1)..(489): Ceres Seq. ID no. 13613724
  misc_feature (36)..(483): Pfam Name: UDP-glucoronosyl and UDP-glucosyl transferase Pfam Description: UDP-glucoronosyl and UDP-glucosyl transferase
  misc_feature (30)..(489): Homolog of NCBI NO: 15228174 NR Description: glycosyltransferase family [Arabidopsis thaliana]
  misc_feature (40)..(489): Homolog of NCBI NO: 21593451 NR Description: glucuronosyl transferase-like protein
  misc_feature (30)..(489): Homolog of NCBI NO: 15228176 NR Description: glucuronosyl transferase - like protein
  misc_feature (30)..(482): Homolog of NCBI NO: 15229731 NR Description: glycosyltransferase family [Arabidopsis thaliana]
  misc_feature (30)..(482): Homolog of NCBI NO: 26452976 NR Description: unknown protein [Arabidopsis thaliana]
  misc_feature (31)..(480): Homolog of NCBI NO: 15239257 NR Description: glucuronosyl transferase-related protein thaliana] >gi|15010632|gb|AAK73975.1| AT5g05860/MJJ3_28 thaliana] >gi|23505951|gb|AAN28835.1| At5g05860/MJJ3_28
  misc_feature (30)..(482): Homolog of NCBI NO: 15239259 NR Description: UDP-glycosyltransferase family [Arabidopsis
  misc_feature (20)..(481): Homolog of NCBI NO: 34900662 NR Description: glucuronosyl transferase-like protein [Oryza
  misc_feature (30)..(479): Homolog of NCBI NO: 15239258 NR Description: glucuronosyl transferase-related protein
  misc_feature (33)..(482): Homolog of NCBI NO: 34395172 NR Description: putative UDP-glucosyltransferase [Oryza sativa
NDKLIKLLQNSFPLKNLPNTEKKTKSVRKMEERKGRRIIMFPLPFPGHFNPMIELAGIFHHRGFSVTILHTSYNFPDPSRHPHFTFRTISHNKEGEEDPLSQSETSSMDLIVLVRRLKQRYAEPFRKSVAAEVGGGETVCCLVSDAIWGKNTEVVAEEIGVRRVVLRTGGASSFCAFAAFPLLRDKGYLPIQDSRLDEPVTELPPLKVKDLPVMETNEPEELYRVVNDMVEGAKSSSGVIWNTFEDLERLSLMNCSSKLQVPFFPIGPFHKYSEDPTPKTENKEDTDWLDKQDPQSVVYASFGSLAAIEEKEFLEIAWGLRNSERPFLWVVRPGSVRGTEWLESLPLGFMENIGDKGKIVKWANQLEVLAHPAIGAFWTHCGWNSTLESICEGVPMICTSCFTDQHVNARYIVDVWRVGMLLERSKMEKKEIEKVLRSVMMEKGDGLRERSLKLKERADFCLSKDGSSSKYLDKLVSHVLSFDSYAFAS

SEQ ID NO: 103856 - protein, 460 aa, Arabidopsis thaliana
  peptide (1)..(460): Ceres Seq. ID no. 13613725
  misc_feature (7)..(454): Pfam Name: UDP-glucoronosyl and UDP-glucosyl transferase Pfam Description: UDP-glucoronosyl and UDP-glucosyl transferase
  misc_feature (1)..(460): Homolog of NCBI NO: 15228174 NR Description: glycosyltransferase family [Arabidopsis thaliana]
  misc_feature (11)..(460): Homolog of NCBI NO: 21593451 NR Description: glucuronosyl transferase-like protein
  misc_feature (1)..(460): Homolog of NCBI NO: 15228176 NR Description: glucuronosyl transferase - like protein
  misc_feature (1)..(453): Homolog of NCBI NO: 15229731 NR Description: glycosyltransferase family [Arabidopsis thaliana]
  misc_feature (1)..(453): Homolog of NCBI NO: 26452976 NR Description: unknown protein [Arabidopsis thaliana]
  misc_feature (2)..(451): Homolog of NCBI NO: 15239257 NR Description: glucuronosyl transferase-related protein thaliana] >gi|15010632|gb|AAK73975.1| AT5g05860/MJJ3_28 thaliana] >gi|23505951|gb|AAN28835.1| At5g05860/MJJ3_28
  misc_feature (1)..(453): Homolog of NCBI NO: 15239259 NR Description: UDP-glycosyltransferase family [Arabidopsis
  misc_feature (1)..(452): Homolog of NCBI NO: 34900662 NR Description: glucuronosyl transferase-like protein [Oryza
  misc_feature (1)..(450): Homolog of NCBI NO: 15239258 NR Description: glucuronosyl transferase-related protein
  misc_feature (4)..(453): Homolog of NCBI NO: 34395172 NR Description: putative UDP-glucosyltransferase [Oryza sativa
MEERKGRRIIMFPLPFPGHFNPMIELAGIFHHRGFSVTILHTSYNFPDPSRHPHFTFRTISHNKEGEEDPLSQSETSSMDLIVLVRRLKQRYAEPFRKSVAAEVGGGETVCCLVSDAIWGKNTEVVAEEIGVRRVVLRTGGASSFCAFAAFPLLRDKGYLPIQDSRLDEPVTELPPLKVKDLPVMETNEPEELYRVVNDMVEGAKSSSGVIWNTFEDLERLSLMNCSSKLQVPFFPIGPFHKYSEDPTPKTENKEDTDWLDKQDPQSVVYASFGSLAAIEEKEFLEIAWGLRNSERPFLWVVRPGSVRGTEWLESLPLGFMENIGDKGKIVKWANQLEVLAHPAIGAFWTHCGWNSTLESICEGVPMICTSCFTDQHVNARYIVDVWRVGMLLERSKMEKKEIEKVLRSVMMEKGDGLRERSLKLKERADFCLSKDGSSSKYLDKLVSHVLSFDSYAFAS

SEQ ID NO: 103857 - protein, 450 aa, Arabidopsis thaliana
  peptide (1)..(450): Ceres Seq. ID no. 13613726
  misc_feature (1)..(444): Pfam Name: UDP-glucoronosyl and UDP-glucosyl transferase Pfam Description: UDP-glucoronosyl and UDP-glucosyl transferase
  misc_feature (1)..(450): Homolog of NCBI NO: 15228174 NR Description: glycosyltransferase family [Arabidopsis thaliana]
  misc_feature (1)..(450): Homolog of NCBI NO: 21593451 NR Description: glucuronosyl transferase-like protein
  misc_feature (1)..(450): Homolog of NCBI NO: 15228176 NR Description: glucuronosyl transferase - like protein
  misc_feature (1)..(443): Homolog of NCBI NO: 15229731 NR Description: glycosyltransferase family [Arabidopsis thaliana]
  misc_feature (1)..(443): Homolog of NCBI NO: 26452976 NR Description: unknown protein [Arabidopsis thaliana]
  misc_feature (1)..(441): Homolog of NCBI NO: 15239257 NR Description: glucuronosyl transferase-related protein thaliana] >gi|15010632|gb|AAK73975.1| AT5g05860/MJJ3_28 thaliana] >gi|23505951|gb|AAN28835.1| At5g05860/MJJ3_28
  misc_feature (1)..(443): Homolog of NCBI NO: 15239259 NR Description: UDP-glycosyltransferase family [Arabidopsis
  misc_feature (1)..(442): Homolog of NCBI NO: 34900662 NR Description: glucuronosyl transferase-like protein [Oryza
  misc_feature (1)..(440): Homolog of NCBI NO: 15239258 NR Description: glucuronosyl transferase-related protein
  misc_feature (1)..(443): Homolog of NCBI NO: 34395172 NR Description: putative UDP-glucosyltransferase [Oryza sativa
MFPLPFPGHFNPMIELAGIFHHRGFSVTILHTSYNFPDPSRHPHFTFRTISHNKEGEEDPLSQSETSSMDLIVLVRRLKQRYAEPFRKSVAAEVGGGETVCCLVSDAIWGKNTEVVAEEIGVRRVVLRTGGASSFCAFAAFPLLRDKGYLPIQDSRLDEPVTELPPLKVKDLPVMETNEPEELYRVVNDMVEGAKSSSGVIWNTFEDLERLSLMNCSSKLQVPFFPIGPFHKYSEDPTPKTENKEDTDWLDKQDPQSVVYASFGSLAAIEEKEFLEIAWGLRNSERPFLWVVRPGSVRGTEWLESLPLGFMENIGDKGKIVKWANQLEVLAHPAIGAFWTHCGWNSTLESICEGVPMICTSCFTDQHVNARYIVDVWRVGMLLERSKMEKKEIEKVLRSVMMEKGDGLRERSLKLKERADFCLSKDGSSSKYLDKLVSHVLSFDSYAFAS

SEQ ID NO: 103858 - DNA, 1467 bp, Arabidopsis thaliana
  misc_feature (1)..(1467): Ceres Seq. ID no. 13613727
  misc_feature: MA Experiment ID: 108434 Result: Down-regulated in Transcription
  misc_feature: MA Experiment 108434 PARAMETER Experiment Name: At_Root_Tips_cDNA_P Parameter: Tissue Value: Root Tips
  misc_feature: MA Experiment ID: 108464 Result: Up-regulated in Transcription
  misc_feature: MA Experiment 108464 PARAMETER Experiment Name: At_Germinating_Seeds_cDNA_P Parameter: Age (day) Value: 4 vs. 0
  misc_feature: MA Experiment 108464 PARAMETER Experiment Name: At_Germinating_Seeds_cDNA_P Parameter: Tissue Value: Germinating Seeds
  misc_feature: MA Experiment ID: 108473 Result: Up-regulated in Transcription
  misc_feature: MA Experiment 108473 PARAMETER Experiment Name: At_Drought_Flowers_cDNA_P Parameter: Timepoint (hr) Value: 7 d
  misc_feature: MA Experiment 108473 PARAMETER Experiment Name: At_Drought_Flowers_cDNA_P Parameter: Tissue Value: Flower
  misc_feature: MA Experiment 108473 PARAMETER Experiment Name: At_Drought_Flowers_cDNA_P Parameter: Treatment Value: Drought vs. No Drought
  misc_feature: MA Experiment ID: 108489 Result: Up-regulated in Transcription
  misc_feature: MA Experiment ID: 108573 Result: Up-regulated in Transcription
  misc_feature: MA Experiment 108573 PARAMETER Experiment Name: At_Drought_cDNA_P Parameter: Timepoint (hr) Value: 6
  misc_feature: MA Experiment 108573 PARAMETER Experiment Name: At_Drought_cDNA_P Parameter: Tissue Value: Aerial
  misc_feature: MA Experiment 108573 PARAMETER Experiment Name: At_Drought_cDNA_P Parameter: Treatment Value: Drought vs. No Drought
  misc_feature: MA Experiment ID: 108574 Result: Up-regulated in Transcription
  misc_feature: MA Experiment 108574 PARAMETER Experiment Name: At_Wounding__cDNA_P Parameter: Timepoint (hr) Value: 1
  misc_feature: MA Experiment 108574 PARAMETER Experiment Name: At_Wounding__cDNA_P Parameter: Tissue Value: Aerial
  misc_feature: MA Experiment 108574 PARAMETER Experiment Name: At_Wounding__cDNA_P Parameter: Treatment Value: Wounding vs. No Wounding
  misc_feature: MA Experiment ID: 108594 Result: Up-regulated in Transcription
  misc_feature: MA Experiment 108594 PARAMETER Experiment Name: At_Ler-rhl_Root_cDNA_P Parameter: Plant Line Value: null
  misc_feature: MA Experiment ID: 108595 Result: Up-regulated in Transcription
  misc_feature: MA Experiment 108595 PARAMETER Experiment Name: At_Ler-pi_Ovule_cDNA_P Parameter: Plant Line Value: null
  misc_feature: MA Experiment ID: 108667 Result: Up-regulated in Transcription
  misc_feature: MA Experiment 108667 PARAMETER Experiment Name: At_2mM_SA_cDNA_P Parameter: Plant Line Value: WS
  misc_feature: MA Experiment 108667 PARAMETER Experiment Name: At_2mM_SA_cDNA_P Parameter: Timepoint (hr) Value: 1
  misc_feature: MA Experiment 108667 PARAMETER Experiment Name: At_2mM_SA_cDNA_P Parameter: Treatment Value: 2mM SA vs. No Treatment
  misc_feature: MA Experiment ID: 20000069 Result: Up-regulated in Transcription
  misc_feature: MA Experiment 20000069 PARAMETER Experiment Name: At_100uM_ABA_Mutants_cDNA_P Parameter: Plant Line Value: CS23
  misc_feature: MA Experiment 20000069 PARAMETER Experiment Name: At_100uM_ABA_Mutants_cDNA_P Parameter: Timepoint (hr) Value: 6
  misc_feature: MA Experiment 20000069 PARAMETER Experiment Name: At_100uM_ABA_Mutants_cDNA_P Parameter: Tissue Value: Aerial
  misc_feature: MA Experiment 20000069 PARAMETER Experiment Name: At_100uM_ABA_Mutants_cDNA_P Parameter: Treatment Value: 100uM ABA vs. No Treatment
  misc_feature: MA Experiment ID: 20000071 Result: Up-regulated in Transcription
  misc_feature: MA Experiment 20000071 PARAMETER Experiment Name: At_100uM_ABA_Mutants_cDNA_P Parameter: Plant Line Value: CS8104
  misc_feature: MA Experiment 20000071 PARAMETER Experiment Name: At_100uM_ABA_Mutants_cDNA_P Parameter: Timepoint (hr) Value: 6
  misc_feature: MA Experiment 20000071 PARAMETER Experiment Name: At_100uM_ABA_Mutants_cDNA_P Parameter: Tissue Value: Aerial
  misc_feature: MA Experiment 20000071 PARAMETER Experiment Name: At_100uM_ABA_Mutants_cDNA_P Parameter: Treatment Value: 100uM ABA vs. No Treatment
  misc_feature: MA Experiment ID: 20000072 Result: Up-regulated in Transcription
  misc_feature: MA Experiment 20000072 PARAMETER Experiment Name: At_100uM_ABA_Mutants_cDNA_P Parameter: Plant Line Value: CS8105
  misc_feature: MA Experiment 20000072 PARAMETER Experiment Name: At_100uM_ABA_Mutants_cDNA_P Parameter: Timepoint (hr) Value: 6
  misc_feature: MA Experiment 20000072 PARAMETER Experiment Name: At_100uM_ABA_Mutants_cDNA_P Parameter: Tissue Value: Aerial
  misc_feature: MA Experiment 20000072 PARAMETER Experiment Name: At_100uM_ABA_Mutants_cDNA_P Parameter: Treatment Value: 100uM ABA vs. No Treatment
  misc_feature: MA Experiment ID: 20000087 Result: Up-regulated in Transcription
  misc_feature: MA Experiment 20000087 PARAMETER Experiment Name: At_100uM_ABA_Mutants_cDNA_P Parameter: Plant Line Value: WS
  misc_feature: MA Experiment 20000087 PARAMETER Experiment Name: At_100uM_ABA_Mutants_cDNA_P Parameter: Timepoint (hr) Value: 6
  misc_feature: MA Experiment 20000087 PARAMETER Experiment Name: At_100uM_ABA_Mutants_cDNA_P Parameter: Tissue Value: Aerial
  misc_feature: MA Experiment 20000087 PARAMETER Experiment Name: At_100uM_ABA_Mutants_cDNA_P Parameter: Treatment Value: 100uM ABA vs. No Treatment
  misc_feature: MA Experiment ID: 20000111 Result: Up-regulated in Transcription
  misc_feature: MA Experiment 20000111 PARAMETER Experiment Name: At_42deg_Heat_cDNA_P Parameter: Temperature (deg C) Value: 42 vs. 22
  misc_feature: MA Experiment 20000111 PARAMETER Experiment Name: At_42deg_Heat_cDNA_P Parameter: Timepoint (hr) Value: 6
  misc_feature: MA Experiment 20000111 PARAMETER Experiment Name: At_42deg_Heat_cDNA_P Parameter: Tissue Value: Aerial
  misc_feature: MA Experiment ID: 20000113 Result: Up-regulated in Transcription
  misc_feature: MA Experiment 20000113 PARAMETER Experiment Name: At_42deg_Heat_cDNA_P Parameter: Temperature (deg C) Value: 42 vs. 22
  misc_feature: MA Experiment 20000113 PARAMETER Experiment Name: At_42deg_Heat_cDNA_P Parameter: Timepoint (hr) Value: 8
  misc_feature: MA Experiment 20000113 PARAMETER Experiment Name: At_42deg_Heat_cDNA_P Parameter: Tissue Value: Aerial
  misc_feature: MA Experiment ID: 20000144 Result: Up-regulated in Transcription
  misc_feature: MA Experiment 20000144 PARAMETER Experiment Name: At_42deg_Heat_cDNA_P Parameter: Temperature (deg C) Value: 42 vs. 22
  misc_feature: MA Experiment 20000144 PARAMETER Experiment Name: At_42deg_Heat_cDNA_P Parameter: Timepoint (hr) Value: 1
  misc_feature: MA Experiment 20000144 PARAMETER Experiment Name: At_42deg_Heat_cDNA_P Parameter: Tissue Value: Aerial
  misc_feature: MA Experiment ID: 20000173 Result: Up-regulated in Transcription
  misc_feature: MA Experiment 20000173 PARAMETER Experiment Name: At_42deg_Heat_P Parameter: Age (day) Value: 14
  misc_feature: MA Experiment 20000173 PARAMETER Experiment Name: At_42deg_Heat_P Parameter: Organism Value: A. thaliana
  misc_feature: MA Experiment 20000173 PARAMETER Experiment Name: At_42deg_Heat_P Parameter: Plant Line Value: WS
  misc_feature: MA Experiment 20000173 PARAMETER Experiment Name: At_42deg_Heat_P Parameter: Temperature (deg C) Value: 42 vs. 22
  misc_feature: MA Experiment 20000173 PARAMETER Experiment Name: At_42deg_Heat_P Parameter: Timepoint (hr) Value: 6
  misc_feature: MA Experiment 20000173 PARAMETER Experiment Name: At_42deg_Heat_P Parameter: Tissue Value: Aerial
  misc_feature: MA Experiment ID: 20000184 Result: Down-regulated in Transcription
  misc_feature: MA Experiment 20000184 PARAMETER Experiment Name: At_Shoots__P Parameter: Age (day) Value: 7
  misc_feature: MA Experiment 20000184 PARAMETER Experiment Name: At_Shoots__P Parameter: Tissue Value: Shoots vs. Whole Plant
  misc_feature: MA Experiment ID: 20000185 Result: Down-regulated in Transcription
  misc_feature: MA Experiment 20000185 PARAMETER Experiment Name: At_Roots__P Parameter: Age (day) Value: 7 vs. 21
  misc_feature: MA Experiment 20000185 PARAMETER Experiment Name: At_Roots__P Parameter: Organism Value: A. thaliana
  misc_feature: MA Experiment 20000185 PARAMETER Experiment Name: At_Roots__P Parameter: Tissue Value: Roots vs. Whole Plant
  misc_feature: MA Experiment ID: 20000234 Result: Down-regulated in Transcription
  misc_feature: MA Experiment 20000234 PARAMETER Experiment Name: At_Siliques_P Parameter: Age (day) Value: 21
  misc_feature: MA Experiment 20000234 PARAMETER Experiment Name: At_Siliques_P Parameter: Organism Value: A. thaliana
  misc_feature: MA Experiment 20000234 PARAMETER Experiment Name: At_Siliques_P Parameter: Plant Line Value: WS
  misc_feature: MA Experiment 20000234 PARAMETER Experiment Name: At_Siliques_P Parameter: Tissue Value: Less Than 5mm Siliques vs. Whole Plant
  misc_feature: MA Experiment ID: 20000235 Result: Down-regulated in Transcription
  misc_feature: MA Experiment 20000235 PARAMETER Experiment Name: At_Siliques_P Parameter: Age (day) Value: 21
  misc_feature: MA Experiment 20000235 PARAMETER Experiment Name: At_Siliques_P Parameter: Organism Value: A. thaliana
  misc_feature: MA Experiment 20000235 PARAMETER Experiment Name: At_Siliques_P Parameter: Plant Line Value: WS
  misc_feature: MA Experiment 20000235 PARAMETER Experiment Name: At_Siliques_P Parameter: Tissue Value: 5-10mm Siliques vs. Whole Plant
  misc_feature: MA Experiment ID: 20000264 Result: Down-regulated in Transcription
  misc_feature: MA Experiment 20000264 PARAMETER Experiment Name: At_Open_Flower_P Parameter: Age (day) Value: 21
  misc_feature: MA Experiment 20000264 PARAMETER Experiment Name: At_Open_Flower_P Parameter: Plant Line Value: WS
  misc_feature: MA Experiment 20000264 PARAMETER Experiment Name: At_Open_Flower_P Parameter: Tissue Value: Open Flower vs. Whole Plant
  misc_feature: MA Experiment ID: 20000265 Result: Down-regulated in Transcription
  misc_feature: MA Experiment 20000265 PARAMETER Experiment Name: At_Open_Flower_P Parameter: Age (day) Value: 21
  misc_feature: MA Experiment 20000265 PARAMETER Experiment Name: At_Open_Flower_P Parameter: Plant Line Value: WS
  misc_feature: MA Experiment 20000265 PARAMETER Experiment Name: At_Open_Flower_P Parameter: Tissue Value: Closed Flower vs. Whole Plant
  misc_feature: MA Experiment ID: 20000267 Result: Up-regulated in Transcription
  misc_feature: MA Experiment 20000267 PARAMETER Experiment Name: At_Drought_P Parameter: Age (day) Value: 7
  misc_feature: MA Experiment 20000267 PARAMETER Experiment Name: At_Drought_P Parameter: Organism Value: A. thaliana
  misc_feature: MA Experiment 20000267 PARAMETER Experiment Name: At_Drought_P Parameter: Plant Line Value: WS
  misc_feature: MA Experiment 20000267 PARAMETER Experiment Name: At_Drought_P Parameter: Timepoint (hr) Value: 6
  misc_feature: MA Experiment 20000267 PARAMETER Experiment Name: At_Drought_P Parameter: Tissue Value: Whole Plant
  misc_feature: MA Experiment 20000267 PARAMETER Experiment Name: At_Drought_P Parameter: Treatment Value: Drought vs. No Drought
  misc_feature: MA Experiment ID: 20000286 Result: Down-regulated in Transcription
  misc_feature: MA Experiment 20000286 PARAMETER Experiment Name: At_Open_Flower_P Parameter: Age (day) Value: 21
  misc_feature: MA Experiment 20000286 PARAMETER Experiment Name: At_Open_Flower_P Parameter: Plant Line Value: WS
  misc_feature: MA Experiment 20000286 PARAMETER Experiment Name: At_Open_Flower_P Parameter: Tissue Value: Half Open vs. Whole Plant
  misc_feature: MA Experiment ID: 20000436 Result: Up-regulated in Transcription
  misc_feature: MA Experiment 20000436 PARAMETER Experiment Name: At_Drought_P Parameter: Age (day) Value: 7
  misc_feature: MA Experiment 20000436 PARAMETER Experiment Name: At_Drought_P Parameter: Organism Value: A. thaliana
  misc_feature: MA Experiment 20000436 PARAMETER Experiment Name: At_Drought_P Parameter: Plant Line Value: WS
  misc_feature: MA Experiment 20000436 PARAMETER Experiment Name: At_Drought_P Parameter: Timepoint (hr) Value: 12
  misc_feature: MA Experiment 20000436 PARAMETER Experiment Name: At_Drought_P Parameter: Tissue Value: Whole Plant
  misc_feature: MA Experiment 20000436 PARAMETER Experiment Name: At_Drought_P Parameter: Treatment Value: Drought vs. No Drought
  misc_feature: MA Experiment ID: 20000437 Result: Up-regulated in Transcription
  misc_feature: MA Experiment 20000437 PARAMETER Experiment Name: At_Drought_P Parameter: Age (day) Value: 8
  misc_feature: MA Experiment 20000437 PARAMETER Experiment Name: At_Drought_P Parameter: Organism Value: A. thaliana
  misc_feature: MA Experiment 20000437 PARAMETER Experiment Name: At_Drought_P Parameter: Plant Line Value: WS
  misc_feature: MA Experiment 20000437 PARAMETER Experiment Name: At_Drought_P Parameter: Timepoint (hr) Value: 24
  misc_feature: MA Experiment 20000437 PARAMETER Experiment Name: At_Drought_P Parameter: Tissue Value: Whole Plant
  misc_feature: MA Experiment 20000437 PARAMETER Experiment Name: At_Drought_P Parameter: Treatment Value: Drought vs. No Drought
  misc_feature: MA Experiment ID: 20000438 Result: Down-regulated in Transcription
  misc_feature: MA Experiment 20000438 PARAMETER Experiment Name: At_Shoots__P Parameter: Age (day) Value: 14
  misc_feature: MA Experiment 20000438 PARAMETER Experiment Name: At_Shoots__P Parameter: Tissue Value: Shoots vs. Whole Plant
  misc_feature: MA Experiment ID: 20000439 Result: Down-regulated in Transcription
  misc_feature: MA Experiment 20000439 PARAMETER Experiment Name: At_Roots__P Parameter: Age (day) Value: 14 vs. 21
  misc_feature: MA Experiment 20000439 PARAMETER Experiment Name: At_Roots__P Parameter: Organism Value: A. thaliana
  misc_feature: MA Experiment 20000439 PARAMETER Experiment Name: At_Roots__P Parameter: Tissue Value: Roots vs. Whole Plant
  misc_feature: MA Experiment ID: 20000441 Result: Up-regulated in Transcription
  misc_feature: MA Experiment 20000441 PARAMETER Experiment Name: At_1uM_BR-BRZ__P Parameter: Tissue Value: Shoot Apices
  misc_feature: MA Experiment 20000441 PARAMETER Experiment Name: At_1uM_BR-BRZ__P Parameter: Treatment Value: 1uM BR vs. No Treatment
  misc_feature: MA Experiment ID: 20000451 Result: Down-regulated in Transcription
  misc_feature: MA Experiment 20000451 PARAMETER Experiment Name: At_CS6879_Shoots-Roots_P Parameter: Age (day) Value: 14
  misc_feature: MA Experiment 20000451 PARAMETER Experiment Name: At_CS6879_Shoots-Roots_P Parameter: Organism Value: A. thaliana
  misc_feature: MA Experiment 20000451 PARAMETER Experiment Name: At_CS6879_Shoots-Roots_P Parameter: Plant Line Value: CS6879 vs. WS
  misc_feature: MA Experiment 20000451 PARAMETER Experiment Name: At_CS6879_Shoots-Roots_P Parameter: Tissue Value: Roots
  misc_feature: MA Experiment ID: 20000460 Result: Up-regulated in Transcription
  misc_feature: MA Experiment 20000460 PARAMETER Experiment Name: At_10percent_PEG_P Parameter: Age (day) Value: 12
  misc_feature: MA Experiment 20000460 PARAMETER Experiment Name: At_10percent_PEG_P Parameter: Organism Value: A. thaliana
  misc_feature: MA Experiment 20000460 PARAMETER Experiment Name: At_10percent_PEG_P Parameter: Plant Line Value: WS
  misc_feature: MA Experiment 20000460 PARAMETER Experiment Name: At_10percent_PEG_P Parameter: Timepoint (day) Value: 12
  misc_feature: MA Experiment 20000460 PARAMETER Experiment Name: At_10percent_PEG_P Parameter: Tissue Value: Whole Plant
  misc_feature: MA Experiment 20000460 PARAMETER Experiment Name: At_10percent_PEG_P Parameter: Treatment Value: 10percent PEG vs. No Treatment
  misc_feature: MA Experiment ID: 20000527 Result: Up-regulated in Transcription
  misc_feature: MA Experiment 20000527 PARAMETER Experiment Name: At_10percent_PEG_P Parameter: Age (day) Value: 20
  misc_feature: MA Experiment 20000527 PARAMETER Experiment Name: At_10percent_PEG_P Parameter: Organism Value: A. thaliana
  misc_feature: MA Experiment 20000527 PARAMETER Experiment Name: At_10percent_PEG_P Parameter: Plant Line Value: WS
  misc_feature: MA Experiment 20000527 PARAMETER Experiment Name: At_10percent_PEG_P Parameter: Timepoint (day) Value: 20
  misc_feature: MA Experiment 20000527 PARAMETER Experiment Name: At_10percent_PEG_P Parameter: Tissue Value: Whole Plant
  misc_feature: MA Experiment 20000527 PARAMETER Experiment Name: At_10percent_PEG_P Parameter: Treatment Value: 10percent PEG vs. No Treatment
  misc_feature: MA Experiment ID: 20000573 Result: Down-regulated in Transcription
  misc_feature: MA Experiment 20000573 PARAMETER Experiment Name: At_100uM_ABA_Mutants__P Parameter: Organism Value: A. thaliana
  misc_feature: MA Experiment 20000573 PARAMETER Experiment Name: At_100uM_ABA_Mutants__P Parameter: Plant Line Value: CS22 vs. Ler wt
  misc_feature: MA Experiment 20000573 PARAMETER Experiment Name: At_100uM_ABA_Mutants__P Parameter: Timepoint (hr) Value: N/A
  misc_feature: MA Experiment 20000573 PARAMETER Experiment Name: At_100uM_ABA_Mutants__P Parameter: Tissue Value: Whole Plant
  misc_feature: MA Experiment 20000573 PARAMETER Experiment Name: At_100uM_ABA_Mutants__P Parameter: Treatment Value: None
  misc_feature: MA Experiment ID: 20000574 Result: Down-regulated in Transcription
  misc_feature: MA Experiment 20000574 PARAMETER Experiment Name: At_100uM_ABA_Mutants__P Parameter: Organism Value: A. thaliana
  misc_feature: MA Experiment 20000574 PARAMETER Experiment Name: At_100uM_ABA_Mutants__P Parameter: Plant Line Value: CS23 vs. Ler wt
  misc_feature: MA Experiment 20000574 PARAMETER Experiment Name: At_100uM_ABA_Mutants__P Parameter: Timepoint (hr) Value: N/A
  misc_feature: MA Experiment 20000574 PARAMETER Experiment Name: At_100uM_ABA_Mutants__P Parameter: Tissue Value: Whole Plant
  misc_feature: MA Experiment 20000574 PARAMETER Experiment Name: At_100uM_ABA_Mutants__P Parameter: Treatment Value: None
  misc_feature: MA Experiment ID: 20000606 Result: Up-regulated in Transcription
  misc_feature: MA Experiment 20000606 PARAMETER Experiment Name: At_CS8548_Mutant_P Parameter: Age (day) Value: 14
  misc_feature: MA Experiment 20000606 PARAMETER Experiment Name: At_CS8548_Mutant_P Parameter: Plant Line Value: CS8548 vs. wt
  misc_feature: MA Experiment 20000606 PARAMETER Experiment Name: At_CS8548_Mutant_P Parameter: Tissue Value: Whole Plant
  misc_feature: MA Experiment ID: 20000709 Result: Up-regulated in Transcription
  misc_feature: MA Experiment 20000709 PARAMETER Experiment Name: At_15mM_NH4NO3_L-to-H_P Parameter: Age (hr) Value: 14
  misc_feature: MA Experiment 20000709 PARAMETER Experiment Name: At_15mM_NH4NO3_L-to-H_P Parameter: Organism Value: A. thaliana
  misc_feature: MA Experiment 20000709 PARAMETER Experiment Name: At_15mM_NH4NO3_L-to-H_P Parameter: Plant Line Value: WS
  misc_feature: MA Experiment 20000709 PARAMETER Experiment Name: At_15mM_NH4NO3_L-to-H_P Parameter: Timepoint (hr) Value: 4
  misc_feature: MA Experiment 20000709 PARAMETER Experiment Name: At_15mM_NH4NO3_L-to-H_P Parameter: Tissue Value: Aerial
  misc_feature: MA Experiment 20000709 PARAMETER Experiment Name: At_15mM_NH4NO3_L-to-H_P Parameter: Treatment Value: 15mM NH4NO3 vs. 30mM Mannitol
  misc_feature: MA Experiment ID: 20000794 Result: Down-regulated in Transcription
  misc_feature: MA Experiment 20000794 PARAMETER Experiment Name: At_Petals_P Parameter: Age (day) Value: 23-25 days
  misc_feature: MA Experiment 20000794 PARAMETER Experiment Name: At_Petals_P Parameter: Plant Line Value: WS
  misc_feature: MA Experiment 20000794 PARAMETER Experiment Name: At_Petals_P Parameter: Tissue Value: Petals vs. Whole plant
  misc_feature: MA Experiment ID: 20001247 Result: Up-regulated in Transcription
  misc_feature: MA Experiment 20001247 PARAMETER Experiment Name: At_Far-red-induction_P Parameter: Age (day) Value: 7
  misc_feature: MA Experiment 20001247 PARAMETER Experiment Name: At_Far-red-induction_P Parameter: Light Value: Far-red vs. White
  misc_feature: MA Experiment 20001247 PARAMETER Experiment Name: At_Far-red-induction_P Parameter: Organism Value: A. thaliana
  misc_feature: MA Experiment 20001247 PARAMETER Experiment Name: At_Far-red-induction_P Parameter: Plant Line Value: Columbia
  misc_feature: MA Experiment 20001247 PARAMETER Experiment Name: At_Far-red-induction_P Parameter: Timepoint (hr) Value: 1
  misc_feature: MA Experiment 20001247 PARAMETER Experiment Name: At_Far-red-induction_P Parameter: Tissue Value: Whole Plant
  misc_feature: MA Experiment ID: 20001450 Result: Up-regulated in Transcription
  misc_feature: MA Experiment 20001450 PARAMETER Experiment Name: At_Far-red-induction_P Parameter: Age (day) Value: 7
  misc_feature: MA Experiment 20001450 PARAMETER Experiment Name: At_Far-red-induction_P Parameter: Light Value: Far-red vs. White
  misc_feature: MA Experiment 20001450 PARAMETER Experiment Name: At_Far-red-induction_P Parameter: Organism Value: A. thaliana
  misc_feature: MA Experiment 20001450 PARAMETER Experiment Name: At_Far-red-induction_P Parameter: Plant Line Value: Columbia
  misc_feature: MA Experiment 20001450 PARAMETER Experiment Name: At_Far-red-induction_P Parameter: Timepoint (hr) Value: 8
  misc_feature: MA Experiment 20001450 PARAMETER Experiment Name: At_Far-red-induction_P Parameter: Tissue Value: Whole Plant
  misc_feature: MA Experiment ID: 20001451 Result: Up-regulated in Transcription
  misc_feature: MA Experiment 20001451 PARAMETER Experiment Name: At_Far-red-induction_P Parameter: Age (day) Value: 7
  misc_feature: MA Experiment 20001451 PARAMETER Experiment Name: At_Far-red-induction_P Parameter: Light Value: Far-red vs. White
  misc_feature: MA Experiment 20001451 PARAMETER Experiment Name: At_Far-red-induction_P Parameter: Organism Value: A. thaliana
  misc_feature: MA Experiment 20001451 PARAMETER Experiment Name: At_Far-red-induction_P Parameter: Plant Line Value: Columbia
  misc_feature: MA Experiment 20001451 PARAMETER Experiment Name: At_Far-red-induction_P Parameter: Timepoint (hr) Value: 24
  misc_feature: MA Experiment 20001451 PARAMETER Experiment Name: At_Far-red-induction_P Parameter: Tissue Value: Whole Plant
  misc_feature: MA Experiment ID: 20001554 Result: Up-regulated in Transcription
  misc_feature: MA Experiment 20001554 PARAMETER Experiment Name: At_Drought_Soil_Dry_P Parameter: Age (day) Value: 21
  misc_feature: MA Experiment 20001554 PARAMETER Experiment Name: At_Drought_Soil_Dry_P Parameter: Organism Value: A. thaliana
  misc_feature: MA Experiment 20001554 PARAMETER Experiment Name: At_Drought_Soil_Dry_P Parameter: Plant Line Value: WS
  misc_feature: MA Experiment 20001554 PARAMETER Experiment Name: At_Drought_Soil_Dry_P Parameter: Post Timepoint (hr) Value: None
  misc_feature: MA Experiment 20001554 PARAMETER Experiment Name: At_Drought_Soil_Dry_P Parameter: Post-Treatment Value: None
  misc_feature: MA Experiment 20001554 PARAMETER Experiment Name: At_Drought_Soil_Dry_P Parameter: Timepoint (day) Value: 7
  misc_feature: MA Experiment 20001554 PARAMETER Experiment Name: At_Drought_Soil_Dry_P Parameter: Treatment Value: Drought vs. No Drought
  misc_feature: MA Experiment ID: 20001557 Result: Up-regulated in Transcription
  misc_feature: MA Experiment 20001557 PARAMETER Experiment Name: At_Drought_Soil_Dry_P Parameter: Age (day) Value: 27
  misc_feature: MA Experiment 20001557 PARAMETER Experiment Name: At_Drought_Soil_Dry_P Parameter: Organism Value: A. thaliana
  misc_feature: MA Experiment 20001557 PARAMETER Experiment Name: At_Drought_Soil_Dry_P Parameter: Plant Line Value: WS
  misc_feature: MA Experiment 20001557 PARAMETER Experiment Name: At_Drought_Soil_Dry_P Parameter: Post Timepoint (hr) Value: 3
  misc_feature: MA Experiment 20001557 PARAMETER Experiment Name: At_Drought_Soil_Dry_P Parameter: Post-Treatment Value: Re-Water vs. No Drought
  misc_feature: MA Experiment 20001557 PARAMETER Experiment Name: At_Drought_Soil_Dry_P Parameter: Timepoint (day) Value: 13
  misc_feature: MA Experiment 20001557 PARAMETER Experiment Name: At_Drought_Soil_Dry_P Parameter: Treatment Value: Drought vs. No Drought
  misc_feature: MA Experiment ID: 20001905 Result: Up-regulated in Transcription
  misc_feature: MA Experiment 20001905 PARAMETER Experiment Name: At_Drought_Reproduction_P Parameter: Age (day) Value: 40
  misc_feature: MA Experiment 20001905 PARAMETER Experiment Name: At_Drought_Reproduction_P Parameter: Organism Value: A. thaliana
  misc_feature: MA Experiment 20001905 PARAMETER Experiment Name: At_Drought_Reproduction_P Parameter: Plant Line Value: WS
  misc_feature: MA Experiment 20001905 PARAMETER Experiment Name: At_Drought_Reproduction_P Parameter: Timepoint (day) Value: 10
  misc_feature: MA Experiment 20001905 PARAMETER Experiment Name: At_Drought_Reproduction_P Parameter: Tissue Value: Rosettes
  misc_feature: MA Experiment 20001905 PARAMETER Experiment Name: At_Drought_Reproduction_P Parameter: Treatment Value: Drought vs. No Drought
  misc_feature: MA Experiment ID: 20001911 Result: Up-regulated in Transcription
  misc_feature: MA Experiment 20001911 PARAMETER Experiment Name: At_Drought_Reproduction_P Parameter: Age (day) Value: 40
  misc_feature: MA Experiment 20001911 PARAMETER Experiment Name: At_Drought_Reproduction_P Parameter: Organism Value: A. thaliana
  misc_feature: MA Experiment 20001911 PARAMETER Experiment Name: At_Drought_Reproduction_P Parameter: Plant Line Value: WS
  misc_feature: MA Experiment 20001911 PARAMETER Experiment Name: At_Drought_Reproduction_P Parameter: Timepoint (day) Value: 10
  misc_feature: MA Experiment 20001911 PARAMETER Experiment Name: At_Drought_Reproduction_P Parameter: Tissue Value: Flowers
  misc_feature: MA Experiment 20001911 PARAMETER Experiment Name: At_Drought_Reproduction_P Parameter: Treatment Value: Drought vs. No Drought
attcatcaaataaacaaaaatctctgtatttttttttaaaaaagatggctgatttggatttacagaggaagatggtatctccgaagctccacgtcaccattcctgagccgtgtaagctctcctccgtctcttctccaatctcctcctcttcttccgccgcttgctctgcttacgagctttacctccgtttgcctgaacttagaaacctctggtcctctctctatttccctcactggatctccgagcccgttctcaaaccagctcttcaagctcttgagatcactttccggttaatcctcaccgttgcttctgacacacgtccttacatcaaccgccgcgaatggatccgacggttggattccctcactaccagccagataaaaatcgtggcggctatctgcggagatgaagacaactacgaagagaacgtatcggcggctccggtcagcaatggctggagctcgttgagtttgctttcggagatcgccacgtgtcgtacatcggagagtgttggacagaagatcttgtctacgatcgagaatgagatgcgttggtgtaagtatacgctcggtttaggagaaccaaacctcgccggaaaaccgtatcttcaatacgacgccgtttgtctcccggaggagctacatagcctcaagaacaatccttacgcagatcacatcgagaaccaagagaatcaaatgctctacactagtcatcagattcttgaatcgtggatttacgtttctgtgaatcttttatatagaatcgaatcgagaatcgaagagggaaaattcgaaaaagcttcttcagacgtctacttgttggagagaatctggaagcttctatcagagattgaagatttacacattcttatggatcctgaagatttcttgaaggtgaagaaacagttacaaatcaaatcgacgtttccaaacgacgcattttgttttaggtcaaagggcttagtagagatggcgaagatgtccaaagagctgagacagaaagtgccagctgttcttgaggtggaggtggatcccaccggaggtccgaggttgcaagaggcggcgatgaagctttactcgaggaaaacagagtacgagaagatacatttgcttcagggaatgcaggccgtggagtctgcagccaagagattcttcttcggataccagaagttggttgcagcgatgattgggaatgcagaggcgaatgcaaatagaacggtggcgaatcacgagtcctatgattcactgactcaggtgtttatggagccaccgtattacccgagcctagacgccgcaaagacatttctgggagagttctggagccaattgtgatgcaatggaagatattgacacaactacttaacaaacactatcaacagatgtaacactactgaaatttttggaagcatctaacgatcagtgtatgaatatatgtaactcattttttttagcacaaaacaatattttc

SEQ ID NO: 103859 - protein, 442 aa, Arabidopsis thaliana
  peptide (1)..(442): Ceres Seq. ID no. 13613728
  misc_feature (15)..(442): Homolog of NCBI NO: 15228750 NR Description: nematode resistance protein-related protein
  misc_feature (15)..(442): Homolog of NCBI NO: 21553529 NR Description: nematode resistance protein-like protein
  misc_feature (15)..(442): Homolog of NCBI NO: 21593007 NR Description: putative nematode-resistance protein [Arabidopsis
  misc_feature (15)..(442): Homolog of NCBI NO: 27311581 NR Description: Unknown protein [Arabidopsis thaliana]
  misc_feature (15)..(442): Homolog of NCBI NO: 15225612 NR Description: nematode-resistance protein -related [Arabidopsis
SSNKQKSLYFFLKKMADLDLQRKMVSPKLHVTIPEPCKLSSVSSPISSSSSAACSAYELYLRLPELRNLWSSLYFPHWISEPVLKPALQALEITFRLILTVASDTRPYINRREWIRRLDSLTTSQIKIVAAICGDEDNYEENVSAAPVSNGWSSLSLLSEIATCRTSESVGQKILSTIENEMRWCKYTLGLGEPNLAGKPYLQYDAVCLPEELHSLKNNPYADHIENQENQMLYTSHQILESWIYVSVNLLYRIESRIEEGKFEKASSDVYLLERIWKLLSEIEDLHILMDPEDFLKVKKQLQIKSTFPNDAFCFRSKGLVEMAKMSKELRQKVPAVLEVEVDPTGGPRLQEAAMKLYSRKTEYEKIHLLQGMQAVESAAKRFFFGYQKLVAAMIGNAEANANRTVANHESYDSLTQVFMEPPYYPSLDAAKTFLGEFWSQL

SEQ ID NO: 103860 - protein, 428 aa, Arabidopsis thaliana; identical to SEQ ID NO: 42619
  peptide (1)..(428): Ceres Seq. ID no. 13613729
  misc_feature (1)..(428): Homolog of NCBI NO: 15228750 NR Description: nematode resistance protein-related protein
  misc_feature (1)..(428): Homolog of NCBI NO: 21553529 NR Description: nematode resistance protein-like protein
  misc_feature (1)..(428): Homolog of NCBI NO: 21593007 NR Description: putative nematode-resistance protein [Arabidopsis
  misc_feature (1)..(428): Homolog of NCBI NO: 27311581 NR Description: Unknown protein [Arabidopsis thaliana]
  misc_feature (1)..(428): Homolog of NCBI NO: 15225612 NR Description: nematode-resistance protein -related [Arabidopsis

SEQ ID NO: 103861 - protein, 419 aa, Arabidopsis thaliana; identical to SEQ ID NO: 42620
  peptide (1)..(419): Ceres Seq. ID no. 13613730
  misc_feature (1)..(419): Homolog of NCBI NO: 15228750 NR Description: nematode resistance protein-related protein
  misc_feature (1)..(419): Homolog of NCBI NO: 21553529 NR Description: nematode resistance protein-like protein
  misc_feature (1)..(419): Homolog of NCBI NO: 21593007 NR Description: putative nematode-resistance protein [Arabidopsis
  misc_feature (1)..(419): Homolog of NCBI NO: 27311581 NR Description: Unknown protein [Arabidopsis thaliana]
  misc_feature (1)..(419): Homolog of NCBI NO: 15225612 NR Description: nematode-resistance protein -related [Arabidopsis

SEQ ID NO: 103862 - DNA, 938 bp, Arabidopsis thaliana
  misc_feature (1)..(938): Ceres Seq. ID no. 13613731
  misc_feature: MA Experiment ID: 20000185 Result: Down-regulated in Transcription
  misc_feature: MA Experiment 20000185 PARAMETER Experiment Name: At_Roots__P Parameter: Age (day) Value: 7 vs. 21
  misc_feature: MA Experiment 20000185 PARAMETER Experiment Name: At_Roots__P Parameter: Organism Value: A. thaliana
  misc_feature: MA Experiment 20000185 PARAMETER Experiment Name: At_Roots__P Parameter: Tissue Value: Roots vs. Whole Plant
  misc_feature: MA Experiment ID: 20000437 Result: Down-regulated in Transcription
  misc_feature: MA Experiment 20000437 PARAMETER Experiment Name: At_Drought_P Parameter: Age (day) Value: 8
  misc_feature: MA Experiment 20000437 PARAMETER Experiment Name: At_Drought_P Parameter: Organism Value: A. thaliana
  misc_feature: MA Experiment 20000437 PARAMETER Experiment Name: At_Drought_P Parameter: Plant Line Value: WS
  misc_feature: MA Experiment 20000437 PARAMETER Experiment Name: At_Drought_P Parameter: Timepoint (hr) Value: 24
  misc_feature: MA Experiment 20000437 PARAMETER Experiment Name: At_Drought_P Parameter: Tissue Value: Whole Plant
  misc_feature: MA Experiment 20000437 PARAMETER Experiment Name: At_Drought_P Parameter: Treatment Value: Drought vs. No Drought
  misc_feature: MA Experiment ID: 20000439 Result: Down-regulated in Transcription
  misc_feature: MA Experiment 20000439 PARAMETER Experiment Name: At_Roots__P Parameter: Age (day) Value: 14 vs. 21
  misc_feature: MA Experiment 20000439 PARAMETER Experiment Name: At_Roots__P Parameter: Organism Value: A. thaliana
  misc_feature: MA Experiment 20000439 PARAMETER Experiment Name: At_Roots__P Parameter: Tissue Value: Roots vs. Whole Plant
  misc_feature: MA Experiment ID: 20001905 Result: Down-regulated in Transcription
  misc_feature: MA Experiment 20001905 PARAMETER Experiment Name: At_Drought_Reproduction_P Parameter: Age (day) Value: 40
  misc_feature: MA Experiment 20001905 PARAMETER Experiment Name: At_Drought_Reproduction_P Parameter: Organism Value: A. thaliana
  misc_feature: MA Experiment 20001905 PARAMETER Experiment Name: At_Drought_Reproduction_P Parameter: Plant Line Value: WS
  misc_feature: MA Experiment 20001905 PARAMETER Experiment Name: At_Drought_Reproduction_P Parameter: Timepoint (day) Value: 10
  misc_feature: MA Experiment 20001905 PARAMETER Experiment Name: At_Drought_Reproduction_P Parameter: Tissue Value: Rosettes
  misc_feature: MA Experiment 20001905 PARAMETER Experiment Name: At_Drought_Reproduction_P Parameter: Treatment Value: Drought vs. No Drought
acacagaaacagagtttccgtctttcatcttcctccatatgcgtcgctcttaaaaacctaattcacaatgtccgtcgttctcaacgccggcttcagttctccgcttcaaaacagatcacatcatgttatacagttaaagccttcgccttttgcgtcatacatatctctaaacagttcaagaaggtcactgttatgcaaaagaagattggttgtatcttgtttggatacaaatgacaattctgtcacaactacatccgtagattcttcttcttcttcagattctaataaaccagtaagtgaatcagttgaatcaagcaatggcactgccaaaaaagcaccattgacagcacgagagagactaagagcggctcgtgttcttagccgatacactgaagcaacaccgaaaccgtcaaaacctaaaatggggagccaacttcttgatgtgctcaaggaaagtgataagaaatcaaagaggaaaccgggtctacccgaagcaccaactaacatgcttgatgatagcaggagagggatgccaaagagcggtcttacgtttgatttaccgggaggctcggatattctcatcattgctttctcctttgtgttcataagcacagtcatgtttgctactacttttcttgtttggaaactcggtgcgatacacttcaacgaatagtaaagttgagatttggagaagtttaatggagtttggaaaccatcaagcagggaacgagagagagagagtgttttgttacaatgttagttaacaatgcatacttggggatgtgatggggatcttcatcacttggcaaatccggcctgagtgtatatacatatactctgtagtacacataattttgctatgaactctcttcatgcttgatttgtaattttaatctttacattgtaatttcttttcatatggaaatggatgcttaaag

SEQ ID NO: 103863 - protein, 201 aa, Arabidopsis thaliana; identical to SEQ ID NO: 49510
  peptide (1)..(201): Ceres Seq. ID no. 13613732
  misc_feature (1)..(201): Homolog of NCBI NO: 15228794 NR Description: expressed protein [Arabidopsis thaliana]

SEQ ID NO: 103864 - DNA, 843 bp, Arabidopsis thaliana
  misc_feature (1)..(843): Ceres Seq. ID no. 13613733
  misc_feature: MA Experiment ID: 108434 Result: Up-regulated in Transcription
  misc_feature: MA Experiment 108434 PARAMETER Experiment Name: At_Root_Tips_cDNA_P Parameter: Tissue Value: Root Tips
  misc_feature: MA Experiment ID: 108435 Result: Up-regulated in Transcription
  misc_feature: MA Experiment 108435 PARAMETER Experiment Name: At_stm_Mutants_cDNA_P Parameter: Plant Line Value: wt Landsburg vs stm
  misc_feature: MA Experiment 108435 PARAMETER Experiment Name: At_stm_Mutants_cDNA_P Parameter: Tissue Value: Shoot Apical Meristem Region
  misc_feature: MA Experiment ID: 108461 Result: Down-regulated in Transcription
  misc_feature: MA Experiment 108461 PARAMETER Experiment Name: At_Germinating_Seeds_cDNA_P Parameter: Age (day) Value: 1 vs. 0
  misc_feature: MA Experiment 108461 PARAMETER Experiment Name: At_Germinating_Seeds_cDNA_P Parameter: Tissue Value: Germinating Seeds
  misc_feature: MA Experiment ID: 108462 Result: Down-regulated in Transcription
  misc_feature: MA Experiment 108462 PARAMETER Experiment Name: At_Germinating_Seeds_cDNA_P Parameter: Age (day) Value: 2 vs. 0
  misc_feature: MA Experiment 108462 PARAMETER Experiment Name: At_Germinating_Seeds_cDNA_P Parameter: Tissue Value: Germinating Seeds
  misc_feature: MA Experiment ID: 108463 Result: Down-regulated in Transcription
  misc_feature: MA Experiment 108463 PARAMETER Experiment Name: At_Germinating_Seeds_cDNA_P Parameter: Age (day) Value: 3 vs. 0
  misc_feature: MA Experiment 108463 PARAMETER Experiment Name: At_Germinating_Seeds_cDNA_P Parameter: Tissue Value: Germinating Seeds
  misc_feature: MA Experiment ID: 108464 Result: Down-regulated in Transcription
  misc_feature: MA Experiment 108464 PARAMETER Experiment Name: At_Germinating_Seeds_cDNA_P Parameter: Age (day) Value: 4 vs. 0
  misc_feature: MA Experiment 108464 PARAMETER Experiment Name: At_Germinating_Seeds_cDNA_P Parameter: Tissue Value: Germinating Seeds
  misc_feature: MA Experiment ID: 108572 Result: Down-regulated in Transcription
  misc_feature: MA Experiment 108572 PARAMETER Experiment Name: At_Drought_cDNA_P Parameter: Timepoint (hr) Value: 1
  misc_feature: MA Experiment 108572 PARAMETER Experiment Name: At_Drought_cDNA_P Parameter: Tissue Value: Aerial
  misc_feature: MA Experiment 108572 PARAMETER Experiment Name: At_Drought_cDNA_P Parameter: Treatment Value: Drought vs. No Drought
  misc_feature: MA Experiment ID: 108573 Result: Down-regulated in Transcription
  misc_feature: MA Experiment 108573 PARAMETER Experiment Name: At_Drought_cDNA_P Parameter: Timepoint (hr) Value: 6
  misc_feature: MA Experiment 108573 PARAMETER Experiment Name: At_Drought_cDNA_P Parameter: Tissue Value: Aerial
  misc_feature: MA Experiment 108573 PARAMETER Experiment Name: At_Drought_cDNA_P Parameter: Treatment Value: Drought vs. No Drought
  misc_feature: MA Experiment ID: 108577 Result: Down-regulated in Transcription
  misc_feature: MA Experiment 108577 PARAMETER Experiment Name: At_42deg_Heat_cDNA_P Parameter: Temperature (deg C) Value: 42 vs. 22
  misc_feature: MA Experiment 108577 PARAMETER Experiment Name: At_42deg_Heat_cDNA_P Parameter: Timepoint (hr) Value: 6
  misc_feature: MA Experiment 108577 PARAMETER Experiment Name: At_42deg_Heat_cDNA_P Parameter: Tissue Value: Aerial
  misc_feature: MA Experiment ID: 108579 Result: Up-regulated in Transcription
  misc_feature: MA Experiment 108579 PARAMETER Experiment Name: At_4deg_Cold_cDNA_P Parameter: Temperature (deg C) Value: 4 vs. 22
  misc_feature: MA Experiment 108579 PARAMETER Experiment Name: At_4deg_Cold_cDNA_P Parameter: Timepoint (hr) Value: 6
  misc_feature: MA Experiment 108579 PARAMETER Experiment Name: At_4deg_Cold_cDNA_P Parameter: Tissue Value: Aerial
  misc_feature: MA Experiment ID: 20000180 Result: Down-regulated in Transcription
  misc_feature: MA Experiment 20000180 PARAMETER Experiment Name: At_Germinating_Seeds_P Parameter: Age (hr) Value: 24 vs. 0
  misc_feature: MA Experiment 20000180 PARAMETER Experiment Name: At_Germinating_Seeds_P Parameter: Tissue Value: Germinating Seeds
  misc_feature: MA Experiment ID: 20000184 Result: Up-regulated in Transcription
  misc_feature: MA Experiment 20000184 PARAMETER Experiment Name: At_Shoots__P Parameter: Age (day) Value: 7
  misc_feature: MA Experiment 20000184 PARAMETER Experiment Name: At_Shoots__P Parameter: Tissue Value: Shoots vs. Whole Plant
  misc_feature: MA Experiment ID: 20000227 Result: Up-regulated in Transcription
  misc_feature: MA Experiment 20000227 PARAMETER Experiment Name: At_Root-Tips-vs-Tops_P Parameter: Tissue Value: Root Tips vs. Root Tops
  misc_feature: MA Experiment ID: 20000265 Result: Up-regulated in Transcription
  misc_feature: MA Experiment 20000265 PARAMETER Experiment Name: At_Open_Flower_P Parameter: Age (day) Value: 21
  misc_feature: MA Experiment 20000265 PARAMETER Experiment Name: At_Open_Flower_P Parameter: Plant Line Value: WS
  misc_feature: MA Experiment 20000265 PARAMETER Experiment Name: At_Open_Flower_P Parameter: Tissue Value: Closed Flower vs. Whole Plant
  misc_feature: MA Experiment ID: 20000437 Result: Down-regulated in Transcription
  misc_feature: MA Experiment 20000437 PARAMETER Experiment Name: At_Drought_P Parameter: Age (day) Value: 8
  misc_feature: MA Experiment 20000437 PARAMETER Experiment Name: At_Drought_P Parameter: Organism Value: A. thaliana
  misc_feature: MA Experiment 20000437 PARAMETER Experiment Name: At_Drought_P Parameter: Plant Line Value: WS
  misc_feature: MA Experiment 20000437 PARAMETER Experiment Name: At_Drought_P Parameter: Timepoint (hr) Value: 24
  misc_feature: MA Experiment 20000437 PARAMETER Experiment Name: At_Drought_P Parameter: Tissue Value: Whole Plant
  misc_feature: MA Experiment 20000437 PARAMETER Experiment Name: At_Drought_P Parameter: Treatment Value: Drought vs. No Drought
  misc_feature: MA Experiment ID: 20000453 Result: Down-regulated in Transcription
  misc_feature: MA Experiment 20000453 PARAMETER Experiment Name: At_100uM_ABA_P Parameter: Age (day) Value: 15
  misc_feature: MA Experiment 20000453 PARAMETER Experiment Name: At_100uM_ABA_P Parameter: Organism Value: A. thaliana
  misc_feature: MA Experiment 20000453 PARAMETER Experiment Name: At_100uM_ABA_P Parameter: Plant Line Value: WS
  misc_feature: MA Experiment 20000453 PARAMETER Experiment Name: At_100uM_ABA_P Parameter: Timepoint (hr) Value: 24
  misc_feature: MA Experiment 20000453 PARAMETER Experiment Name: At_100uM_ABA_P Parameter: Tissue Value: Aerial
  misc_feature: MA Experiment 20000453 PARAMETER Experiment Name: At_100uM_ABA_P Parameter: Treatment Value: 100uM ABA vs. No Treatment
  misc_feature: MA Experiment ID: 20000456 Result: Up-regulated in Transcription
  misc_feature: MA Experiment 20000456 PARAMETER Experiment Name: At_100uM_BA_P Parameter: Age (day) Value: 14
  misc_feature: MA Experiment 20000456 PARAMETER Experiment Name: At_100uM_BA_P Parameter: Organism Value: A. thaliana
  misc_feature: MA Experiment 20000456 PARAMETER Experiment Name: At_100uM_BA_P Parameter: Plant Line Value: WS
  misc_feature: MA Experiment 20000456 PARAMETER Experiment Name: At_100uM_BA_P Parameter: Timepoint (hr) Value: 6
  misc_feature: MA Experiment 20000456 PARAMETER Experiment Name: At_100uM_BA_P Parameter: Tissue Value: Aerial
  misc_feature: MA Experiment 20000456 PARAMETER Experiment Name: At_100uM_BA_P Parameter: Treatment Value: 100uM BA vs. No Treatment
  misc_feature: MA Experiment ID: 20000794 Result: Down-regulated in Transcription
  misc_feature: MA Experiment 20000794 PARAMETER Experiment Name: At_Petals_P Parameter: Age (day) Value: 23-25 days
  misc_feature: MA Experiment 20000794 PARAMETER Experiment Name: At_Petals_P Parameter: Plant Line Value: WS
  misc_feature: MA Experiment 20000794 PARAMETER Experiment Name: At_Petals_P Parameter: Tissue Value: Petals vs. Whole plant
  misc_feature: MA Experiment ID: 20001451 Result: Down-regulated in Transcription
  misc_feature: MA Experiment 20001451 PARAMETER Experiment Name: At_Far-red-induction_P Parameter: Age (day) Value: 7
  misc_feature: MA Experiment 20001451 PARAMETER Experiment Name: At_Far-red-induction_P Parameter: Light Value: Far-red vs. White
  misc_feature: MA Experiment 20001451 PARAMETER Experiment Name: At_Far-red-induction_P Parameter: Organism Value: A. thaliana
  misc_feature: MA Experiment 20001451 PARAMETER Experiment Name: At_Far-red-induction_P Parameter: Plant Line Value: Columbia
  misc_feature: MA Experiment 20001451 PARAMETER Experiment Name: At_Far-red-induction_P Parameter: Timepoint (hr) Value: 24
  misc_feature: MA Experiment 20001451 PARAMETER Experiment Name: At_Far-red-induction_P Parameter: Tissue Value: Whole Plant
  misc_feature: MA Experiment ID: 20001556 Result: Up-regulated in Transcription
  misc_feature: MA Experiment 20001556 PARAMETER Experiment Name: At_Drought_Soil_Dry_P Parameter: Age (day) Value: 26
  misc_feature: MA Experiment 20001556 PARAMETER Experiment Name: At_Drought_Soil_Dry_P Parameter: Organism Value: A. thaliana
  misc_feature: MA Experiment 20001556 PARAMETER Experiment Name: At_Drought_Soil_Dry_P Parameter: Plant Line Value: WS
  misc_feature: MA Experiment 20001556 PARAMETER Experiment Name: At_Drought_Soil_Dry_P Parameter: Post Timepoint (hr) Value: None
  misc_feature: MA Experiment 20001556 PARAMETER Experiment Name: At_Drought_Soil_Dry_P Parameter: Post-Treatment Value: None
  misc_feature: MA Experiment 20001556 PARAMETER Experiment Name: At_Drought_Soil_Dry_P Parameter: Timepoint (day) Value: 12
  misc_feature: MA Experiment 20001556 PARAMETER Experiment Name: At_Drought_Soil_Dry_P Parameter: Treatment Value: Drought vs. No Drought
  misc_feature: MA Experiment ID: 20001557 Result: Up-regulated in Transcription
  misc_feature: MA Experiment 20001557 PARAMETER Experiment Name: At_Drought_Soil_Dry_P Parameter: Age (day) Value: 27
  misc_feature: MA Experiment 20001557 PARAMETER Experiment Name: At_Drought_Soil_Dry_P Parameter: Organism Value: A. thaliana
  misc_feature: MA Experiment 20001557 PARAMETER Experiment Name: At_Drought_Soil_Dry_P Parameter: Plant Line Value: WS
  misc_feature: MA Experiment 20001557 PARAMETER Experiment Name: At_Drought_Soil_Dry_P Parameter: Post Timepoint (hr) Value: 3
  misc_feature: MA Experiment 20001557 PARAMETER Experiment Name: At_Drought_Soil_Dry_P Parameter: Post-Treatment Value: Re-Water vs. No Drought
  misc_feature: MA Experiment 20001557 PARAMETER Experiment Name: At_Drought_Soil_Dry_P Parameter: Timepoint (day) Value: 13
  misc_feature: MA Experiment 20001557 PARAMETER Experiment Name: At_Drought_Soil_Dry_P Parameter: Treatment Value: Drought vs. No Drought
  misc_feature: MA Experiment ID: 20001558 Result: Up-regulated in Transcription
  misc_feature: MA Experiment 20001558 PARAMETER Experiment Name: At_Drought_Soil_Dry_P Parameter: Age (day) Value: 27
  misc_feature: MA Experiment 20001558 PARAMETER Experiment Name: At_Drought_Soil_Dry_P Parameter: Organism Value: A. thaliana
  misc_feature: MA Experiment 20001558 PARAMETER Experiment Name: At_Drought_Soil_Dry_P Parameter: Plant Line Value: WS
  misc_feature: MA Experiment 20001558 PARAMETER Experiment Name: At_Drought_Soil_Dry_P Parameter: Post Timepoint (hr) Value: 6
  misc_feature: MA Experiment 20001558 PARAMETER Experiment Name: At_Drought_Soil_Dry_P Parameter: Post-Treatment Value: Re-Water vs. No Drought
  misc_feature: MA Experiment 20001558 PARAMETER Experiment Name: At_Drought_Soil_Dry_P Parameter: Timepoint (day) Value: 13
  misc_feature: MA Experiment 20001558 PARAMETER Experiment Name: At_Drought_Soil_Dry_P Parameter: Treatment Value: Drought vs. No Drought
  misc_feature: MA Experiment ID: 20001560 Result: Up-regulated in Transcription
  misc_feature: MA Experiment 20001560 PARAMETER Experiment Name: At_Drought_Soil_Dry_P Parameter: Age (day) Value: 28
  misc_feature: MA Experiment 20001560 PARAMETER Experiment Name: At_Drought_Soil_Dry_P Parameter: Organism Value: A. thaliana
  misc_feature: MA Experiment 20001560 PARAMETER Experiment Name: At_Drought_Soil_Dry_P Parameter: Plant Line Value: WS
  misc_feature: MA Experiment 20001560 PARAMETER Experiment Name: At_Drought_Soil_Dry_P Parameter: Post Timepoint (hr) Value: None
  misc_feature: MA Experiment 20001560 PARAMETER Experiment Name: At_Drought_Soil_Dry_P Parameter: Post-Treatment Value: None
  misc_feature: MA Experiment 20001560 PARAMETER Experiment Name: At_Drought_Soil_Dry_P Parameter: Timepoint (day) Value: 14
  misc_feature: MA Experiment 20001560 PARAMETER Experiment Name: At_Drought_Soil_Dry_P Parameter: Treatment Value: Drought vs. No Drought
cattgagccgttatataaatccttcactcgctccttgagaagacgaatttgagattgcctctgcaaagagtaaaatggcgaatcctaaagtcttcttcgacatcttgattggtaagatgaaggcagggcgtgttgtaatggagttatttgcagatgtgactccgagaacagctaataatttccgtgctttgtgcactggggagaatggtattgggaaagcagggaaggctttacactacaaaggctcagcctttcaccgtataatcccagggttcatgtgtcaaggtggagatttcactcgtgggaatggaactggaggagaatctatttacgggtctaaatttgaagatgagaacttcaagttgaagcacactggtccagggattttgtctatggctaactctggtcccaacactaatggttctcagttcttcatctgcacagagaagacttcgtggcttgatgggaaacatgttgttttcgggaaagttgttgatggatacaatgtggtcaaggcaatggaggatgttggctctgacatgggaaatccttctgaacgagttgtgattgaagattgtggtgagctcaagaacccaagttcataagttcttaaaacattgggtgggttgatcttgacaggttattctatcatatgctgtgaagcagagacagcatcttagcgttaaggtcaatctagtctgtgatgcactactttggttttgactatatcatatgaaccttaggaagtggtccatccttgtaagttgttttcttaaaactcttgtgtgagaataggatggatgataataatggttagtttctttatgaagacatttggttttg

SEQ ID NO: 103865 - protein, 176 aa, Arabidopsis thaliana; identical to SEQ ID NO: 29035
  peptide (1)..(176): Ceres Seq. ID no. 13613734
  misc_feature (1)..(176): Homolog of NCBI NO: 15228814 NR Description: peptidylprolyl isomerase [Arabidopsis thaliana]
  misc_feature (1)..(176): Homolog of NCBI NO: 1305457 NR Description: cytosolic cyclophilin [Arabidopsis thaliana]
  misc_feature (1)..(176): Homolog of NCBI NO: 11270314 NR Description: peptidylprolyl isomerase (EC 5.2.1.8) ATCYP4
  misc_feature (3)..(171): Homolog of NCBI NO: 1084454 NR Description: peptidylprolyl isomerase (EC 5.2.1.8) Cyp1 - rice
  misc_feature (1)..(171): Homolog of NCBI NO: 11270316 NR Description: peptidylprolyl isomerase (EC 5.2.1.8) - Digitalis lanata >gi|1563719|emb|CAA69622.1| cyclophylin
  misc_feature (1)..(171): Homolog of NCBI NO: 3334157 NR Description: Peptidyl-prolyl cis-trans isomerase (PPIase)
  misc_feature (1)..(171): Homolog of NCBI NO: 29124975 NR Description: cyclophilin [Populus tremuloides]
  misc_feature (2)..(171): Homolog of NCBI NO: 18076088 NR Description: cyclophilin [Ricinus communis]

SEQ ID NO: 103866 - protein, 162 aa, Arabidopsis thaliana; identical to SEQ ID NO: 29036
  peptide (1)..(162): Ceres Seq. ID no. 13613735
  misc_feature (1)..(162): Homolog of NCBI NO: 15228814 NR Description: peptidylprolyl isomerase [Arabidopsis thaliana]
  misc_feature (1)..(162): Homolog of NCBI NO: 1305457 NR Description: cytosolic cyclophilin [Arabidopsis thaliana]
  misc_feature (1)..(162): Homolog of NCBI NO: 11270314 NR Description: peptidylprolyl isomerase (EC 5.2.1.8) ATCYP4
  misc_feature (1)..(157): Homolog of NCBI NO: 1084454 NR Description: peptidylprolyl isomerase (EC 5.2.1.8) Cyp1 - rice
  misc_feature (1)..(157): Homolog of NCBI NO: 11270316 NR Description: peptidylprolyl isomerase (EC 5.2.1.8) - Digitalis lanata >gi|1563719|emb|CAA69622.1| cyclophylin
  misc_feature (1)..(157): Homolog of NCBI NO: 3334157 NR Description: Peptidyl-prolyl cis-trans isomerase (PPIase)
  misc_feature (1)..(157): Homolog of NCBI NO: 29124975 NR Description: cyclophilin [Populus tremuloides]
  misc_feature (1)..(157): Homolog of NCBI NO: 18076088 NR Description: cyclophilin [Ricinus communis]

SEQ ID NO: 103867 - protein, 155 aa, Arabidopsis thaliana; identical to SEQ ID NO: 29037
  peptide (1)..(155): Ceres Seq. ID no. 13613736
  misc_feature (1)..(155): Homolog of NCBI NO: 15228814 NR Description: peptidylprolyl isomerase [Arabidopsis thaliana]
  misc_feature (1)..(155): Homolog of NCBI NO: 1305457 NR Description: cytosolic cyclophilin [Arabidopsis thaliana]
  misc_feature (1)..(155): Homolog of NCBI NO: 11270314 NR Description: peptidylprolyl isomerase (EC 5.2.1.8) ATCYP4
  misc_feature (1)..(150): Homolog of NCBI NO: 1084454 NR Description: peptidylprolyl isomerase (EC 5.2.1.8) Cyp1 - rice
  misc_feature (1)..(150): Homolog of NCBI NO: 11270316 NR Description: peptidylprolyl isomerase (EC 5.2.1.8) - Digitalis lanata >gi|1563719|emb|CAA69622.1| cyclophylin
  misc_feature (1)..(150): Homolog of NCBI NO: 3334157 NR Description: Peptidyl-prolyl cis-trans isomerase (PPIase)
  misc_feature (1)..(150): Homolog of NCBI NO: 29124975 NR Description: cyclophilin [Populus tremuloides]
  misc_feature (1)..(150): Homolog of NCBI NO: 18076088 NR Description: cyclophilin [Ricinus communis]

SEQ ID NO: 103868 - DNA, 1905 bp, Arabidopsis thaliana
  misc_feature (1)..(1905): Ceres Seq. ID no. 13613759
  misc_feature: MA Experiment ID: 108434 Result: Down-regulated in Transcription
  misc_feature: MA Experiment 108434 PARAMETER Experiment Name: At_Root_Tips_cDNA_P Parameter: Tissue Value: Root Tips
  misc_feature: MA Experiment ID: 108461 Result: Down-regulated in Transcription
  misc_feature: MA Experiment 108461 PARAMETER Experiment Name: At_Germinating_Seeds_cDNA_P Parameter: Age (day) Value: 1 vs. 0
  misc_feature: MA Experiment 108461 PARAMETER Experiment Name: At_Germinating_Seeds_cDNA_P Parameter: Tissue Value: Germinating Seeds
  misc_feature: MA Experiment ID: 108462 Result: Down-regulated in Transcription
  misc_feature: MA Experiment 108462 PARAMETER Experiment Name: At_Germinating_Seeds_cDNA_P Parameter: Age (day) Value: 2 vs. 0
  misc_feature: MA Experiment 108462 PARAMETER Experiment Name: At_Germinating_Seeds_cDNA_P Parameter: Tissue Value: Germinating Seeds
  misc_feature: MA Experiment ID: 108463 Result: Down-regulated in Transcription
  misc_feature: MA Experiment 108463 PARAMETER Experiment Name: At_Germinating_Seeds_cDNA_P Parameter: Age (day) Value: 3 vs. 0
  misc_feature: MA Experiment 108463 PARAMETER Experiment Name: At_Germinating_Seeds_cDNA_P Parameter: Tissue Value: Germinating Seeds
  misc_feature: MA Experiment ID: 108464 Result: Down-regulated in Transcription
  misc_feature: MA Experiment 108464 PARAMETER Experiment Name: At_Germinating_Seeds_cDNA_P Parameter: Age (day) Value: 4 vs. 0
  misc_feature: MA Experiment 108464 PARAMETER Experiment Name: At_Germinating_Seeds_cDNA_P Parameter: Tissue Value: Germinating Seeds
  misc_feature: MA Experiment ID: 108488 Result: Down-regulated in Transcription
  misc_feature: MA Experiment ID: 108501 Result: Up-regulated in Transcription
  misc_feature: MA Experiment 108501 PARAMETER Experiment Name: At_ap2_floral_buds_cDNA_P Parameter: Plant Line Value: ap2 (Ler.)
  misc_feature: MA Experiment 108501 PARAMETER Experiment Name: At_ap2_floral_buds_cDNA_P Parameter: Tissue Value: Closed Flower
  misc_feature: MA Experiment ID: 108561 Result: Up-regulated in Transcription
  misc_feature: MA Experiment 108561 PARAMETER Experiment Name: At_100uM_ABA_cDNA_P Parameter: Timepoint (hr) Value: 6
  misc_feature: MA Experiment 108561 PARAMETER Experiment Name: At_100uM_ABA_cDNA_P Parameter: Tissue Value: Aerial
  misc_feature: MA Experiment 108561 PARAMETER Experiment Name: At_100uM_ABA_cDNA_P Parameter: Treatment Value: 100uM ABA vs. No Treatment
  misc_feature: MA Experiment ID: 108577 Result: Up-regulated in Transcription
  misc_feature: MA Experiment 108577 PARAMETER Experiment Name: At_42deg_Heat_cDNA_P Parameter: Temperature (deg C) Value: 42 vs. 22
  misc_feature: MA Experiment 108577 PARAMETER Experiment Name: At_42deg_Heat_cDNA_P Parameter: Timepoint (hr) Value: 6
  misc_feature: MA Experiment 108577 PARAMETER Experiment Name: At_42deg_Heat_cDNA_P Parameter: Tissue Value: Aerial
  misc_feature: MA Experiment ID: 108595 Result: Up-regulated in Transcription
  misc_feature: MA Experiment 108595 PARAMETER Experiment Name: At_Ler-pi_Ovule_cDNA_P Parameter: Plant Line Value: null
  misc_feature: MA Experiment ID: 20000071 Result: Up-regulated in Transcription
  misc_feature: MA Experiment 20000071 PARAMETER Experiment Name: At_100uM_ABA_Mutants_cDNA_P Parameter: Plant Line Value: CS8104
  misc_feature: MA Experiment 20000071 PARAMETER Experiment Name: At_100uM_ABA_Mutants_cDNA_P Parameter: Timepoint (hr) Value: 6
  misc_feature: MA Experiment 20000071 PARAMETER Experiment Name: At_100uM_ABA_Mutants_cDNA_P Parameter: Tissue Value: Aerial
  misc_feature: MA Experiment 20000071 PARAMETER Experiment Name: At_100uM_ABA_Mutants_cDNA_P Parameter: Treatment Value: 100uM ABA vs. No Treatment
  misc_feature: MA Experiment ID: 20000117 Result: Up-regulated in Transcription
  misc_feature: MA Experiment 20000117 PARAMETER Experiment Name: At_100uM_ABA_Mutants_cDNA_P Parameter: Plant Line Value: Columbia
  misc_feature: MA Experiment 20000117 PARAMETER Experiment Name: At_100uM_ABA_Mutants_cDNA_P Parameter: Timepoint (hr) Value: 6
  misc_feature: MA Experiment 20000117 PARAMETER Experiment Name: At_100uM_ABA_Mutants_cDNA_P Parameter: Tissue Value: Aerial
  misc_feature: MA Experiment 20000117 PARAMETER Experiment Name: At_100uM_ABA_Mutants_cDNA_P Parameter: Treatment Value: 100uM ABA vs. No Treatment
  misc_feature: MA Experiment ID: 20000307 Result: Down-regulated in Transcription
  misc_feature: MA Experiment 20000307 PARAMETER Experiment Name: At_Germinating_Seeds_Sub_P Parameter: Age (hr) Value: 24 vs. 0
  misc_feature: MA Experiment 20000307 PARAMETER Experiment Name: At_Germinating_Seeds_Sub_P Parameter: Organism Value: A. thaliana
  misc_feature: MA Experiment 20000307 PARAMETER Experiment Name: At_Germinating_Seeds_Sub_P Parameter: Plant Line Value: WS
  misc_feature: MA Experiment 20000307 PARAMETER Experiment Name: At_Germinating_Seeds_Sub_P Parameter: Tissue Value: Germinating Seeds
  misc_feature: MA Experiment ID: 20000314 Result: Down-regulated in Transcription
  misc_feature: MA Experiment 20000314 PARAMETER Experiment Name: At_14day_Shoots-Roots_Sub_P Parameter: Age (day) Value: 14
  misc_feature: MA Experiment 20000314 PARAMETER Experiment Name: At_14day_Shoots-Roots_Sub_P Parameter: Organism Value: A. thaliana
  misc_feature: MA Experiment 20000314 PARAMETER Experiment Name: At_14day_Shoots-Roots_Sub_P Parameter: Plant Line Value: WS
  misc_feature: MA Experiment 20000314 PARAMETER Experiment Name: At_14day_Shoots-Roots_Sub_P Parameter: Tissue Value: Roots vs. Whole Plant
  misc_feature: MA Experiment ID: 20000315 Result: Down-regulated in Transcription
  misc_feature: MA Experiment 20000315 PARAMETER Experiment Name: At_14day_Shoots-Roots_Sub_P Parameter: Age (day) Value: 14
  misc_feature: MA Experiment 20000315 PARAMETER Experiment Name: At_14day_Shoots-Roots_Sub_P Parameter: Organism Value: A. thaliana
  misc_feature: MA Experiment 20000315 PARAMETER Experiment Name: At_14day_Shoots-Roots_Sub_P Parameter: Plant Line Value: WS
  misc_feature: MA Experiment 20000315 PARAMETER Experiment Name: At_14day_Shoots-Roots_Sub_P Parameter: Tissue Value: Shoots vs. Whole Plant
  misc_feature: MA Experiment ID: 20000355 Result: Up-regulated in Transcription
  misc_feature: MA Experiment 20000355 PARAMETER Experiment Name: At_Siliques_Sub_P Parameter: Age (day) Value: 21
  misc_feature: MA Experiment 20000355 PARAMETER Experiment Name: At_Siliques_Sub_P Parameter: Organism Value: A. thaliana
  misc_feature: MA Experiment 20000355 PARAMETER Experiment Name: At_Siliques_Sub_P Parameter: Plant Line Value: WS
  misc_feature: MA Experiment 20000355 PARAMETER Experiment Name: At_Siliques_Sub_P Parameter: Tissue Value: Less Than 5mm Siliques vs. Whole Plant
ccaacacatttacttttcttcttcttctctctctacgccatagctatggttttaccagagcttctcgtgattctagcagaatgggttctttaccgtcttcttgctaaatcatgttacagagctgctagaaagctcagaggctatggtttccagttaaaaaatctcctaagcctctccaaaacacaatctctacacaacaattctcagcatcatcttcataaccatcatcaacaaaatcaccctaaccaaacccttcaagattctctagaccctctgttcccaagccttacaaaataccaagaacttcttctagacaaaaacagagcatgctctgtttcgtctgatcattatcgtgatacctttttctgcgatatcgatggtgttttattaagacaacattcgagcaaacacttccacacgttcttcccttacttcatgctcgtggcttttgaaggaggatcgatcatcagagcgatccttctcttgctctcctgttctttcctttggactctgcaacaagaaaccaaactcagagttctctctttcataaccttctctggtcttagagtcaaagacatggacaatgtttctagatcggttctaccaaaattcttcctcgagaacttgaatatccaagtttacgacatctgggctcgaactgagtactccaaagttgtgttcacgagcttgccgcaagtgctggtggagaggttcctcagagaacatctcaacgctgatgatgtgattgggactaaactgcaagaaataaaagtcatgggaaggaaattctacacaggcctagcttctggttctggtttcgtcctgaaacataaatcagctgaagactacttttttgatagcaagaagaagcctgcacttggaattggaagctcttcaagcccacaagatcacatcttcatctccatttgcaaagaagcttatttttggaatgaagaagagtccatgagcaagaacaacgcattgcctagagaaagatacccaaagccactgatattccacgacgggagattggctttcttgccaacaccattagctacattagccatgttcatatggctccctatcggatttttactcgctgtcttcaggatctcggtaggagtctttcttccttaccatgtagccaatttcttggcttctatgtccggtgttaggatcactttcaagacccataatttgaataacggtcgtccagagaaaggtaatagtggagtcttgtatgtatgcaaccataggaccctcctcgacccagttttcctcaccacttcgctgggcaagcccttgaccgcggttacttacagcctaagcaagttctccgagttcatagcacctctcaagacggttagccttaaaagagataggaagaaagacggtgaggcaatgcagagactattaagcaaaggagatctagtggtttgtccggagggaaccacatgtagagagccttatctactaaggttcagtcctttgttcgctgagttaactgaagacattgttcccgtggctgtagatgctcgagtgagcatgttctatgggacaactgcgagcgggctcaagtgtttagaccctatcttcttcctcatgaaccctaggccggtttattgtcttgagattttaaagaagttgccaaaagagatgacttgtgcaggaggcaagtcaagctttgaagttgcgaatttcatacagggagaacttgctagggttttgggatttgaatgcactaatctcacaaggagggataagtacttggttcttgctggaaatgaaggcattgtcagataaactattccgaattttcattagtttttttgtttgtttgaaaagctaaatattattgttatttcaggacttagatgtttaattctatatggttgattcattggc

SEQ ID NO: 103869 - protein, 600 aa, Arabidopsis thaliana
  peptide (1)..(600): Ceres Seq. ID no. 13613760
  misc_feature (16)..(600): Homolog of NCBI NO: 18390661 NR Description: phospholipid/glycerol acyltransferase family
  misc_feature (16)..(600): Homolog of NCBI NO: 21618047 NR Description: unknown [Arabidopsis thaliana]
  misc_feature (106)..(600): Homolog of NCBI NO: 18378959 NR Description: phospholipid/glycerol acyltransferase family
  misc_feature (110)..(599): Homolog of NCBI NO: 15224445 NR Description: phospholipid/glycerol acyltransferase family
  misc_feature (110)..(599): Homolog of NCBI NO: 38000002 NR Description: unknown protein [Oryza sativa (japonica
  misc_feature (112)..(600): Homolog of NCBI NO: 15235185 NR Description: phospholipid/glycerol acyltransferase family
  misc_feature (124)..(599): Homolog of NCBI NO: 37534314 NR Description: hypothetical protein [Oryza sativa (japonica group)] >gi|31432061|gb|AAP53746.1| hypothetical protein [Oryza
  misc_feature (119)..(599): Homolog of NCBI NO: 15223437 NR Description: expressed protein [Arabidopsis thaliana]
  misc_feature (119)..(599): Homolog of NCBI NO: 17064780 NR Description: Unknown protein [Arabidopsis thaliana]
  misc_feature (148)..(599): Homolog of NCBI NO: 29788867 NR Description: hypothetical protein [Oryza sativa (japonica
PTHLLFFFFSLYAIAMVLPELLVILAEWVLYRLLAKSCYRAARKLRGYGFQLKNLLSLSKTQSLHNNSQHHLHNHHQQNHPNQTLQDSLDPLFPSLTKYQELLLDKNRACSVSSDHYRDTFFCDIDGVLLRQHSSKHFHTFFPYFMLVAFEGGSIIRAILLLLSCSFLWTLQQETKLRVLSFITFSGLRVKDMDNVSRSVLPKFFLENLNIQVYDIWARTEYSKVVFTSLPQVLVERFLREHLNADDVIGTKLQEIKVMGRKFYTGLASGSGFVLKHKSAEDYFFDSKKKPALGIGSSSSPQDHIFISICKEAYFWNEEESMSKNNALPRERYPKPLIFHDGRLAFLPTPLATLAMFIWLPIGFLLAVFRISVGVFLPYHVANFLASMSGVRITFKTHNLNNGRPEKGNSGVLYVCNHRTLLDPVFLTTSLGKPLTAVTYSLSKFSEFIAPLKTVSLKRDRKKDGEAMQRLLSKGDLVVCPEGTTCREPYLLRFSPLFAELTEDIVPVAVDARVSMFYGTTASGLKCLDPIFFLMNPRPVYCLEILKKLPKEMTCAGGKSSFEVANFIQGELARVLGFECTNLTRRDKYLVLAGNEGIVR

SEQ ID NO: 103870 - protein, 585 aa, Arabidopsis thaliana
  peptide (1)..(585): Ceres Seq. ID no. 13613761
  misc_feature (1)..(585): Homolog of NCBI NO: 18390661 NR Description: phospholipid/glycerol acyltransferase family
  misc_feature (1)..(585): Homolog of NCBI NO: 21618047 NR Description: unknown [Arabidopsis thaliana]
  misc_feature (91)..(585): Homolog of NCBI NO: 18378959 NR Description: phospholipid/glycerol acyltransferase family
  misc_feature (95)..(584): Homolog of NCBI NO: 15224445 NR Description: phospholipid/glycerol acyltransferase family
  misc_feature (95)..(584): Homolog of NCBI NO: 38000002 NR Description: unknown protein [Oryza sativa (japonica
  misc_feature (97)..(585): Homolog of NCBI NO: 15235185 NR Description: phospholipid/glycerol acyltransferase family
  misc_feature (109)..(584): Homolog of NCBI NO: 37534314 NR Description: hypothetical protein [Oryza sativa (japonica group)] >gi|31432061|gb|AAP53746.1| hypothetical protein [Oryza
  misc_feature (104)..(584): Homolog of NCBI NO: 15223437 NR Description: expressed protein [Arabidopsis thaliana]
  misc_feature (104)..(584): Homolog of NCBI NO: 17064780 NR Description: Unknown protein [Arabidopsis thaliana]
  misc_feature (133)..(584): Homolog of NCBI NO: 29788867 NR Description: hypothetical protein [Oryza sativa (japonica
MVLPELLVILAEWVLYRLLAKSCYRAARKLRGYGFQLKNLLSLSKTQSLHNNSQHHLHNHHQQNHPNQTLQDSLDPLFPSLTKYQELLLDKNRACSVSSDHYRDTFFCDIDGVLLRQHSSKHFHTFFPYFMLVAFEGGSIIRAILLLLSCSFLWTLQQETKLRVLSFITFSGLRVKDMDNVSRSVLPKFFLENLNIQVYDIWARTEYSKVVFTSLPQVLVERFLREHLNADDVIGTKLQEIKVMGRKFYTGLASGSGFVLKHKSAEDYFFDSKKKPALGIGSSSSPQDHIFISICKEAYFWNEEESMSKNNALPRERYPKPLIFHDGRLAFLPTPLATLAMFIWLPIGFLLAVFRISVGVFLPYHVANFLASMSGVRITFKTHNLNNGRPEKGNSGVLYVCNHRTLLDPVFLTTSLGKPLTAVTYSLSKFSEFIAPLKTVSLKRDRKKDGEAMQRLLSKGDLVVCPEGTTCREPYLLRFSPLFAELTEDIVPVAVDARVSMFYGTTASGLKCLDPIFFLMNPRPVYCLEILKKLPKEMTCAGGKSSFEVANFIQGELARVLGFECTNLTRRDKYLVLAGNEGIVR

SEQ ID NO: 103871 - protein, 455 aa, Arabidopsis thaliana
  peptide (1)..(455): Ceres Seq. ID no. 13613762
  misc_feature (1)..(455): Homolog of NCBI NO: 18390661 NR Description: phospholipid/glycerol acyltransferase family
  misc_feature (1)..(455): Homolog of NCBI NO: 21618047 NR Description: unknown [Arabidopsis thaliana]
  misc_feature (1)..(455): Homolog of NCBI NO: 18378959 NR Description: phospholipid/glycerol acyltransferase family
  misc_feature (1)..(454): Homolog of NCBI NO: 15224445 NR Description: phospholipid/glycerol acyltransferase family
  misc_feature (1)..(454): Homolog of NCBI NO: 38000002 NR Description: unknown protein [Oryza sativa (japonica
  misc_feature (1)..(455): Homolog of NCBI NO: 15235185 NR Description: phospholipid/glycerol acyltransferase family
  misc_feature (1)..(454): Homolog of NCBI NO: 37534314 NR Description: hypothetical protein [Oryza sativa (japonica group)] >gi|31432061|gb|AAP53746.1| hypothetical protein [Oryza
  misc_feature (1)..(454): Homolog of NCBI NO: 15223437 NR Description: expressed protein [Arabidopsis thaliana]
  misc_feature (1)..(454): Homolog of NCBI NO: 17064780 NR Description: Unknown protein [Arabidopsis thaliana]
  misc_feature (3)..(454): Homolog of NCBI NO: 29788867 NR Description: hypothetical protein [Oryza sativa (japonica
MLVAFEGGSIIRAILLLLSCSFLWTLQQETKLRVLSFITFSGLRVKDMDNVSRSVLPKFFLENLNIQVYDIWARTEYSKVVFTSLPQVLVERFLREHLNADDVIGTKLQEIKVMGRKFYTGLASGSGFVLKHKSAEDYFFDSKKKPALGIGSSSSPQDHIFISICKEAYFWNEEESMSKNNALPRERYPKPLIFHDGRLAFLPTPLATLAMFIWLPIGFLLAVFRISVGVFLPYHVANFLASMSGVRITFKTHNLNNGRPEKGNSGVLYVCNHRTLLDPVFLTTSLGKPLTAVTYSLSKFSEFIAPLKTVSLKRDRKKDGEAMQRLLSKGDLVVCPEGTTCREPYLLRFSPLFAELTEDIVPVAVDARVSMFYGTTASGLKCLDPIFFLMNPRPVYCLEILKKLPKEMTCAGGKSSFEVANFIQGELARVLGFECTNLTRRDKYLVLAGNEGIVR

SEQ ID NO: 103872 - DNA, 1230 bp, Arabidopsis thaliana
  misc_feature (1)..(1230): Ceres Seq. ID no. 13613771
  misc_feature: MA Experiment ID: 20000265 Result: Up-regulated in Transcription
  misc_feature: MA Experiment 20000265 PARAMETER Experiment Name: At_Open_Flower_P Parameter: Age (day) Value: 21
  misc_feature: MA Experiment 20000265 PARAMETER Experiment Name: At_Open_Flower_P Parameter: Plant Line Value: WS
  misc_feature: MA Experiment 20000265 PARAMETER Experiment Name: At_Open_Flower_P Parameter: Tissue Value: Closed Flower vs. Whole Plant
  misc_feature: MA Experiment ID: 20000286 Result: Up-regulated in Transcription
  misc_feature: MA Experiment 20000286 PARAMETER Experiment Name: At_Open_Flower_P Parameter: Age (day) Value: 21
  misc_feature: MA Experiment 20000286 PARAMETER Experiment Name: At_Open_Flower_P Parameter: Plant Line Value: WS
  misc_feature: MA Experiment 20000286 PARAMETER Experiment Name: At_Open_Flower_P Parameter: Tissue Value: Half Open vs. Whole Plant
  misc_feature: MA Experiment ID: 20001910 Result: Down-regulated in Transcription
  misc_feature: MA Experiment 20001910 PARAMETER Experiment Name: At_Drought_Reproduction_P Parameter: Age (day) Value: 37
  misc_feature: MA Experiment 20001910 PARAMETER Experiment Name: At_Drought_Reproduction_P Parameter: Organism Value: A. thaliana
  misc_feature: MA Experiment 20001910 PARAMETER Experiment Name: At_Drought_Reproduction_P Parameter: Plant Line Value: WS
  misc_feature: MA Experiment 20001910 PARAMETER Experiment Name: At_Drought_Reproduction_P Parameter: Timepoint (day) Value: 7
  misc_feature: MA Experiment 20001910 PARAMETER Experiment Name: At_Drought_Reproduction_P Parameter: Tissue Value: Flowers
  misc_feature: MA Experiment 20001910 PARAMETER Experiment Name: At_Drought_Reproduction_P Parameter: Treatment Value: Drought vs. No Drought
gacaaaatgttgatccatgtaattatattcatgatcataacgacaatgcaattctcgacgacatgccatgcatatgtgattaacgtgaccaacgttaacgtatcaatgttcccggctattcttgtattcggggattcaacaatcgataccggcaacaacaactacatcaaaacctacatccgggctaatttccctccttacggctgcaatttccccggccacaacgctaccggaagattctctaacggtaaacttattccggacttcatagcatctcttatgggaatcaaagacaccgttcctcctttcctagaccctcacttgtctgattccgatatcatcaccggagtgtgctttgcttcggctggttccggttacgacaacctcacagatcgagcaacttcaactctatccgttgataaacaggcggatatgctcagaagttacgtggagaggttgagccagatcgtcggggacgagaaagcggcctcgatagtcagcgaggctctggtgattgtaagctccggaactaacgatttcaatctaaatctctacgatactccttctcgtcgtcagaagcttggcgttgatggctatcaaagcttcattctctcgaatgtacacaacttcgttcaagaactatatgacattggatgccgtaaaataatggtgttgggtctaccgccggtcgggtgtttaccaattcagatgacaatggctatgcaaaagcagaacgagagacgatgcatcgacaaacaaaactcagattcacaagagtttaaccagaagctaaaaaactccttgacggagatgcaatccaacctcactggaagtgtcatcttctacggcgatatctacggagcattgttcgacatggccactaatcctcaaagatacgggttaaaggagacgacgagaggatgttgcgggactggagaaatagagttagcgtacttgtgcaatgctttaactcggatttgtcctaaccctaaccagtaccttttctgggacgatattcatccttcccaaattgcttacatagtcatcagtctcagtcttgttgaacaaattttccacgtactctcttgattttcattttgctttcatatatattaattaatctgtagtcaatctataattatttccctgtgggttcacataatctttcgtatttgcttaagctaggttttacatgtatactattatgatattatactactctatcctggt

SEQ ID NO: 103873 - protein, 362 aa, Arabidopsis thaliana
  peptide (1)..(362): Ceres Seq. ID no. 13613772
  misc_feature (40)..(353): Pfam Name: GDSL-like Lipase/Acylhydrolase Pfam Description: GDSL-like Lipase/Acylhydrolase
  misc_feature (3)..(362): Homolog of NCBI NO: 18390708 NR Description: GDSL-motif lipase/hydrolase protein [Arabidopsis
  misc_feature (11)..(362): Homolog of NCBI NO: 21554186 NR Description: Contains similarity to proline-rich protein APG
  misc_feature (16)..(362): Homolog of NCBI NO: 25336267 NR Description: hypothetical protein [imported] - Arabidopsis
  misc_feature (8)..(346): Homolog of NCBI NO: 15217963 NR Description: GDSL-motif lipase/hydrolase protein [Arabidopsis
  misc_feature (8)..(346): Homolog of NCBI NO: 25336283 NR Description: hypothetical protein RXF26 [imported] -
  misc_feature (13)..(346): Homolog of NCBI NO: 21592974 NR Description: proline-rich protein, putative [Arabidopsis
  misc_feature (8)..(357): Homolog of NCBI NO: 15227734 NR Description: GDSL-motif lipase/hydrolase protein [Arabidopsis
  misc_feature (8)..(346): Homolog of NCBI NO: 15227723 NR Description: GDSL-motif lipase/hydrolase protein [Arabidopsis
  misc_feature (12)..(349): Homolog of NCBI NO: 21537117 NR Description: putative GDSL-motif lipase/hydrolase [Arabidopsis
  misc_feature (12)..(349): Homolog of NCBI NO: 15225096 NR Description: GDSL-motif lipase/hydrolase protein [Arabidopsis
DKMLIHVIIFMIITTMQFSTTCHAYVINVTNVNVSMFPAILVFGDSTIDTGNNNYIKTYIRANFPPYGCNFPGHNATGRFSNGKLIPDFIASLMGIKDTVPPFLDPHLSDSDIITGVCFASAGSGYDNLTDRATSTLSVDKQADMLRSYVERLSQIVGDEKAASIVSEALVIVSSGTNDFNLNLYDTPSRRQKLGVDGYQSFILSNVHNFVQELYDIGCRKIMVLGLPPVGCLPIQMTMAMQKQNERRCIDKQNSDSQEFNQKLKNSLTEMQSNLTGSVIFYGDIYGALFDMATNPQRYGLKETTRGCCGTGEIELAYLCNALTRICPNPNQYLFWDDIHPSQIAYIVISLSLVEQIFHVLS

SEQ ID NO: 103874 - protein, 360 aa, Arabidopsis thaliana
  peptide (1)..(360): Ceres Seq. ID no. 13613773
  misc_feature (38)..(351): Pfam Name: GDSL-like Lipase/Acylhydrolase Pfam Description: GDSL-like Lipase/Acylhydrolase
  misc_feature (1)..(360): Homolog of NCBI NO: 18390708 NR Description: GDSL-motif lipase/hydrolase protein [Arabidopsis
  misc_feature (9)..(360): Homolog of NCBI NO: 21554186 NR Description: Contains similarity to proline-rich protein APG
  misc_feature (14)..(360): Homolog of NCBI NO: 25336267 NR Description: hypothetical protein [imported] - Arabidopsis
  misc_feature (6)..(344): Homolog of NCBI NO: 15217963 NR Description: GDSL-motif lipase/hydrolase protein [Arabidopsis
  misc_feature (6)..(344): Homolog of NCBI NO: 25336283 NR Description: hypothetical protein RXF26 [imported] -
  misc_feature (11)..(344): Homolog of NCBI NO: 21592974 NR Description: proline-rich protein, putative [Arabidopsis
  misc_feature (6)..(355): Homolog of NCBI NO: 15227734 NR Description: GDSL-motif lipase/hydrolase protein [Arabidopsis
  misc_feature (6)..(344): Homolog of NCBI NO: 15227723 NR Description: GDSL-motif lipase/hydrolase protein [Arabidopsis
  misc_feature (10)..(347): Homolog of NCBI NO: 21537117 NR Description: putative GDSL-motif lipase/hydrolase [Arabidopsis
  misc_feature (10)..(347): Homolog of NCBI NO: 15225096 NR Description: GDSL-motif lipase/hydrolase protein [Arabidopsis
MLIHVIIFMIITTMQFSTTCHAYVINVTNVNVSMFPAILVFGDSTIDTGNNNYIKTYIRANFPPYGCNFPGHNATGRFSNGKLIPDFIASLMGIKDTVPPFLDPHLSDSDIITGVCFASAGSGYDNLTDRATSTLSVDKQADMLRSYVERLSQIVGDEKAASIVSEALVIVSSGTNDFNLNLYDTPSRRQKLGVDGYQSFILSNVHNFVQELYDIGCRKIMVLGLPPVGCLPIQMTMAMQKQNERRCIDKQNSDSQEFNQKLKNSLTEMQSNLTGSVIFYGDIYGALFDMATNPQRYGLKETTRGCCGTGEIELAYLCNALTRICPNPNQYLFWDDIHPSQIAYIVISLSLVEQIFHVLS

SEQ ID NO: 103875 - protein, 352 aa, Arabidopsis thaliana
  peptide (1)..(352): Ceres Seq. ID no. 13613774
  misc_feature (30)..(343): Pfam Name: GDSL-like Lipase/Acylhydrolase Pfam Description: GDSL-like Lipase/Acylhydrolase
  misc_feature (1)..(352): Homolog of NCBI NO: 18390708 NR Description: GDSL-motif lipase/hydrolase protein [Arabidopsis
  misc_feature (1)..(352): Homolog of NCBI NO: 21554186 NR Description: Contains similarity to proline-rich protein APG
  misc_feature (6)..(352): Homolog of NCBI NO: 25336267 NR Description: hypothetical protein [imported] - Arabidopsis
  misc_feature (1)..(336): Homolog of NCBI NO: 15217963 NR Description: GDSL-motif lipase/hydrolase protein [Arabidopsis
  misc_feature (1)..(336): Homolog of NCBI NO: 25336283 NR Description: hypothetical protein RXF26 [imported] -
  misc_feature (3)..(336): Homolog of NCBI NO: 21592974 NR Description: proline-rich protein, putative [Arabidopsis
  misc_feature (1)..(347): Homolog of NCBI NO: 15227734 NR Description: GDSL-motif lipase/hydrolase protein [Arabidopsis
  misc_feature (1)..(336): Homolog of NCBI NO: 15227723 NR Description: GDSL-motif lipase/hydrolase protein [Arabidopsis
  misc_feature (2)..(339): Homolog of NCBI NO: 21537117 NR Description: putative GDSL-motif lipase/hydrolase [Arabidopsis
  misc_feature (2)..(339): Homolog of NCBI NO: 15225096 NR Description: GDSL-motif lipase/hydrolase protein [Arabidopsis
MIITTMQFSTTCHAYVINVTNVNVSMFPAILVFGDSTIDTGNNNYIKTYIRANFPPYGCNFPGHNATGRFSNGKLIPDFIASLMGIKDTVPPFLDPHLSDSDIITGVCFASAGSGYDNLTDRATSTLSVDKQADMLRSYVERLSQIVGDEKAASIVSEALVIVSSGTNDFNLNLYDTPSRRQKLGVDGYQSFILSNVHNFVQELYDIGCRKIMVLGLPPVGCLPIQMTMAMQKQNERRCIDKQNSDSQEFNQKLKNSLTEMQSNLTGSVIFYGDIYGALFDMATNPQRYGLKETTRGCCGTGEIELAYLCNALTRICPNPNQYLFWDDIHPSQIAYIVISLSLVEQIFHVLS

SEQ ID NO: 103876 - DNA, 1817 bp, Arabidopsis thaliana
  misc_feature (1)..(1817): Ceres Seq. ID no. 13613793
  misc_feature: MA Experiment ID: 108435 Result: Down-regulated in Transcription
  misc_feature: MA Experiment 108435 PARAMETER Experiment Name: At_stm_Mutants_cDNA_P Parameter: Plant Line Value: wt Landsburg vs stm
  misc_feature: MA Experiment 108435 PARAMETER Experiment Name: At_stm_Mutants_cDNA_P Parameter: Tissue Value: Shoot Apical Meristem Region
  misc_feature: MA Experiment ID: 108461 Result: Down-regulated in Transcription
  misc_feature: MA Experiment 108461 PARAMETER Experiment Name: At_Germinating_Seeds_cDNA_P Parameter: Age (day) Value: 1 vs. 0
  misc_feature: MA Experiment 108461 PARAMETER Experiment Name: At_Germinating_Seeds_cDNA_P Parameter: Tissue Value: Germinating Seeds
  misc_feature: MA Experiment ID: 108462 Result: Down-regulated in Transcription
  misc_feature: MA Experiment 108462 PARAMETER Experiment Name: At_Germinating_Seeds_cDNA_P Parameter: Age (day) Value: 2 vs. 0
  misc_feature: MA Experiment 108462 PARAMETER Experiment Name: At_Germinating_Seeds_cDNA_P Parameter: Tissue Value: Germinating Seeds
  misc_feature: MA Experiment ID: 108463 Result: Down-regulated in Transcription
  misc_feature: MA Experiment 108463 PARAMETER Experiment Name: At_Germinating_Seeds_cDNA_P Parameter: Age (day) Value: 3 vs. 0
  misc_feature: MA Experiment 108463 PARAMETER Experiment Name: At_Germinating_Seeds_cDNA_P Parameter: Tissue Value: Germinating Seeds
  misc_feature: MA Experiment ID: 108464 Result: Down-regulated in Transcription
  misc_feature: MA Experiment 108464 PARAMETER Experiment Name: At_Germinating_Seeds_cDNA_P Parameter: Age (day) Value: 4 vs. 0
  misc_feature: MA Experiment 108464 PARAMETER Experiment Name: At_Germinating_Seeds_cDNA_P Parameter: Tissue Value: Germinating Seeds
  misc_feature: MA Experiment ID: 108473 Result: Up-regulated in Transcription
  misc_feature: MA Experiment 108473 PARAMETER Experiment Name: At_Drought_Flowers_cDNA_P Parameter: Timepoint (hr) Value: 7 d
  misc_feature: MA Experiment 108473 PARAMETER Experiment Name: At_Drought_Flowers_cDNA_P Parameter: Tissue Value: Flower
  misc_feature: MA Experiment 108473 PARAMETER Experiment Name: At_Drought_Flowers_cDNA_P Parameter: Treatment Value: Drought vs. No Drought
  misc_feature: MA Experiment ID: 108488 Result: Down-regulated in Transcription
  misc_feature: MA Experiment ID: 108561 Result: Up-regulated in Transcription
  misc_feature: MA Experiment 108561 PARAMETER Experiment Name: At_100uM_ABA_cDNA_P Parameter: Timepoint (hr) Value: 6
  misc_feature: MA Experiment 108561 PARAMETER Experiment Name: At_100uM_ABA_cDNA_P Parameter: Tissue Value: Aerial
  misc_feature: MA Experiment 108561 PARAMETER Experiment Name: At_100uM_ABA_cDNA_P Parameter: Treatment Value: 100uM ABA vs. No Treatment
  misc_feature: MA Experiment ID: 108572 Result: Up-regulated in Transcription
  misc_feature: MA Experiment 108572 PARAMETER Experiment Name: At_Drought_cDNA_P Parameter: Timepoint (hr) Value: 1
  misc_feature: MA Experiment 108572 PARAMETER Experiment Name: At_Drought_cDNA_P Parameter: Tissue Value: Aerial
  misc_feature: MA Experiment 108572 PARAMETER Experiment Name: At_Drought_cDNA_P Parameter: Treatment Value: Drought vs. No Drought
  misc_feature: MA Experiment ID: 108573 Result: Up-regulated in Transcription
  misc_feature: MA Experiment 108573 PARAMETER Experiment Name: At_Drought_cDNA_P Parameter: Timepoint (hr) Value: 6
  misc_feature: MA Experiment 108573 PARAMETER Experiment Name: At_Drought_cDNA_P Parameter: Tissue Value: Aerial
  misc_feature: MA Experiment 108573 PARAMETER Experiment Name: At_Drought_cDNA_P Parameter: Treatment Value: Drought vs. No Drought
  misc_feature: MA Experiment ID: 108585 Result: Up-regulated in Transcription
  misc_feature: MA Experiment 108585 PARAMETER Experiment Name: At_5mM_NaNP_cDNA_P Parameter: Timepoint (hr) Value: 6
  misc_feature: MA Experiment 108585 PARAMETER Experiment Name: At_5mM_NaNP_cDNA_P Parameter: Tissue Value: Aerial
  misc_feature: MA Experiment 108585 PARAMETER Experiment Name: At_5mM_NaNP_cDNA_P Parameter: Treatment Value: null
  misc_feature: MA Experiment ID: 108594 Result: Down-regulated in Transcription
  misc_feature: MA Experiment 108594 PARAMETER Experiment Name: At_Ler-rhl_Root_cDNA_P Parameter: Plant Line Value: null
  misc_feature: MA Experiment ID: 108605 Result: Up-regulated in Transcription
  misc_feature: MA Experiment 108605 PARAMETER Experiment Name: At_100uM_ABA_cDNA_P Parameter: Timepoint (hr) Value: 6
  misc_feature: MA Experiment 108605 PARAMETER Experiment Name: At_100uM_ABA_cDNA_P Parameter: Tissue Value: Aerial
  misc_feature: MA Experiment 108605 PARAMETER Experiment Name: At_100uM_ABA_cDNA_P Parameter: Treatment Value: 100uM ABA vs. No Treatment
  misc_feature: MA Experiment ID: 108607 Result: Up-regulated in Transcription
  misc_feature: MA Experiment 108607 PARAMETER Experiment Name: At_100uM_ABA_cDNA_P Parameter: Timepoint (hr) Value: 4
  misc_feature: MA Experiment 108607 PARAMETER Experiment Name: At_100uM_ABA_cDNA_P Parameter: Tissue Value: Aerial
  misc_feature: MA Experiment 108607 PARAMETER Experiment Name: At_100uM_ABA_cDNA_P Parameter: Treatment Value: 100uM ABA vs. No Treatment
  misc_feature: MA Experiment ID: 108609 Result: Up-regulated in Transcription
  misc_feature: MA Experiment 108609 PARAMETER Experiment Name: At_100uM_ABA_cDNA_P Parameter: Timepoint (hr) Value: 24
  misc_feature: MA Experiment 108609 PARAMETER Experiment Name: At_100uM_ABA_cDNA_P Parameter: Tissue Value: Aerial
  misc_feature: MA Experiment 108609 PARAMETER Experiment Name: At_100uM_ABA_cDNA_P Parameter: Treatment Value: 100uM ABA vs. No Treatment
  misc_feature: MA Experiment ID: 108668 Result: Up-regulated in Transcription
  misc_feature: MA Experiment 108668 PARAMETER Experiment Name: At_2mM_SA_cDNA_P Parameter: Plant Line Value: WS
  misc_feature: MA Experiment 108668 PARAMETER Experiment Name: At_2mM_SA_cDNA_P Parameter: Timepoint (hr) Value: 6
  misc_feature: MA Experiment 108668 PARAMETER Experiment Name: At_2mM_SA_cDNA_P Parameter: Treatment Value: 2mM SA vs. No Treatment
  misc_feature: MA Experiment ID: 20000070 Result: Up-regulated in Transcription
  misc_feature: MA Experiment 20000070 PARAMETER Experiment Name: At_100uM_ABA_Mutants_cDNA_P Parameter: Plant Line Value: CS24
  misc_feature: MA Experiment 20000070 PARAMETER Experiment Name: At_100uM_ABA_Mutants_cDNA_P Parameter: Timepoint (hr) Value: 6
  misc_feature: MA Experiment 20000070 PARAMETER Experiment Name: At_100uM_ABA_Mutants_cDNA_P Parameter: Tissue Value: Aerial
  misc_feature: MA Experiment 20000070 PARAMETER Experiment Name: At_100uM_ABA_Mutants_cDNA_P Parameter: Treatment Value: 100uM ABA vs. No Treatment
  misc_feature: MA Experiment ID: 20000071 Result: Up-regulated in Transcription
  misc_feature: MA Experiment 20000071 PARAMETER Experiment Name: At_100uM_ABA_Mutants_cDNA_P Parameter: Plant Line Value: CS8104
  misc_feature: MA Experiment 20000071 PARAMETER Experiment Name: At_100uM_ABA_Mutants_cDNA_P Parameter: Timepoint (hr) Value: 6
  misc_feature: MA Experiment 20000071 PARAMETER Experiment Name: At_100uM_ABA_Mutants_cDNA_P Parameter: Tissue Value: Aerial
  misc_feature: MA Experiment 20000071 PARAMETER Experiment Name: At_100uM_ABA_Mutants_cDNA_P Parameter: Treatment Value: 100uM ABA vs. No Treatment
  misc_feature: MA Experiment ID: 20000086 Result: Up-regulated in Transcription
  misc_feature: MA Experiment 20000086 PARAMETER Experiment Name: At_100uM_ABA_Mutants_cDNA_P Parameter: Plant Line Value: CS22
  misc_feature: MA Experiment 20000086 PARAMETER Experiment Name: At_100uM_ABA_Mutants_cDNA_P Parameter: Timepoint (hr) Value: 6
  misc_feature: MA Experiment 20000086 PARAMETER Experiment Name: At_100uM_ABA_Mutants_cDNA_P Parameter: Tissue Value: Aerial
  misc_feature: MA Experiment 20000086 PARAMETER Experiment Name: At_100uM_ABA_Mutants_cDNA_P Parameter: Treatment Value: 100uM ABA vs. No Treatment
  misc_feature: MA Experiment ID: 20000087 Result: Up-regulated in Transcription
  misc_feature: MA Experiment 20000087 PARAMETER Experiment Name: At_100uM_ABA_Mutants_cDNA_P Parameter: Plant Line Value: WS
  misc_feature: MA Experiment 20000087 PARAMETER Experiment Name: At_100uM_ABA_Mutants_cDNA_P Parameter: Timepoint (hr) Value: 6
  misc_feature: MA Experiment 20000087 PARAMETER Experiment Name: At_100uM_ABA_Mutants_cDNA_P Parameter: Tissue Value: Aerial
  misc_feature: MA Experiment 20000087 PARAMETER Experiment Name: At_100uM_ABA_Mutants_cDNA_P Parameter: Treatment Value: 100uM ABA vs. No Treatment
  misc_feature: MA Experiment ID: 20000088 Result: Up-regulated in Transcription
  misc_feature: MA Experiment 20000088 PARAMETER Experiment Name: At_100uM_ABA_Mutants_cDNA_P Parameter: Plant Line Value: Landsberg
  misc_feature: MA Experiment 20000088 PARAMETER Experiment Name: At_100uM_ABA_Mutants_cDNA_P Parameter: Timepoint (hr) Value: 6
  misc_feature: MA Experiment 20000088 PARAMETER Experiment Name: At_100uM_ABA_Mutants_cDNA_P Parameter: Tissue Value: Aerial
  misc_feature: MA Experiment 20000088 PARAMETER Experiment Name: At_100uM_ABA_Mutants_cDNA_P Parameter: Treatment Value: 100uM ABA vs. No Treatment
  misc_feature: MA Experiment ID: 20000117 Result: Up-regulated in Transcription
  misc_feature: MA Experiment 20000117 PARAMETER Experiment Name: At_100uM_ABA_Mutants_cDNA_P Parameter: Plant Line Value: Columbia
  misc_feature: MA Experiment 20000117 PARAMETER Experiment Name: At_100uM_ABA_Mutants_cDNA_P Parameter: Timepoint (hr) Value: 6
  misc_feature: MA Experiment 20000117 PARAMETER Experiment Name: At_100uM_ABA_Mutants_cDNA_P Parameter: Tissue Value: Aerial
  misc_feature: MA Experiment 20000117 PARAMETER Experiment Name: At_100uM_ABA_Mutants_cDNA_P Parameter: Treatment Value: 100uM ABA vs. No Treatment
  misc_feature: MA Experiment ID: 20000166 Result: Up-regulated in Transcription
  misc_feature: MA Experiment 20000166 PARAMETER Experiment Name: At_100uM_ABA_P Parameter: Age (day) Value: 14
  misc_feature: MA Experiment 20000166 PARAMETER Experiment Name: At_100uM_ABA_P Parameter: Organism Value: A. thaliana
  misc_feature: MA Experiment 20000166 PARAMETER Experiment Name: At_100uM_ABA_P Parameter: Plant Line Value: WS
  misc_feature: MA Experiment 20000166 PARAMETER Experiment Name: At_100uM_ABA_P Parameter: Timepoint (hr) Value: 1
  misc_feature: MA Experiment 20000166 PARAMETER Experiment Name: At_100uM_ABA_P Parameter: Tissue Value: Aerial
  misc_feature: MA Experiment 20000166 PARAMETER Experiment Name: At_100uM_ABA_P Parameter: Treatment Value: 100uM ABA vs. No Treatment
  misc_feature: MA Experiment ID: 20000169 Result: Up-regulated in Transcription
  misc_feature: MA Experiment 20000169 PARAMETER Experiment Name: At_100uM_ABA_P Parameter: Age (day) Value: 14
  misc_feature: MA Experiment 20000169 PARAMETER Experiment Name: At_100uM_ABA_P Parameter: Organism Value: A. thaliana
  misc_feature: MA Experiment 20000169 PARAMETER Experiment Name: At_100uM_ABA_P Parameter: Plant Line Value: WS
  misc_feature: MA Experiment 20000169 PARAMETER Experiment Name: At_100uM_ABA_P Parameter: Timepoint (hr) Value: 6
  misc_feature: MA Experiment 20000169 PARAMETER Experiment Name: At_100uM_ABA_P Parameter: Tissue Value: Aerial
  misc_feature: MA Experiment 20000169 PARAMETER Experiment Name: At_100uM_ABA_P Parameter: Treatment Value: 100uM ABA vs. No Treatment
  misc_feature: MA Experiment ID: 20000180 Result: Down-regulated in Transcription
  misc_feature: MA Experiment 20000180 PARAMETER Experiment Name: At_Germinating_Seeds_P Parameter: Age (hr) Value: 24 vs. 0
  misc_feature: MA Experiment 20000180 PARAMETER Experiment Name: At_Germinating_Seeds_P Parameter: Tissue Value: Germinating Seeds
  misc_feature: MA Experiment ID: 20000182 Result: Up-regulated in Transcription
  misc_feature: MA Experiment 20000182 PARAMETER Experiment Name: At_2mM_SA_P Parameter: Age (day) Value: 14
  misc_feature: MA Experiment 20000182 PARAMETER Experiment Name: At_2mM_SA_P Parameter: Organism Value: A. thaliana
  misc_feature: MA Experiment 20000182 PARAMETER Experiment Name: At_2mM_SA_P Parameter: Plant Line Value: WS
  misc_feature: MA Experiment 20000182 PARAMETER Experiment Name: At_2mM_SA_P Parameter: Timepoint (hr) Value: 6
  misc_feature: MA Experiment 20000182 PARAMETER Experiment Name: At_2mM_SA_P Parameter: Tissue Value: Aerial
  misc_feature: MA Experiment 20000182 PARAMETER Experiment Name: At_2mM_SA_P Parameter: Treatment Value: 2mM SA vs. No Treatment
  misc_feature: MA Experiment ID: 20000184 Result: Down-regulated in Transcription
  misc_feature: MA Experiment 20000184 PARAMETER Experiment Name: At_Shoots__P Parameter: Age (day) Value: 7
  misc_feature: MA Experiment 20000184 PARAMETER Experiment Name: At_Shoots__P Parameter: Tissue Value: Shoots vs. Whole Plant
  misc_feature: MA Experiment ID: 20000185 Result: Down-regulated in Transcription
  misc_feature: MA Experiment 20000185 PARAMETER Experiment Name: At_Roots__P Parameter: Age (day) Value: 7 vs. 21
  misc_feature: MA Experiment 20000185 PARAMETER Experiment Name: At_Roots__P Parameter: Organism Value: A. thaliana
  misc_feature: MA Experiment 20000185 PARAMETER Experiment Name: At_Roots__P Parameter: Tissue Value: Roots vs. Whole Plant
  misc_feature: MA Experiment ID: 20000267 Result: Up-regulated in Transcription
  misc_feature: MA Experiment 20000267 PARAMETER Experiment Name: At_Drought_P Parameter: Age (day) Value: 7
  misc_feature: MA Experiment 20000267 PARAMETER Experiment Name: At_Drought_P Parameter: Organism Value: A. thaliana
  misc_feature: MA Experiment 20000267 PARAMETER Experiment Name: At_Drought_P Parameter: Plant Line Value: WS
  misc_feature: MA Experiment 20000267 PARAMETER Experiment Name: At_Drought_P Parameter: Timepoint (hr) Value: 6
  misc_feature: MA Experiment 20000267 PARAMETER Experiment Name: At_Drought_P Parameter: Tissue Value: Whole Plant
  misc_feature: MA Experiment 20000267 PARAMETER Experiment Name: At_Drought_P Parameter: Treatment Value: Drought vs. No Drought
  misc_feature: MA Experiment ID: 20000268 Result: Up-regulated in Transcription
  misc_feature: MA Experiment 20000268 PARAMETER Experiment Name: At_100mM_NaCl__P Parameter: Age (day) Value: 14
  misc_feature: MA Experiment 20000268 PARAMETER Experiment Name: At_100mM_NaCl__P Parameter: Organism Value: A. thaliana
  misc_feature: MA Experiment 20000268 PARAMETER Experiment Name: At_100mM_NaCl__P Parameter: Plant Line Value: WS
  misc_feature: MA Experiment 20000268 PARAMETER Experiment Name: At_100mM_NaCl__P Parameter: Timepoint (hr) Value: 6
  misc_feature: MA Experiment 20000268 PARAMETER Experiment Name: At_100mM_NaCl__P Parameter: Tissue Value: Whole Plant
  misc_feature: MA Experiment 20000268 PARAMETER Experiment Name: At_100mM_NaCl__P Parameter: Treatment Value: 100mM NaCl vs. No Treatment
  misc_feature: MA Experiment ID: 20000308 Result: Up-regulated in Transcription
  misc_feature: MA Experiment 20000308 PARAMETER Experiment Name: At_100mM_NaCl__P Parameter: Age (day) Value: 17
  misc_feature: MA Experiment 20000308 PARAMETER Experiment Name: At_100mM_NaCl__P Parameter: Organism Value: A. thaliana
  misc_feature: MA Experiment 20000308 PARAMETER Experiment Name: At_100mM_NaCl__P Parameter: Plant Line Value: WS
  misc_feature: MA Experiment 20000308 PARAMETER Experiment Name: At_100mM_NaCl__P Parameter: Timepoint (hr) Value: 72
  misc_feature: MA Experiment 20000308 PARAMETER Experiment Name: At_100mM_NaCl__P Parameter: Tissue Value: Whole Plant
  misc_feature: MA Experiment 20000308 PARAMETER Experiment Name: At_100mM_NaCl__P Parameter: Treatment Value: 100mM NaCl vs. No Treatment
  misc_feature: MA Experiment ID: 20000436 Result: Up-regulated in Transcription
  misc_feature: MA Experiment 20000436 PARAMETER Experiment Name: At_Drought_P Parameter: Age (day) Value: 7
  misc_feature: MA Experiment 20000436 PARAMETER Experiment Name: At_Drought_P Parameter: Organism Value: A. thaliana
  misc_feature: MA Experiment 20000436 PARAMETER Experiment Name: At_Drought_P Parameter: Plant Line Value: WS
  misc_feature: MA Experiment 20000436 PARAMETER Experiment Name: At_Drought_P Parameter: Timepoint (hr) Value: 12
  misc_feature: MA Experiment 20000436 PARAMETER Experiment Name: At_Drought_P Parameter: Tissue Value: Whole Plant
  misc_feature: MA Experiment 20000436 PARAMETER Experiment Name: At_Drought_P Parameter: Treatment Value: Drought vs. No Drought
  misc_feature: MA Experiment ID: 20000437 Result: Up-regulated in Transcription
  misc_feature: MA Experiment 20000437 PARAMETER Experiment Name: At_Drought_P Parameter: Age (day) Value: 8
  misc_feature: MA Experiment 20000437 PARAMETER Experiment Name: At_Drought_P Parameter: Organism Value: A. thaliana
  misc_feature: MA Experiment 20000437 PARAMETER Experiment Name: At_Drought_P Parameter: Plant Line Value: WS
  misc_feature: MA Experiment 20000437 PARAMETER Experiment Name: At_Drought_P Parameter: Timepoint (hr) Value: 24
  misc_feature: MA Experiment 20000437 PARAMETER Experiment Name: At_Drought_P Parameter: Tissue Value: Whole Plant
  misc_feature: MA Experiment 20000437 PARAMETER Experiment Name: At_Drought_P Parameter: Treatment Value: Drought vs. No Drought
  misc_feature: MA Experiment ID: 20000438 Result: Down-regulated in Transcription
  misc_feature: MA Experiment 20000438 PARAMETER Experiment Name: At_Shoots__P Parameter: Age (day) Value: 14
  misc_feature: MA Experiment 20000438 PARAMETER Experiment Name: At_Shoots__P Parameter: Tissue Value: Shoots vs. Whole Plant
  misc_feature: MA Experiment ID: 20000439 Result: Down-regulated in Transcription
  misc_feature: MA Experiment 20000439 PARAMETER Experiment Name: At_Roots__P Parameter: Age (day) Value: 14 vs. 21
  misc_feature: MA Experiment 20000439 PARAMETER Experiment Name: At_Roots__P Parameter: Organism Value: A. thaliana
  misc_feature: MA Experiment 20000439 PARAMETER Experiment Name: At_Roots__P Parameter: Tissue Value: Roots vs. Whole Plant
  misc_feature: MA Experiment ID: 20000441 Result: Down-regulated in Transcription
  misc_feature: MA Experiment 20000441 PARAMETER Experiment Name: At_1uM_BR-BRZ__P Parameter: Tissue Value: Shoot Apices
  misc_feature: MA Experiment 20000441 PARAMETER Experiment Name: At_1uM_BR-BRZ__P Parameter: Treatment Value: 1uM BR vs. No Treatment
  misc_feature: MA Experiment ID: 20000443 Result: Down-regulated in Transcription
  misc_feature: MA Experiment 20000443 PARAMETER Experiment Name: At_1uM_BR-BRZ__P Parameter: Tissue Value: Shoot Apices
  misc_feature: MA Experiment 20000443 PARAMETER Experiment Name: At_1uM_BR-BRZ__P Parameter: Treatment Value: 1uM BRZ vs. No Treatment
  misc_feature: MA Experiment ID: 20000453 Result: Up-regulated in Transcription
  misc_feature: MA Experiment 20000453 PARAMETER Experiment Name: At_100uM_ABA_P Parameter: Age (day) Value: 15
  misc_feature: MA Experiment 20000453 PARAMETER Experiment Name: At_100uM_ABA_P Parameter: Organism Value: A. thaliana
  misc_feature: MA Experiment 20000453 PARAMETER Experiment Name: At_100uM_ABA_P Parameter: Plant Line Value: WS
  misc_feature: MA Experiment 20000453 PARAMETER Experiment Name: At_100uM_ABA_P Parameter: Timepoint (hr) Value: 24
  misc_feature: MA Experiment 20000453 PARAMETER Experiment Name: At_100uM_ABA_P Parameter: Tissue Value: Aerial
  misc_feature: MA Experiment 20000453 PARAMETER Experiment Name: At_100uM_ABA_P Parameter: Treatment Value: 100uM ABA vs. No Treatment
  misc_feature: MA Experiment ID: 20000709 Result: Down-regulated in Transcription
  misc_feature: MA Experiment 20000709 PARAMETER Experiment Name: At_15mM_NH4NO3_L-to-H_P Parameter: Age (hr) Value: 14
  misc_feature: MA Experiment 20000709 PARAMETER Experiment Name: At_15mM_NH4NO3_L-to-H_P Parameter: Organism Value: A. thaliana
  misc_feature: MA Experiment 20000709 PARAMETER Experiment Name: At_15mM_NH4NO3_L-to-H_P Parameter: Plant Line Value: WS
  misc_feature: MA Experiment 20000709 PARAMETER Experiment Name: At_15mM_NH4NO3_L-to-H_P Parameter: Timepoint (hr) Value: 4
  misc_feature: MA Experiment 20000709 PARAMETER Experiment Name: At_15mM_NH4NO3_L-to-H_P Parameter: Tissue Value: Aerial
  misc_feature: MA Experiment 20000709 PARAMETER Experiment Name: At_15mM_NH4NO3_L-to-H_P Parameter: Treatment Value: 15mM NH4NO3 vs. 30mM Mannitol
  misc_feature: MA Experiment ID: 20000794 Result: Up-regulated in Transcription
  misc_feature: MA Experiment 20000794 PARAMETER Experiment Name: At_Petals_P Parameter: Age (day) Value: 23-25 days
  misc_feature: MA Experiment 20000794 PARAMETER Experiment Name: At_Petals_P Parameter: Plant Line Value: WS
  misc_feature: MA Experiment 20000794 PARAMETER Experiment Name: At_Petals_P Parameter: Tissue Value: Petals vs. Whole plant
  misc_feature: MA Experiment ID: 20001247 Result: Down-regulated in Transcription
  misc_feature: MA Experiment 20001247 PARAMETER Experiment Name: At_Far-red-induction_P Parameter: Age (day) Value: 7
  misc_feature: MA Experiment 20001247 PARAMETER Experiment Name: At_Far-red-induction_P Parameter: Light Value: Far-red vs. White
  misc_feature: MA Experiment 20001247 PARAMETER Experiment Name: At_Far-red-induction_P Parameter: Organism Value: A. thaliana
  misc_feature: MA Experiment 20001247 PARAMETER Experiment Name: At_Far-red-induction_P Parameter: Plant Line Value: Columbia
  misc_feature: MA Experiment 20001247 PARAMETER Experiment Name: At_Far-red-induction_P Parameter: Timepoint (hr) Value: 1
  misc_feature: MA Experiment 20001247 PARAMETER Experiment Name: At_Far-red-induction_P Parameter: Tissue Value: Whole Plant
  misc_feature: MA Experiment ID: 20001504 Result: Up-regulated in Transcription
  misc_feature: MA Experiment 20001504 PARAMETER Experiment Name: At_Far-red-enriched_P Parameter: Age (day) Value: 10
  misc_feature: MA Experiment 20001504 PARAMETER Experiment Name: At_Far-red-enriched_P Parameter: Light Value: Far-red enriched vs. White
  misc_feature: MA Experiment 20001504 PARAMETER Experiment Name: At_Far-red-enriched_P Parameter: Organism Value: A. thaliana
  misc_feature: MA Experiment 20001504 PARAMETER Experiment Name: At_Far-red-enriched_P Parameter: Plant Line Value: Columbia
  misc_feature: MA Experiment 20001504 PARAMETER Experiment Name: At_Far-red-enriched_P Parameter: Timepoint (day) Value: 6
  misc_feature: MA Experiment 20001504 PARAMETER Experiment Name: At_Far-red-enriched_P Parameter: Tissue Value: Whole Plant
  misc_feature: MA Experiment ID: 20001554 Result: Up-regulated in Transcription
  misc_feature: MA Experiment 20001554 PARAMETER Experiment Name: At_Drought_Soil_Dry_P Parameter: Age (day) Value: 21
  misc_feature: MA Experiment 20001554 PARAMETER Experiment Name: At_Drought_Soil_Dry_P Parameter: Organism Value: A. thaliana
  misc_feature: MA Experiment 20001554 PARAMETER Experiment Name: At_Drought_Soil_Dry_P Parameter: Plant Line Value: WS
  misc_feature: MA Experiment 20001554 PARAMETER Experiment Name: At_Drought_Soil_Dry_P Parameter: Post Timepoint (hr) Value: None
  misc_feature: MA Experiment 20001554 PARAMETER Experiment Name: At_Drought_Soil_Dry_P Parameter: Post-Treatment Value: None
  misc_feature: MA Experiment 20001554 PARAMETER Experiment Name: At_Drought_Soil_Dry_P Parameter: Timepoint (day) Value: 7
  misc_feature: MA Experiment 20001554 PARAMETER Experiment Name: At_Drought_Soil_Dry_P Parameter: Treatment Value: Drought vs. No Drought
  misc_feature: MA Experiment ID: 20001555 Result: Up-regulated in Transcription
  misc_feature: MA Experiment 20001555 PARAMETER Experiment Name: At_Drought_Soil_Dry_P Parameter: Age (day) Value: 24
  misc_feature: MA Experiment 20001555 PARAMETER Experiment Name: At_Drought_Soil_Dry_P Parameter: Organism Value: A. thaliana
  misc_feature: MA Experiment 20001555 PARAMETER Experiment Name: At_Drought_Soil_Dry_P Parameter: Plant Line Value: WS
  misc_feature: MA Experiment 20001555 PARAMETER Experiment Name: At_Drought_Soil_Dry_P Parameter: Post Timepoint (hr) Value: None
  misc_feature: MA Experiment 20001555 PARAMETER Experiment Name: At_Drought_Soil_Dry_P Parameter: Post-Treatment Value: None
  misc_feature: MA Experiment 20001555 PARAMETER Experiment Name: At_Drought_Soil_Dry_P Parameter: Timepoint (day) Value: 10
  misc_feature: MA Experiment 20001555 PARAMETER Experiment Name: At_Drought_Soil_Dry_P Parameter: Treatment Value: Drought vs. No Drought
  misc_feature: MA Experiment ID: 20001556 Result: Up-regulated in Transcription
  misc_feature: MA Experiment 20001556 PARAMETER Experiment Name: At_Drought_Soil_Dry_P Parameter: Age (day) Value: 26
  misc_feature: MA Experiment 20001556 PARAMETER Experiment Name: At_Drought_Soil_Dry_P Parameter: Organism Value: A. thaliana
  misc_feature: MA Experiment 20001556 PARAMETER Experiment Name: At_Drought_Soil_Dry_P Parameter: Plant Line Value: WS
  misc_feature: MA Experiment 20001556 PARAMETER Experiment Name: At_Drought_Soil_Dry_P Parameter: Post Timepoint (hr) Value: None
  misc_feature: MA Experiment 20001556 PARAMETER Experiment Name: At_Drought_Soil_Dry_P Parameter: Post-Treatment Value: None
  misc_feature: MA Experiment 20001556 PARAMETER Experiment Name: At_Drought_Soil_Dry_P Parameter: Timepoint (day) Value: 12
  misc_feature: MA Experiment 20001556 PARAMETER Experiment Name: At_Drought_Soil_Dry_P Parameter: Treatment Value: Drought vs. No Drought
  misc_feature: MA Experiment ID: 20001904 Result: Up-regulated in Transcription
  misc_feature: MA Experiment 20001904 PARAMETER Experiment Name: At_Drought_Reproduction_P Parameter: Age (day) Value: 37
  misc_feature: MA Experiment 20001904 PARAMETER Experiment Name: At_Drought_Reproduction_P Parameter: Organism Value: A. thaliana
  misc_feature: MA Experiment 20001904 PARAMETER Experiment Name: At_Drought_Reproduction_P Parameter: Plant Line Value: WS
  misc_feature: MA Experiment 20001904 PARAMETER Experiment Name: At_Drought_Reproduction_P Parameter: Timepoint (day) Value: 7
  misc_feature: MA Experiment 20001904 PARAMETER Experiment Name: At_Drought_Reproduction_P Parameter: Tissue Value: Rosettes
  misc_feature: MA Experiment 20001904 PARAMETER Experiment Name: At_Drought_Reproduction_P Parameter: Treatment Value: Drought vs. No Drought
  misc_feature: MA Experiment ID: 20001905 Result: Up-regulated in Transcription
  misc_feature: MA Experiment 20001905 PARAMETER Experiment Name: At_Drought_Reproduction_P Parameter: Age (day) Value: 40
  misc_feature: MA Experiment 20001905 PARAMETER Experiment Name: At_Drought_Reproduction_P Parameter: Organism Value: A. thaliana
  misc_feature: MA Experiment 20001905 PARAMETER Experiment Name: At_Drought_Reproduction_P Parameter: Plant Line Value: WS
  misc_feature: MA Experiment 20001905 PARAMETER Experiment Name: At_Drought_Reproduction_P Parameter: Timepoint (day) Value: 10
  misc_feature: MA Experiment 20001905 PARAMETER Experiment Name: At_Drought_Reproduction_P Parameter: Tissue Value: Rosettes
  misc_feature: MA Experiment 20001905 PARAMETER Experiment Name: At_Drought_Reproduction_P Parameter: Treatment Value: Drought vs. No Drought
  misc_feature: MA Experiment ID: 20001906 Result: Up-regulated in Transcription
  misc_feature: MA Experiment 20001906 PARAMETER Experiment Name: At_Drought_Reproduction_P Parameter: Age (day) Value: 35
  misc_feature: MA Experiment 20001906 PARAMETER Experiment Name: At_Drought_Reproduction_P Parameter: Organism Value: A. thaliana
  misc_feature: MA Experiment 20001906 PARAMETER Experiment Name: At_Drought_Reproduction_P Parameter: Plant Line Value: WS
  misc_feature: MA Experiment 20001906 PARAMETER Experiment Name: At_Drought_Reproduction_P Parameter: Timepoint (day) Value: 5
  misc_feature: MA Experiment 20001906 PARAMETER Experiment Name: At_Drought_Reproduction_P Parameter: Tissue Value: Siliques
  misc_feature: MA Experiment 20001906 PARAMETER Experiment Name: At_Drought_Reproduction_P Parameter: Treatment Value: Drought vs. No Drought
  misc_feature: MA Experiment ID: 20001907 Result: Up-regulated in Transcription
  misc_feature: MA Experiment 20001907 PARAMETER Experiment Name: At_Drought_Reproduction_P Parameter: Age (day) Value: 37
  misc_feature: MA Experiment 20001907 PARAMETER Experiment Name: At_Drought_Reproduction_P Parameter: Organism Value: A. thaliana
  misc_feature: MA Experiment 20001907 PARAMETER Experiment Name: At_Drought_Reproduction_P Parameter: Plant Line Value: WS
  misc_feature: MA Experiment 20001907 PARAMETER Experiment Name: At_Drought_Reproduction_P Parameter: Timepoint (day) Value: 7
  misc_feature: MA Experiment 20001907 PARAMETER Experiment Name: At_Drought_Reproduction_P Parameter: Tissue Value: Siliques
  misc_feature: MA Experiment 20001907 PARAMETER Experiment Name: At_Drought_Reproduction_P Parameter: Treatment Value: Drought vs. No Drought
  misc_feature: MA Experiment ID: 20001908 Result: Up-regulated in Transcription
  misc_feature: MA Experiment 20001908 PARAMETER Experiment Name: At_Drought_Reproduction_P Parameter: Age (day) Value: 40
  misc_feature: MA Experiment 20001908 PARAMETER Experiment Name: At_Drought_Reproduction_P Parameter: Organism Value: A. thaliana
  misc_feature: MA Experiment 20001908 PARAMETER Experiment Name: At_Drought_Reproduction_P Parameter: Plant Line Value: WS
  misc_feature: MA Experiment 20001908 PARAMETER Experiment Name: At_Drought_Reproduction_P Parameter: Timepoint (day) Value: 10
  misc_feature: MA Experiment 20001908 PARAMETER Experiment Name: At_Drought_Reproduction_P Parameter: Tissue Value: Siliques
  misc_feature: MA Experiment 20001908 PARAMETER Experiment Name: At_Drought_Reproduction_P Parameter: Treatment Value: Drought vs. No Drought
  misc_feature: MA Experiment ID: 20001909 Result: Up-regulated in Transcription
  misc_feature: MA Experiment 20001909 PARAMETER Experiment Name: At_Drought_Reproduction_P Parameter: Age (day) Value: 35
  misc_feature: MA Experiment 20001909 PARAMETER Experiment Name: At_Drought_Reproduction_P Parameter: Organism Value: A. thaliana
  misc_feature: MA Experiment 20001909 PARAMETER Experiment Name: At_Drought_Reproduction_P Parameter: Plant Line Value: WS
  misc_feature: MA Experiment 20001909 PARAMETER Experiment Name: At_Drought_Reproduction_P Parameter: Timepoint (day) Value: 5
  misc_feature: MA Experiment 20001909 PARAMETER Experiment Name: At_Drought_Reproduction_P Parameter: Tissue Value: Flowers
  misc_feature: MA Experiment 20001909 PARAMETER Experiment Name: At_Drought_Reproduction_P Parameter: Treatment Value: Drought vs. No Drought
  misc_feature: MA Experiment ID: 20001910 Result: Up-regulated in Transcription
  misc_feature: MA Experiment 20001910 PARAMETER Experiment Name: At_Drought_Reproduction_P Parameter: Age (day) Value: 37
  misc_feature: MA Experiment 20001910 PARAMETER Experiment Name: At_Drought_Reproduction_P Parameter: Organism Value: A. thaliana
  misc_feature: MA Experiment 20001910 PARAMETER Experiment Name: At_Drought_Reproduction_P Parameter: Plant Line Value: WS
  misc_feature: MA Experiment 20001910 PARAMETER Experiment Name: At_Drought_Reproduction_P Parameter: Timepoint (day) Value: 7
  misc_feature: MA Experiment 20001910 PARAMETER Experiment Name: At_Drought_Reproduction_P Parameter: Tissue Value: Flowers
  misc_feature: MA Experiment 20001910 PARAMETER Experiment Name: At_Drought_Reproduction_P Parameter: Treatment Value: Drought vs. No Drought
  misc_feature: MA Experiment ID: 20001911 Result: Up-regulated in Transcription
  misc_feature: MA Experiment 20001911 PARAMETER Experiment Name: At_Drought_Reproduction_P Parameter: Age (day) Value: 40
  misc_feature: MA Experiment 20001911 PARAMETER Experiment Name: At_Drought_Reproduction_P Parameter: Organism Value: A. thaliana
  misc_feature: MA Experiment 20001911 PARAMETER Experiment Name: At_Drought_Reproduction_P Parameter: Plant Line Value: WS
  misc_feature: MA Experiment 20001911 PARAMETER Experiment Name: At_Drought_Reproduction_P Parameter: Timepoint (day) Value: 10
  misc_feature: MA Experiment 20001911 PARAMETER Experiment Name: At_Drought_Reproduction_P Parameter: Tissue Value: Flowers
  misc_feature: MA Experiment 20001911 PARAMETER Experiment Name: At_Drought_Reproduction_P Parameter: Treatment Value: Drought vs. No Drought
gatatttattcaactgcgtggtataaccaaaaaaaaaagaaacactattcgactctttttttgtttttgtaataaacataaaataaattttggagagagatatttcgtcggaaattaattgacgttcaaaagattcgttaccggaatatttagtagaggcggcgatcgagttatggcggatatttgttatgaagacgagacgtcggcttgtgaatcaagaccgttgtggtctagccggaagtggaggatcggtgtccagcgattcaggatgtctccgtcggagatgaatcccacggcgtcgacgacggaggaggaggataaatctgaagggatttataataagcgaaataaacaagaagagtacgattttatgaactgtgcatcgtcgtcaccttctcaaagctctcctgaagaagagagtgtatcacttgaagacagtgacgtctctatctccgatggaaattcatcggttaatgatgttgcagttattccgtcgaagaagacggttaaagagacggatctgaggccgagatacggcgtcgcatcggtgtgcgggagaagaagagatatggaagatgcggttgcgttacatccgtcttttgtacggaaacaaacggagttttctcgaacaagatggcactattttggtgtttacgacggccatggctgttctcacgttgcggctaggtgtaaagagagacttcacgagttagtgcaagaagaagcgttgtcggataagaaagaagaatggaagaagatgatggagcgtagcttcacacgtatggacaaagaggttgttcgttggggtgaaactgtgatgagtgctaattgtaggtgtgagcttcaaacgccggactgtgacgctgttggatccaccgccgttgtctccgtcattacgccggagaagatcattgttgcgaattgcggtgactcaagagcagttctttgtaggaatggtaaagcagtacctctttctacagatcataagcctgatcgtccggatgagctggatcgaatccaagaagcaggaggacgagtgatatactgggacggtgcaagagtcttaggcgttttagccatgtcacgagccataggagacaattatttaaaaccgtacgtcacttcggagccggaagtgacggttacggatcggactgaggaagatgagtttctgattctagcgacggacgggctatgggacgtagtgacgaacgaggcagcgtgtacgatggtgcgcatgtgtctcaacagaaaaagtggtcgtggaagacggcgaggagaaacacagactccggggaggaggagtgaagaagaagggaaagaagaagaggagaaggtggtggggtcaagaaagaacgggaagagaggagagatcacggacaaagcatgtacggaggcgtcagtattgctgacgaagctggcgttggcaaaacacagtagtgacaacgtaagcgtcgtcgttattgatctcagaagaagaagaaagagacacgttgcttgacactaatctcctcatcactcttactccaccgttttttgtgttgtttaaaatgattcttttaccttgggacgaaggtagctcaaatctttgaacccaaaagagagaaaaaaaaagcattaggtctaaaaaaaaaaccccggtttactgaaagcggttaaaccgggtatggttgggtcttttttgttctgaacctttttttcttgccttttttcggtgtgtaatgaacaaacagaaaaggaagccggaatgtgtcactgtctaggtggaatcagttcagaattcaattaataaaaaagtatgtatatgttttcttggc

SEQ ID NO: 103877 - protein, 442 aa, Arabidopsis thaliana; identical to SEQ ID NO: 41036
  peptide (1)..(442): Ceres Seq. ID no. 13613794
  misc_feature (119)..(426): Pfam Name: Protein phosphatase 2C Pfam Description: Protein phosphatase 2C
  misc_feature (1)..(442): Homolog of NCBI NO: 15222398 NR Description: protein phosphatase 2C (PP2C), putative
  misc_feature (1)..(442): Homolog of NCBI NO: 21537020 NR Description: protein phosphatase 2C, putative [Arabidopsis
  misc_feature (119)..(374): Homolog of NCBI NO: 15227078 NR Description: protein phosphatase 2C (PP2C), putative
  misc_feature (391)..(435): Homolog of NCBI NO: 15227078 NR Description: protein phosphatase 2C (PP2C), putative
  misc_feature (1)..(435): Homolog of NCBI NO: 15237839 NR Description: protein phosphatase 2C (PP2C), putative
  misc_feature (1)..(435): Homolog of NCBI NO: 16226419 NR Description: AT5g59220/mnc17_110 [Arabidopsis thaliana]
  misc_feature (20)..(361): Homolog of NCBI NO: 10432446 NR Description: protein phosphatase 2C [Nicotiana tabacum]
  misc_feature (399)..(435): Homolog of NCBI NO: 10432446 NR Description: protein phosphatase 2C [Nicotiana tabacum]
  misc_feature (1)..(383): Homolog of NCBI NO: 7768151 NR Description: protein phpsphatase 2C (PP2C) [Fagus sylvatica]
  misc_feature (396)..(439): Homolog of NCBI NO: 7768151 NR Description: protein phpsphatase 2C (PP2C) [Fagus sylvatica]

SEQ ID NO: 103878 - protein, 410 aa, Arabidopsis thaliana; identical to SEQ ID NO: 41037
  peptide (1)..(410): Ceres Seq. ID no. 13613795
  misc_feature (87)..(394): Pfam Name: Protein phosphatase 2C Pfam Description: Protein phosphatase 2C
  misc_feature (1)..(410): Homolog of NCBI NO: 15222398 NR Description: protein phosphatase 2C (PP2C), putative
  misc_feature (1)..(410): Homolog of NCBI NO: 21537020 NR Description: protein phosphatase 2C, putative [Arabidopsis
  misc_feature (87)..(342): Homolog of NCBI NO: 15227078 NR Description: protein phosphatase 2C (PP2C), putative
  misc_feature (359)..(403): Homolog of NCBI NO: 15227078 NR Description: protein phosphatase 2C (PP2C), putative
  misc_feature (1)..(403): Homolog of NCBI NO: 15237839 NR Description: protein phosphatase 2C (PP2C), putative
  misc_feature (1)..(403): Homolog of NCBI NO: 16226419 NR Description: AT5g59220/mnc17_110 [Arabidopsis thaliana]
  misc_feature (1)..(329): Homolog of NCBI NO: 10432446 NR Description: protein phosphatase 2C [Nicotiana tabacum]
  misc_feature (367)..(403): Homolog of NCBI NO: 10432446 NR Description: protein phosphatase 2C [Nicotiana tabacum]
  misc_feature (1)..(351): Homolog of NCBI NO: 7768151 NR Description: protein phpsphatase 2C (PP2C) [Fagus sylvatica]
  misc_feature (364)..(407): Homolog of NCBI NO: 7768151 NR Description: protein phpsphatase 2C (PP2C) [Fagus sylvatica]

SEQ ID NO: 103879 - protein, 405 aa, Arabidopsis thaliana; identical to SEQ ID NO: 41038
  peptide (1)..(405): Ceres Seq. ID no. 13613796
  misc_feature (82)..(389): Pfam Name: Protein phosphatase 2C Pfam Description: Protein phosphatase 2C
  misc_feature (1)..(405): Homolog of NCBI NO: 15222398 NR Description: protein phosphatase 2C (PP2C), putative
  misc_feature (1)..(405): Homolog of NCBI NO: 21537020 NR Description: protein phosphatase 2C, putative [Arabidopsis
  misc_feature (82)..(337): Homolog of NCBI NO: 15227078 NR Description: protein phosphatase 2C (PP2C), putative
  misc_feature (354)..(398): Homolog of NCBI NO: 15227078 NR Description: protein phosphatase 2C (PP2C), putative
  misc_feature (1)..(398): Homolog of NCBI NO: 15237839 NR Description: protein phosphatase 2C (PP2C), putative
  misc_feature (1)..(398): Homolog of NCBI NO: 16226419 NR Description: AT5g59220/mnc17_110 [Arabidopsis thaliana]
  misc_feature (1)..(324): Homolog of NCBI NO: 10432446 NR Description: protein phosphatase 2C [Nicotiana tabacum]
  misc_feature (362)..(398): Homolog of NCBI NO: 10432446 NR Description: protein phosphatase 2C [Nicotiana tabacum]
  misc_feature (1)..(346): Homolog of NCBI NO: 7768151 NR Description: protein phpsphatase 2C (PP2C) [Fagus sylvatica]
  misc_feature (359)..(402): Homolog of NCBI NO: 7768151 NR Description: protein phpsphatase 2C (PP2C) [Fagus sylvatica]

SEQ ID NO: 103880 - DNA, 1538 bp, Arabidopsis thaliana
  misc_feature (1)..(1538): Ceres Seq. ID no. 13613797
  misc_feature: MA Experiment ID: 108434 Result: Down-regulated in Transcription
  misc_feature: MA Experiment 108434 PARAMETER Experiment Name: At_Root_Tips_cDNA_P Parameter: Tissue Value: Root Tips
  misc_feature: MA Experiment ID: 108463 Result: Up-regulated in Transcription
  misc_feature: MA Experiment 108463 PARAMETER Experiment Name: At_Germinating_Seeds_cDNA_P Parameter: Age (day) Value: 3 vs. 0
  misc_feature: MA Experiment 108463 PARAMETER Experiment Name: At_Germinating_Seeds_cDNA_P Parameter: Tissue Value: Germinating Seeds
  misc_feature: MA Experiment ID: 108573 Result: Up-regulated in Transcription
  misc_feature: MA Experiment 108573 PARAMETER Experiment Name: At_Drought_cDNA_P Parameter: Timepoint (hr) Value: 6
  misc_feature: MA Experiment 108573 PARAMETER Experiment Name: At_Drought_cDNA_P Parameter: Tissue Value: Aerial
  misc_feature: MA Experiment 108573 PARAMETER Experiment Name: At_Drought_cDNA_P Parameter: Treatment Value: Drought vs. No Drought
  misc_feature: MA Experiment ID: 20000111 Result: Down-regulated in Transcription
  misc_feature: MA Experiment 20000111 PARAMETER Experiment Name: At_42deg_Heat_cDNA_P Parameter: Temperature (deg C) Value: 42 vs. 22
  misc_feature: MA Experiment 20000111 PARAMETER Experiment Name: At_42deg_Heat_cDNA_P Parameter: Timepoint (hr) Value: 6
  misc_feature: MA Experiment 20000111 PARAMETER Experiment Name: At_42deg_Heat_cDNA_P Parameter: Tissue Value: Aerial
  misc_feature: MA Experiment ID: 20000117 Result: Up-regulated in Transcription
  misc_feature: MA Experiment 20000117 PARAMETER Experiment Name: At_100uM_ABA_Mutants_cDNA_P Parameter: Plant Line Value: Columbia
  misc_feature: MA Experiment 20000117 PARAMETER Experiment Name: At_100uM_ABA_Mutants_cDNA_P Parameter: Timepoint (hr) Value: 6
  misc_feature: MA Experiment 20000117 PARAMETER Experiment Name: At_100uM_ABA_Mutants_cDNA_P Parameter: Tissue Value: Aerial
  misc_feature: MA Experiment 20000117 PARAMETER Experiment Name: At_100uM_ABA_Mutants_cDNA_P Parameter: Treatment Value: 100uM ABA vs. No Treatment
  misc_feature: MA Experiment ID: 20000180 Result: Up-regulated in Transcription
  misc_feature: MA Experiment 20000180 PARAMETER Experiment Name: At_Germinating_Seeds_P Parameter: Age (hr) Value: 24 vs. 0
  misc_feature: MA Experiment 20000180 PARAMETER Experiment Name: At_Germinating_Seeds_P Parameter: Tissue Value: Germinating Seeds
  misc_feature: MA Experiment ID: 20000495 Result: Up-regulated in Transcription
  misc_feature: MA Experiment 20000495 PARAMETER Experiment Name: At_Guard_Cells_P Parameter: Harvest Date Value: 8/2/2002
  misc_feature: MA Experiment 20000495 PARAMETER Experiment Name: At_Guard_Cells_P Parameter: Organism Value: A. thaliana
  misc_feature: MA Experiment 20000495 PARAMETER Experiment Name: At_Guard_Cells_P Parameter: Tissue Value: Guard Cells vs. Leaves
  misc_feature: MA Experiment ID: 20001247 Result: Down-regulated in Transcription
  misc_feature: MA Experiment 20001247 PARAMETER Experiment Name: At_Far-red-induction_P Parameter: Age (day) Value: 7
  misc_feature: MA Experiment 20001247 PARAMETER Experiment Name: At_Far-red-induction_P Parameter: Light Value: Far-red vs. White
  misc_feature: MA Experiment 20001247 PARAMETER Experiment Name: At_Far-red-induction_P Parameter: Organism Value: A. thaliana
  misc_feature: MA Experiment 20001247 PARAMETER Experiment Name: At_Far-red-induction_P Parameter: Plant Line Value: Columbia
  misc_feature: MA Experiment 20001247 PARAMETER Experiment Name: At_Far-red-induction_P Parameter: Timepoint (hr) Value: 1
  misc_feature: MA Experiment 20001247 PARAMETER Experiment Name: At_Far-red-induction_P Parameter: Tissue Value: Whole Plant
  misc_feature: MA Experiment ID: 20001451 Result: Down-regulated in Transcription
  misc_feature: MA Experiment 20001451 PARAMETER Experiment Name: At_Far-red-induction_P Parameter: Age (day) Value: 7
  misc_feature: MA Experiment 20001451 PARAMETER Experiment Name: At_Far-red-induction_P Parameter: Light Value: Far-red vs. White
  misc_feature: MA Experiment 20001451 PARAMETER Experiment Name: At_Far-red-induction_P Parameter: Organism Value: A. thaliana
  misc_feature: MA Experiment 20001451 PARAMETER Experiment Name: At_Far-red-induction_P Parameter: Plant Line Value: Columbia
  misc_feature: MA Experiment 20001451 PARAMETER Experiment Name: At_Far-red-induction_P Parameter: Timepoint (hr) Value: 24
  misc_feature: MA Experiment 20001451 PARAMETER Experiment Name: At_Far-red-induction_P Parameter: Tissue Value: Whole Plant
  misc_feature: MA Experiment ID: 20001560 Result: Down-regulated in Transcription
  misc_feature: MA Experiment 20001560 PARAMETER Experiment Name: At_Drought_Soil_Dry_P Parameter: Age (day) Value: 28
  misc_feature: MA Experiment 20001560 PARAMETER Experiment Name: At_Drought_Soil_Dry_P Parameter: Organism Value: A. thaliana
  misc_feature: MA Experiment 20001560 PARAMETER Experiment Name: At_Drought_Soil_Dry_P Parameter: Plant Line Value: WS
  misc_feature: MA Experiment 20001560 PARAMETER Experiment Name: At_Drought_Soil_Dry_P Parameter: Post Timepoint (hr) Value: None
  misc_feature: MA Experiment 20001560 PARAMETER Experiment Name: At_Drought_Soil_Dry_P Parameter: Post-Treatment Value: None
  misc_feature: MA Experiment 20001560 PARAMETER Experiment Name: At_Drought_Soil_Dry_P Parameter: Timepoint (day) Value: 14
  misc_feature: MA Experiment 20001560 PARAMETER Experiment Name: At_Drought_Soil_Dry_P Parameter: Treatment Value: Drought vs. No Drought
aggttcacttctttgatcttccattactaaatgttctctcctctttctctctttttgtaatttctctcttaaattcttcattgatgttttgattcgttttagtaataattttgattcatttccaaaagatattcctattcccatcttcttttctaatccgctttctttaatattccaacatctatatatatgcctacgaattcgaatcatcagcatcatcttcaacaccagcttaacgaaaatggaagtataataagtggccacggactagtactctctcaccaacttccacctctccaagcaaaccctaaccctaaccaccaccatgtcgctacctctgctggtcttccgtcaaggatgggtggatcgatggcggagagagcaaggcaggccaacattcctccactagcgggacccctaaagtgtcctcgatgcgactccagcaacactaagttctgttactacaacaactataacctcactcagcctcgtcacttctgcaaaggttgccgtcgctactggacacaagggggcgccctgagaaacgtccctgtaggtggaggctgccggaggaataacaagaagggcaaaaatggaaatttaaaatcttcttcttcttcgtccaaacagtcttcctcggtcaacgctcaaagtcctagctcaggacagctaaggacaaatcatcagttccctttttcaccaactctttacaatctcactcaactcggaggtattggtttgaacttagccgctactaatggcaacaaccaagctcaccagatcggttccagtttgatgatgagcgatctagggtttctccatggacgaaatacttcaactccgatgacgggaaacattcatgaaaacaacaacaataataacaatgaaaacaacctaatggcatccgttggatctttgagcccctttgctctcttcgatccaacgacggggctatacgctttccagaacgacggtaatatcgggaacaacgttgggatatctggttcttctacttccatggttgattctagggtttatcagacgcctccggtgaagatggaagaacaacctaatttggctaacttgtctagaccggtctccggtttgacgtctcctgggaatcaaacaaatcagtacttttggcctggttcggatttctcgggtccttctaatgatctcttgtgagatttttgtgtgttttgtcggatcattaacgtatgttacgacttacgacgtggagattgattaaaaggactaccaacggtcaggattaactgcatgcatagtctgtgctcaagacgatgatcgtggagaagtacaaggacaaactaaaaggtatcttaattagagattgtggttttacaacttaaattcgatacttatttatataatcaggtgtgtcatataatttgtttgtattgcgtgatttcatggttgatctgatttctcaagttgctatatatgcctcaatacatgtgtgtaacagtccaatttgtatactctttagactgaattttatcgaatatataatatttttc

SEQ ID NO: 103881 - protein, 331 aa, Arabidopsis thaliana
  peptide (1)..(331): Ceres Seq. ID no. 13613798
  misc_feature (72)..(134): Pfam Name: Dof domain, zinc finger Pfam Description: Dof domain, zinc finger
  misc_feature (1)..(331): Homolog of NCBI NO: 30680246 NR Description: Dof zinc finger protein [Arabidopsis thaliana]
  misc_feature (1)..(331): Homolog of NCBI NO: 25406987 NR Description: hypothetical protein [imported] - Arabidopsis >gi|8439908|gb|AAF75094.1|AC007583_30 Strong similarity to zinc protein OBP2 from Arabidopsis thaliana gb|AF155816. EST gb|N65215
  misc_feature (1)..(331): Homolog of NCBI NO: 21593773 NR Description: zinc finger protein OBP2 [Arabidopsis thaliana]
  misc_feature (57)..(331): Homolog of NCBI NO: 30680237 NR Description: Dof zinc finger protein [Arabidopsis thaliana] Strong similarity to zinc finger protein OBP2 [Arabidopsis >gi|20260006|gb|AAM13350.1| strong similarity to zinc finger
  misc_feature (61)..(285): Homolog of NCBI NO: 5059394 NR Description: zinc finger protein OBP2 [Arabidopsis thaliana]
  misc_feature (1)..(329): Homolog of NCBI NO: 30684022 NR Description: Dof zinc finger protein [Arabidopsis thaliana]
  misc_feature (1)..(193): Homolog of NCBI NO: 25352305 NR Description: probable DOF zinc finger protein [imported] - thaliana >gi|3927829|gb|AAC79586.1| putative DOF zinc finger
  misc_feature (4)..(289): Homolog of NCBI NO: 15224320 NR Description: Dof zinc finger protein [Arabidopsis thaliana]
  misc_feature (1)..(202): Homolog of NCBI NO: 15241827 NR Description: Dof zinc finger protein [Arabidopsis thaliana]
  misc_feature (9)..(325): Homolog of NCBI NO: 7688355 NR Description: Dof zinc finger protein [Solanum tuberosum]
MPTNSNHQHHLQHQLNENGSIISGHGLVLSHQLPPLQANPNPNHHHVATSAGLPSRMGGSMAERARQANIPPLAGPLKCPRCDSSNTKFCYYNNYNLTQPRHFCKGCRRYWTQGGALRNVPVGGGCRRNNKKGKNGNLKSSSSSSKQSSSVNAQSPSSGQLRTNHQFPFSPTLYNLTQLGGIGLNLAATNGNNQAHQIGSSLMMSDLGFLHGRNTSTPMTGNIHENNNNNNNENNLMASVGSLSPFALFDPTTGLYAFQNDGNIGNNVGISGSSTSMVDSRVYQTPPVKMEEQPNLANLSRPVSGLTSPGNQTNQYFWPGSDFSGPSNDLL

SEQ ID NO: 103882 - protein, 275 aa, Arabidopsis thaliana; identical to SEQ ID NO: 20921
  peptide (1)..(275): Ceres Seq. ID no. 13613799
  misc_feature (16)..(78): Pfam Name: Dof domain, zinc finger Pfam Description: Dof domain, zinc finger
  misc_feature (1)..(275): Homolog of NCBI NO: 30680246 NR Description: Dof zinc finger protein [Arabidopsis thaliana]
  misc_feature (1)..(275): Homolog of NCBI NO: 25406987 NR Description: hypothetical protein [imported] - Arabidopsis >gi|8439908|gb|AAF75094.1|AC007583_30 Strong similarity to zinc protein OBP2 from Arabidopsis thaliana gb|AF155816. EST gb|N65215
  misc_feature (1)..(275): Homolog of NCBI NO: 21593773 NR Description: zinc finger protein OBP2 [Arabidopsis thaliana]
  misc_feature (1)..(275): Homolog of NCBI NO: 30680237 NR Description: Dof zinc finger protein [Arabidopsis thaliana] Strong similarity to zinc finger protein OBP2 [Arabidopsis >gi|20260006|gb|AAM13350.1| strong similarity to zinc finger
  misc_feature (5)..(229): Homolog of NCBI NO: 5059394 NR Description: zinc finger protein OBP2 [Arabidopsis thaliana]
  misc_feature (1)..(273): Homolog of NCBI NO: 30684022 NR Description: Dof zinc finger protein [Arabidopsis thaliana]
  misc_feature (1)..(137): Homolog of NCBI NO: 25352305 NR Description: probable DOF zinc finger protein [imported] - thaliana >gi|3927829|gb|AAC79586.1| putative DOF zinc finger
  misc_feature (1)..(233): Homolog of NCBI NO: 15224320 NR Description: Dof zinc finger protein [Arabidopsis thaliana]
  misc_feature (1)..(146): Homolog of NCBI NO: 15241827 NR Description: Dof zinc finger protein [Arabidopsis thaliana]
  misc_feature (1)..(269): Homolog of NCBI NO: 7688355 NR Description: Dof zinc finger protein [Solanum tuberosum]

SEQ ID NO: 103883 - protein, 271 aa, Arabidopsis thaliana; identical to SEQ ID NO: 20922
  peptide (1)..(271): Ceres Seq. ID no. 13613800
  misc_feature (12)..(74): Pfam Name: Dof domain, zinc finger Pfam Description: Dof domain, zinc finger
  misc_feature (1)..(271): Homolog of NCBI NO: 30680246 NR Description: Dof zinc finger protein [Arabidopsis thaliana]
  misc_feature (1)..(271): Homolog of NCBI NO: 25406987 NR Description: hypothetical protein [imported] - Arabidopsis >gi|8439908|gb|AAF75094.1|AC007583_30 Strong similarity to zinc protein OBP2 from Arabidopsis thaliana gb|AF155816. EST gb|N65215
  misc_feature (1)..(271): Homolog of NCBI NO: 21593773 NR Description: zinc finger protein OBP2 [Arabidopsis thaliana]
  misc_feature (1)..(271): Homolog of NCBI NO: 30680237 NR Description: Dof zinc finger protein [Arabidopsis thaliana] Strong similarity to zinc finger protein OBP2 [Arabidopsis >gi|20260006|gb|AAM13350.1| strong similarity to zinc finger
  misc_feature (1)..(225): Homolog of NCBI NO: 5059394 NR Description: zinc finger protein OBP2 [Arabidopsis thaliana]
  misc_feature (1)..(269): Homolog of NCBI NO: 30684022 NR Description: Dof zinc finger protein [Arabidopsis thaliana]
  misc_feature (1)..(133): Homolog of NCBI NO: 25352305 NR Description: probable DOF zinc finger protein [imported] - thaliana >gi|3927829|gb|AAC79586.1| putative DOF zinc finger
  misc_feature (1)..(229): Homolog of NCBI NO: 15224320 NR Description: Dof zinc finger protein [Arabidopsis thaliana]
  misc_feature (1)..(142): Homolog of NCBI NO: 15241827 NR Description: Dof zinc finger protein [Arabidopsis thaliana]
  misc_feature (1)..(265): Homolog of NCBI NO: 7688355 NR Description: Dof zinc finger protein [Solanum tuberosum]

SEQ ID NO: 103884 - DNA, 729 bp, Arabidopsis thaliana
  misc_feature (1)..(729): Ceres Seq. ID no. 13613801
  misc_feature: MA Experiment ID: 108434 Result: Up-regulated in Transcription
  misc_feature: MA Experiment 108434 PARAMETER Experiment Name: At_Root_Tips_cDNA_P Parameter: Tissue Value: Root Tips
  misc_feature: MA Experiment ID: 108435 Result: Up-regulated in Transcription
  misc_feature: MA Experiment 108435 PARAMETER Experiment Name: At_stm_Mutants_cDNA_P Parameter: Plant Line Value: wt Landsburg vs stm
  misc_feature: MA Experiment 108435 PARAMETER Experiment Name: At_stm_Mutants_cDNA_P Parameter: Tissue Value: Shoot Apical Meristem Region
  misc_feature: MA Experiment ID: 108462 Result: Down-regulated in Transcription
  misc_feature: MA Experiment 108462 PARAMETER Experiment Name: At_Germinating_Seeds_cDNA_P Parameter: Age (day) Value: 2 vs. 0
  misc_feature: MA Experiment 108462 PARAMETER Experiment Name: At_Germinating_Seeds_cDNA_P Parameter: Tissue Value: Germinating Seeds
  misc_feature: MA Experiment ID: 108463 Result: Down-regulated in Transcription
  misc_feature: MA Experiment 108463 PARAMETER Experiment Name: At_Germinating_Seeds_cDNA_P Parameter: Age (day) Value: 3 vs. 0
  misc_feature: MA Experiment 108463 PARAMETER Experiment Name: At_Germinating_Seeds_cDNA_P Parameter: Tissue Value: Germinating Seeds
  misc_feature: MA Experiment ID: 108464 Result: Down-regulated in Transcription
  misc_feature: MA Experiment 108464 PARAMETER Experiment Name: At_Germinating_Seeds_cDNA_P Parameter: Age (day) Value: 4 vs. 0
  misc_feature: MA Experiment 108464 PARAMETER Experiment Name: At_Germinating_Seeds_cDNA_P Parameter: Tissue Value: Germinating Seeds
  misc_feature: MA Experiment ID: 108573 Result: Down-regulated in Transcription
  misc_feature: MA Experiment 108573 PARAMETER Experiment Name: At_Drought_cDNA_P Parameter: Timepoint (hr) Value: 6
  misc_feature: MA Experiment 108573 PARAMETER Experiment Name: At_Drought_cDNA_P Parameter: Tissue Value: Aerial
  misc_feature: MA Experiment 108573 PARAMETER Experiment Name: At_Drought_cDNA_P Parameter: Treatment Value: Drought vs. No Drought
  misc_feature: MA Experiment ID: 108577 Result: Down-regulated in Transcription
  misc_feature: MA Experiment 108577 PARAMETER Experiment Name: At_42deg_Heat_cDNA_P Parameter: Temperature (deg C) Value: 42 vs. 22
  misc_feature: MA Experiment 108577 PARAMETER Experiment Name: At_42deg_Heat_cDNA_P Parameter: Timepoint (hr) Value: 6
  misc_feature: MA Experiment 108577 PARAMETER Experiment Name: At_42deg_Heat_cDNA_P Parameter: Tissue Value: Aerial
  misc_feature: MA Experiment ID: 108579 Result: Up-regulated in Transcription
  misc_feature: MA Experiment 108579 PARAMETER Experiment Name: At_4deg_Cold_cDNA_P Parameter: Temperature (deg C) Value: 4 vs. 22
  misc_feature: MA Experiment 108579 PARAMETER Experiment Name: At_4deg_Cold_cDNA_P Parameter: Timepoint (hr) Value: 6
  misc_feature: MA Experiment 108579 PARAMETER Experiment Name: At_4deg_Cold_cDNA_P Parameter: Tissue Value: Aerial
  misc_feature: MA Experiment ID: 20000093 Result: Down-regulated in Transcription
  misc_feature: MA Experiment 20000093 PARAMETER Experiment Name: At_42deg_Heat_cDNA_P Parameter: Temperature (deg C) Value: 42 vs. 22
  misc_feature: MA Experiment 20000093 PARAMETER Experiment Name: At_42deg_Heat_cDNA_P Parameter: Timepoint (hr) Value: 0.5
  misc_feature: MA Experiment 20000093 PARAMETER Experiment Name: At_42deg_Heat_cDNA_P Parameter: Tissue Value: Aerial
  misc_feature: MA Experiment ID: 20000111 Result: Down-regulated in Transcription
  misc_feature: MA Experiment 20000111 PARAMETER Experiment Name: At_42deg_Heat_cDNA_P Parameter: Temperature (deg C) Value: 42 vs. 22
  misc_feature: MA Experiment 20000111 PARAMETER Experiment Name: At_42deg_Heat_cDNA_P Parameter: Timepoint (hr) Value: 6
  misc_feature: MA Experiment 20000111 PARAMETER Experiment Name: At_42deg_Heat_cDNA_P Parameter: Tissue Value: Aerial
  misc_feature: MA Experiment ID: 20000113 Result: Down-regulated in Transcription
  misc_feature: MA Experiment 20000113 PARAMETER Experiment Name: At_42deg_Heat_cDNA_P Parameter: Temperature (deg C) Value: 42 vs. 22
  misc_feature: MA Experiment 20000113 PARAMETER Experiment Name: At_42deg_Heat_cDNA_P Parameter: Timepoint (hr) Value: 8
  misc_feature: MA Experiment 20000113 PARAMETER Experiment Name: At_42deg_Heat_cDNA_P Parameter: Tissue Value: Aerial
  misc_feature: MA Experiment ID: 20000144 Result: Down-regulated in Transcription
  misc_feature: MA Experiment 20000144 PARAMETER Experiment Name: At_42deg_Heat_cDNA_P Parameter: Temperature (deg C) Value: 42 vs. 22
  misc_feature: MA Experiment 20000144 PARAMETER Experiment Name: At_42deg_Heat_cDNA_P Parameter: Timepoint (hr) Value: 1
  misc_feature: MA Experiment 20000144 PARAMETER Experiment Name: At_42deg_Heat_cDNA_P Parameter: Tissue Value: Aerial
  misc_feature: MA Experiment ID: 20000173 Result: Down-regulated in Transcription
  misc_feature: MA Experiment 20000173 PARAMETER Experiment Name: At_42deg_Heat_P Parameter: Age (day) Value: 14
  misc_feature: MA Experiment 20000173 PARAMETER Experiment Name: At_42deg_Heat_P Parameter: Organism Value: A. thaliana
  misc_feature: MA Experiment 20000173 PARAMETER Experiment Name: At_42deg_Heat_P Parameter: Plant Line Value: WS
  misc_feature: MA Experiment 20000173 PARAMETER Experiment Name: At_42deg_Heat_P Parameter: Temperature (deg C) Value: 42 vs. 22
  misc_feature: MA Experiment 20000173 PARAMETER Experiment Name: At_42deg_Heat_P Parameter: Timepoint (hr) Value: 6
  misc_feature: MA Experiment 20000173 PARAMETER Experiment Name: At_42deg_Heat_P Parameter: Tissue Value: Aerial
  misc_feature: MA Experiment ID: 20000234 Result: Up-regulated in Transcription
  misc_feature: MA Experiment 20000234 PARAMETER Experiment Name: At_Siliques_P Parameter: Age (day) Value: 21
  misc_feature: MA Experiment 20000234 PARAMETER Experiment Name: At_Siliques_P Parameter: Organism Value: A. thaliana
  misc_feature: MA Experiment 20000234 PARAMETER Experiment Name: At_Siliques_P Parameter: Plant Line Value: WS
  misc_feature: MA Experiment 20000234 PARAMETER Experiment Name: At_Siliques_P Parameter: Tissue Value: Less Than 5mm Siliques vs. Whole Plant
  misc_feature: MA Experiment ID: 20000264 Result: Up-regulated in Transcription
  misc_feature: MA Experiment 20000264 PARAMETER Experiment Name: At_Open_Flower_P Parameter: Age (day) Value: 21
  misc_feature: MA Experiment 20000264 PARAMETER Experiment Name: At_Open_Flower_P Parameter: Plant Line Value: WS
  misc_feature: MA Experiment 20000264 PARAMETER Experiment Name: At_Open_Flower_P Parameter: Tissue Value: Open Flower vs. Whole Plant
  misc_feature: MA Experiment ID: 20000265 Result: Up-regulated in Transcription
  misc_feature: MA Experiment 20000265 PARAMETER Experiment Name: At_Open_Flower_P Parameter: Age (day) Value: 21
  misc_feature: MA Experiment 20000265 PARAMETER Experiment Name: At_Open_Flower_P Parameter: Plant Line Value: WS
  misc_feature: MA Experiment 20000265 PARAMETER Experiment Name: At_Open_Flower_P Parameter: Tissue Value: Closed Flower vs. Whole Plant
  misc_feature: MA Experiment ID: 20000286 Result: Up-regulated in Transcription
  misc_feature: MA Experiment 20000286 PARAMETER Experiment Name: At_Open_Flower_P Parameter: Age (day) Value: 21
  misc_feature: MA Experiment 20000286 PARAMETER Experiment Name: At_Open_Flower_P Parameter: Plant Line Value: WS
  misc_feature: MA Experiment 20000286 PARAMETER Experiment Name: At_Open_Flower_P Parameter: Tissue Value: Half Open vs. Whole Plant
  misc_feature: MA Experiment ID: 20000437 Result: Down-regulated in Transcription
  misc_feature: MA Experiment 20000437 PARAMETER Experiment Name: At_Drought_P Parameter: Age (day) Value: 8
  misc_feature: MA Experiment 20000437 PARAMETER Experiment Name: At_Drought_P Parameter: Organism Value: A. thaliana
  misc_feature: MA Experiment 20000437 PARAMETER Experiment Name: At_Drought_P Parameter: Plant Line Value: WS
  misc_feature: MA Experiment 20000437 PARAMETER Experiment Name: At_Drought_P Parameter: Timepoint (hr) Value: 24
  misc_feature: MA Experiment 20000437 PARAMETER Experiment Name: At_Drought_P Parameter: Tissue Value: Whole Plant
  misc_feature: MA Experiment 20000437 PARAMETER Experiment Name: At_Drought_P Parameter: Treatment Value: Drought vs. No Drought
  misc_feature: MA Experiment ID: 20001248 Result: Down-regulated in Transcription
  misc_feature: MA Experiment 20001248 PARAMETER Experiment Name: At_Far-red-induction_P Parameter: Age (day) Value: 7
  misc_feature: MA Experiment 20001248 PARAMETER Experiment Name: At_Far-red-induction_P Parameter: Light Value: Far-red vs. White
  misc_feature: MA Experiment 20001248 PARAMETER Experiment Name: At_Far-red-induction_P Parameter: Organism Value: A. thaliana
  misc_feature: MA Experiment 20001248 PARAMETER Experiment Name: At_Far-red-induction_P Parameter: Plant Line Value: Columbia
  misc_feature: MA Experiment 20001248 PARAMETER Experiment Name: At_Far-red-induction_P Parameter: Timepoint (hr) Value: 4
  misc_feature: MA Experiment 20001248 PARAMETER Experiment Name: At_Far-red-induction_P Parameter: Tissue Value: Whole Plant
  misc_feature: MA Experiment ID: 20001451 Result: Down-regulated in Transcription
  misc_feature: MA Experiment 20001451 PARAMETER Experiment Name: At_Far-red-induction_P Parameter: Age (day) Value: 7
  misc_feature: MA Experiment 20001451 PARAMETER Experiment Name: At_Far-red-induction_P Parameter: Light Value: Far-red vs. White
  misc_feature: MA Experiment 20001451 PARAMETER Experiment Name: At_Far-red-induction_P Parameter: Organism Value: A. thaliana
  misc_feature: MA Experiment 20001451 PARAMETER Experiment Name: At_Far-red-induction_P Parameter: Plant Line Value: Columbia
  misc_feature: MA Experiment 20001451 PARAMETER Experiment Name: At_Far-red-induction_P Parameter: Timepoint (hr) Value: 24
  misc_feature: MA Experiment 20001451 PARAMETER Experiment Name: At_Far-red-induction_P Parameter: Tissue Value: Whole Plant
atcaccattcaccactaaactacttcaatcaacttccttttcccgagaaaatcagaaagaaaattcacgatggcaccaagagccgagaagaagcccgccgagaaaaaaaccgccgctgagagaccggtggaagagaacaaggctgctgaaaaggctccggcggagaagaaacccaaggcggggaagaaattgccaccaaaggaagccggtgacaagaagaagaagcgatctaagaaaaacgtcgaaacctacaagatctacatcttcaaggtgctgaagcaggttcatccagatatcggaatttcaagcaaagccatggggattatgaacagtttcatcaacgacatattcgagaagctagctcaggaatcttcgaaactcgctaggtacaacaagaagccgaccattacatctcgcgagatccagacggctgtgagactcgtcctccccggtgaactcgctaaacacgccgtctctgaaggtaccaaggcggttaccaagtttactagctcttgaagagacccggttagggtttttagggatttcaatttcggtttggtttttagtacttgtaggaaattagatgcattattcgcttaacttcgtattttgtggctttgtaactctaggaagtagagaagattgttccttccttttatgaatttcaatgttggattatatatttttaacgatttttttttccatttcaatttcatttacctaatcact

SEQ ID NO: 103885 - protein, 148 aa, Arabidopsis thaliana; identical to SEQ ID NO: 28124
  peptide (1)..(148): Ceres Seq. ID no. 13613802
  misc_feature (31)..(147): Pfam Name: Core histone H2A/H2B/H3/H4 Pfam Description: Core histone H2A/H2B/H3/H4
  misc_feature (1)..(148): Homolog of NCBI NO: 15223016 NR Description: histone H2B, putative [Arabidopsis thaliana]
  misc_feature (1)..(148): Homolog of NCBI NO: 21617908 NR Description: histone H2B [Arabidopsis thaliana]
  misc_feature (1)..(148): Homolog of NCBI NO: 15231304 NR Description: histone H2B [Arabidopsis thaliana]
  misc_feature (1)..(148): Homolog of NCBI NO: 15238563 NR Description: histone H2B [Arabidopsis thaliana] Histone H2B >gi|9757912|dbj|BAB08359.1| contains similarity to H2B~gene_id:MMN10.15 [Arabidopsis thaliana]
  misc_feature (1)..(148): Homolog of NCBI NO: 21554180 NR Description: histone H2B-like protein [Arabidopsis thaliana]
  misc_feature (1)..(148): Homolog of NCBI NO: 15226943 NR Description: histone H2B, putative [Arabidopsis thaliana]
  misc_feature (1)..(148): Homolog of NCBI NO: 15231313 NR Description: histone H2B, putative [Arabidopsis thaliana]
  misc_feature (1)..(148): Homolog of NCBI NO: 7387726 NR Description: Histone H2B >gi|7439759|pir||T09722 histone H2B1 upland cotton >gi|2558962|gb|AAB97163.1| histone H2B1 [Gossypium
  misc_feature (1)..(148): Homolog of NCBI NO: 7439756 NR Description: histone H2B - tomato >gi|3021489|emb|CAA12233.1|
  misc_feature (1)..(148): Homolog of NCBI NO: 7387727 NR Description: Histone H2B (CaH2B) >gi|7439757|pir||T08063 H2B - pepper >gi|2746719|gb|AAB94923.1| histone H2B [Capsicum

SEQ ID NO: 103886 - protein, 91 aa, Arabidopsis thaliana; identical to SEQ ID NO: 28125
  peptide (1)..(91): Ceres Seq. ID no. 13613803

SEQ ID NO: 103887 - DNA, 829 bp, Arabidopsis thaliana
  misc_feature (1)..(829): Ceres Seq. ID no. 13613804
  misc_feature: MA Experiment ID: 108434 Result: Up-regulated in Transcription
  misc_feature: MA Experiment 108434 PARAMETER Experiment Name: At_Root_Tips_cDNA_P Parameter: Tissue Value: Root Tips
  misc_feature: MA Experiment ID: 108462 Result: Down-regulated in Transcription
  misc_feature: MA Experiment 108462 PARAMETER Experiment Name: At_Germinating_Seeds_cDNA_P Parameter: Age (day) Value: 2 vs. 0
  misc_feature: MA Experiment 108462 PARAMETER Experiment Name: At_Germinating_Seeds_cDNA_P Parameter: Tissue Value: Germinating Seeds
  misc_feature: MA Experiment ID: 108463 Result: Down-regulated in Transcription
  misc_feature: MA Experiment 108463 PARAMETER Experiment Name: At_Germinating_Seeds_cDNA_P Parameter: Age (day) Value: 3 vs. 0
  misc_feature: MA Experiment 108463 PARAMETER Experiment Name: At_Germinating_Seeds_cDNA_P Parameter: Tissue Value: Germinating Seeds
  misc_feature: MA Experiment ID: 108464 Result: Down-regulated in Transcription
  misc_feature: MA Experiment 108464 PARAMETER Experiment Name: At_Germinating_Seeds_cDNA_P Parameter: Age (day) Value: 4 vs. 0
  misc_feature: MA Experiment 108464 PARAMETER Experiment Name: At_Germinating_Seeds_cDNA_P Parameter: Tissue Value: Germinating Seeds
  misc_feature: MA Experiment ID: 20000113 Result: Up-regulated in Transcription
  misc_feature: MA Experiment 20000113 PARAMETER Experiment Name: At_42deg_Heat_cDNA_P Parameter: Temperature (deg C) Value: 42 vs. 22
  misc_feature: MA Experiment 20000113 PARAMETER Experiment Name: At_42deg_Heat_cDNA_P Parameter: Timepoint (hr) Value: 8
  misc_feature: MA Experiment 20000113 PARAMETER Experiment Name: At_42deg_Heat_cDNA_P Parameter: Tissue Value: Aerial
  misc_feature: MA Experiment ID: 20000224 Result: Down-regulated in Transcription
  misc_feature: MA Experiment ID: 20000794 Result: Down-regulated in Transcription
  misc_feature: MA Experiment 20000794 PARAMETER Experiment Name: At_Petals_P Parameter: Age (day) Value: 23-25 days
  misc_feature: MA Experiment 20000794 PARAMETER Experiment Name: At_Petals_P Parameter: Plant Line Value: WS
  misc_feature: MA Experiment 20000794 PARAMETER Experiment Name: At_Petals_P Parameter: Tissue Value: Petals vs. Whole plant
  misc_feature: MA Experiment ID: 20001556 Result: Up-regulated in Transcription
  misc_feature: MA Experiment 20001556 PARAMETER Experiment Name: At_Drought_Soil_Dry_P Parameter: Age (day) Value: 26
  misc_feature: MA Experiment 20001556 PARAMETER Experiment Name: At_Drought_Soil_Dry_P Parameter: Organism Value: A. thaliana
  misc_feature: MA Experiment 20001556 PARAMETER Experiment Name: At_Drought_Soil_Dry_P Parameter: Plant Line Value: WS
  misc_feature: MA Experiment 20001556 PARAMETER Experiment Name: At_Drought_Soil_Dry_P Parameter: Post Timepoint (hr) Value: None
  misc_feature: MA Experiment 20001556 PARAMETER Experiment Name: At_Drought_Soil_Dry_P Parameter: Post-Treatment Value: None
  misc_feature: MA Experiment 20001556 PARAMETER Experiment Name: At_Drought_Soil_Dry_P Parameter: Timepoint (day) Value: 12
  misc_feature: MA Experiment 20001556 PARAMETER Experiment Name: At_Drought_Soil_Dry_P Parameter: Treatment Value: Drought vs. No Drought
  misc_feature: MA Experiment ID: 20001559 Result: Up-regulated in Transcription
  misc_feature: MA Experiment 20001559 PARAMETER Experiment Name: At_Drought_Soil_Dry_P Parameter: Age (day) Value: 28
  misc_feature: MA Experiment 20001559 PARAMETER Experiment Name: At_Drought_Soil_Dry_P Parameter: Organism Value: A. thaliana
  misc_feature: MA Experiment 20001559 PARAMETER Experiment Name: At_Drought_Soil_Dry_P Parameter: Plant Line Value: WS
  misc_feature: MA Experiment 20001559 PARAMETER Experiment Name: At_Drought_Soil_Dry_P Parameter: Post Timepoint (hr) Value: 29
  misc_feature: MA Experiment 20001559 PARAMETER Experiment Name: At_Drought_Soil_Dry_P Parameter: Post-Treatment Value: Re-Water vs. No Drought
  misc_feature: MA Experiment 20001559 PARAMETER Experiment Name: At_Drought_Soil_Dry_P Parameter: Timepoint (day) Value: 14
  misc_feature: MA Experiment 20001559 PARAMETER Experiment Name: At_Drought_Soil_Dry_P Parameter: Treatment Value: Drought vs. No Drought
ctccgtaaacctgttattctcggagaaacgttgagagagggttttccattctctgtggccgtcaccgtcgccgtgaaatagctctcctctctctatctccgattatataactgcaagctcaaaggaattgtttgttgttaaaatgtttcttacgcgatttgtcgggaggagattcttggcggctgcatcggcgcgatcggagtccactacagcagcagcagctgcctcgacgattcggacgccaacaaatccactcgaagagttctttgagttcgacagaagccaagacgaagataaacctgttgtctatggtcgaggttggaaagcttcagagctgcgtctcaagtcatgggatgatcttcagaagctgtggtacgttcttctcaaagagaaaaacatgttgatgactcagcgtcagatgcttcaggctcagaacatgcagtttcctaaccctgaacgcattccaaaggtgaggagatcaatgtgccgcattaagcatgtgctgaccgagagagcgattgaagaaccagattctagaagatcagccgagatgaagagaatggtaaatggtatgtgatcccattggctcttgttttggcaacctagcagtaagcacgagtcaatccgcagaggtgttgagtttttcggagtaagaaataacgcatagctttcaagactttggaactggtccaatgattgtgactgtagtagtgtcggcagtagaaaaacgtttggttggtatctgtacgcacatttctgtaacttatggttgatgtttctttttgagacacatgttggtcagtgttgattcagagctttgtctttctct

SEQ ID NO: 103888 - protein, 144 aa, Arabidopsis thaliana; identical to SEQ ID NO: 35600
  peptide (1)..(144): Ceres Seq. ID no. 13613805
  misc_feature (1)..(144): Homolog of NCBI NO: 15223019 NR Description: ribosomal protein L29p family [Arabidopsis >gi|14030695|gb|AAK53022.1|AF375438_1 At1g07830/F24B9_7 thaliana] >gi|19548071|gb|AAL87399.1| At1g07830/F24B9_7
  misc_feature (58)..(142): Homolog of NCBI NO: 25407010 NR Description: hypothetical protein [imported] - Arabidopsis >gi|8439885|gb|AAF75071.1|AC007583_7 Contains similarity to a ribosomal protein from Saccharomyces cerevisiae gb|Z30582. ESTS
  misc_feature (1)..(57): Homolog of NCBI NO: 25407010 NR Description: hypothetical protein [imported] - Arabidopsis >gi|8439885|gb|AAF75071.1|AC007583_7 Contains similarity to a ribosomal protein from Saccharomyces cerevisiae gb|Z30582. ESTS
  misc_feature (18)..(124): Homolog of NCBI NO: 31198037 NR Description: ENSANGP00000013554 [Anopheles gambiae]
  misc_feature (12)..(139): Homolog of NCBI NO: 39595870 NR Description: Hypothetical protein CBG12849 [Caenorhabditis
  misc_feature (38)..(124): Homolog of NCBI NO: 20810578 NR Description: 4833424P18Rik protein [Mus musculus]
  misc_feature (38)..(124): Homolog of NCBI NO: 20865861 NR Description: similar to CGI-204 [Mus musculus]
  misc_feature (38)..(124): Homolog of NCBI NO: 23273006 NR Description: 4833424P18Rik protein [Mus musculus]
  misc_feature (13)..(124): Homolog of NCBI NO: 21618497 NR Description: Similar to mitochondrial ribosomal protein L47
  misc_feature (38)..(124): Homolog of NCBI NO: 34856796 NR Description: similar to mitochondrial ribosomal protein L47

SEQ ID NO: 103889 - DNA, 851 bp, Arabidopsis thaliana
  misc_feature (1)..(851): Ceres Seq. ID no. 13613810
  misc_feature: MA Experiment ID: 108434 Result: Up-regulated in Transcription
  misc_feature: MA Experiment 108434 PARAMETER Experiment Name: At_Root_Tips_cDNA_P Parameter: Tissue Value: Root Tips
  misc_feature: MA Experiment ID: 20000184 Result: Down-regulated in Transcription
  misc_feature: MA Experiment 20000184 PARAMETER Experiment Name: At_Shoots__P Parameter: Age (day) Value: 7
  misc_feature: MA Experiment 20000184 PARAMETER Experiment Name: At_Shoots__P Parameter: Tissue Value: Shoots vs. Whole Plant
gacattcctctctttcttctgctctcggaattggtgttgcagaagttgcaaatttggaagaaaagttaacaggactggtgaagtatcaaaatttggggttttgctacgatgacgctaggtgctcggcttgttgctcccatgattatacttctcctttttataccgattgaattagttaaagcggaagtcattacactgacaccagaaaccttttctgacaagataaaggagaaggatactgcgtggttcgtaaagttttgtgttccttggtgtaaacactgcaagaaactggggaatttgtgggaagacttgggaaaagcaatggagggagacgatgaaattgaggttggtgaagtagactgtggtactagcagagctgtttgcaccaaagttgaaattcactcgtatccaacatttatgctattttacaatggagaagaagtttcgaaatataaaggaaaaagagacgttgaatcgctcaaggcttttgttgtagaggaaactgaaaaggcagcagaaaaagcacagcttgaagacaaggaactgtgatacaactagtcggtgattattagaacctgatacattgttccctttggttttcattttgcctatgcagttgtgtgactcttaccgttagttagataggcatggttttcagcacgatggaggagcatctttgggtttaaaggtttttcacaccactgttttgctaaaatattcagtttccattttattcagagtcagataagcaaagacgtaagtgtagttagtcgagatttcttacaagtttgtgttgtatgttcgttttaagagcagctgcagaccaaagttcttgctttaaaatttcatat

SEQ ID NO: 103890 - protein, 146 aa, Arabidopsis thaliana; identical to SEQ ID NO: 29677
  peptide (1)..(146): Ceres Seq. ID no. 13613811
  misc_feature (26)..(133): Pfam Name: Thioredoxin Pfam Description: Thioredoxin
  misc_feature (1)..(146): Homolog of NCBI NO: 15223058 NR Description: protein disulfide isomerase - related thaliana] >gi|26450503|dbj|BAC42365.1| unknown protein thaliana] >gi|28827366|gb|AAO50527.1| unknown protein
  misc_feature (1)..(130): Homolog of NCBI NO: 1532175 NR Description: similar to protein disulfide isomerase
  misc_feature (30)..(146): Homolog of NCBI NO: 8778824 NR Description: T6D22.5 [Arabidopsis thaliana]
  misc_feature (23)..(145): Homolog of NCBI NO: 38649034 NR Description: Unknown (protein for MGC:75894) [Silurana
  misc_feature (24)..(133): Homolog of NCBI NO: 19353593 NR Description: similar to thioredoxin related protein [Mus
  misc_feature (24)..(133): Homolog of NCBI NO: 21703732 NR Description: similar to thioredoxin related protein [Mus >gi|16740761|gb|AAH16252.1| similar to thioredoxin related
  misc_feature (24)..(133): Homolog of NCBI NO: 37574006 NR Description: Txndc5 protein [Mus musculus]
  misc_feature (1)..(133): Homolog of NCBI NO: 13540604 NR Description: thioredoxin domain containing 5; thioredoxin protein [Homo sapiens] >gi|12654715|gb|AAH01199.1| Thioredoxin
  misc_feature (1)..(133): Homolog of NCBI NO: 20067392 NR Description: thioredoxin related protein [Homo sapiens]
  misc_feature (1)..(133): Homolog of NCBI NO: 21740140 NR Description: hypothetical protein [Homo sapiens]

SEQ ID NO: 103891 - protein, 136 aa, Arabidopsis thaliana; identical to SEQ ID NO: 29678
  peptide (1)..(136): Ceres Seq. ID no. 13613812
  misc_feature (16)..(123): Pfam Name: Thioredoxin Pfam Description: Thioredoxin
  misc_feature (1)..(136): Homolog of NCBI NO: 15223058 NR Description: protein disulfide isomerase - related thaliana] >gi|26450503|dbj|BAC42365.1| unknown protein thaliana] >gi|28827366|gb|AAO50527.1| unknown protein
  misc_feature (1)..(120): Homolog of NCBI NO: 1532175 NR Description: similar to protein disulfide isomerase
  misc_feature (20)..(136): Homolog of NCBI NO: 8778824 NR Description: T6D22.5 [Arabidopsis thaliana]
  misc_feature (13)..(135): Homolog of NCBI NO: 38649034 NR Description: Unknown (protein for MGC:75894) [Silurana
  misc_feature (14)..(123): Homolog of NCBI NO: 19353593 NR Description: similar to thioredoxin related protein [Mus
  misc_feature (14)..(123): Homolog of NCBI NO: 21703732 NR Description: similar to thioredoxin related protein [Mus >gi|16740761|gb|AAH16252.1| similar to thioredoxin related
  misc_feature (14)..(123): Homolog of NCBI NO: 37574006 NR Description: Txndc5 protein [Mus musculus]
  misc_feature (1)..(123): Homolog of NCBI NO: 13540604 NR Description: thioredoxin domain containing 5; thioredoxin protein [Homo sapiens] >gi|12654715|gb|AAH01199.1| Thioredoxin
  misc_feature (1)..(123): Homolog of NCBI NO: 20067392 NR Description: thioredoxin related protein [Homo sapiens]
  misc_feature (1)..(123): Homolog of NCBI NO: 21740140 NR Description: hypothetical protein [Homo sapiens]

SEQ ID NO: 103892 - protein, 75 aa, Arabidopsis thaliana; identical to SEQ ID NO: 29679
  peptide (1)..(75): Ceres Seq. ID no. 13613813
  misc_feature (1)..(62): Pfam Name: Thioredoxin Pfam Description: Thioredoxin
  misc_feature (1)..(75): Homolog of NCBI NO: 15223058 NR Description: protein disulfide isomerase - related thaliana] >gi|26450503|dbj|BAC42365.1| unknown protein thaliana] >gi|28827366|gb|AAO50527.1| unknown protein
  misc_feature (1)..(59): Homolog of NCBI NO: 1532175 NR Description: similar to protein disulfide isomerase
  misc_feature (1)..(75): Homolog of NCBI NO: 8778824 NR Description: T6D22.5 [Arabidopsis thaliana]
  misc_feature (1)..(74): Homolog of NCBI NO: 38649034 NR Description: Unknown (protein for MGC:75894) [Silurana
  misc_feature (1)..(62): Homolog of NCBI NO: 19353593 NR Description: similar to thioredoxin related protein [Mus
  misc_feature (1)..(62): Homolog of NCBI NO: 21703732 NR Description: similar to thioredoxin related protein [Mus >gi|16740761|gb|AAH16252.1| similar to thioredoxin related
  misc_feature (1)..(62): Homolog of NCBI NO: 37574006 NR Description: Txndc5 protein [Mus musculus]
  misc_feature (1)..(62): Homolog of NCBI NO: 13540604 NR Description: thioredoxin domain containing 5; thioredoxin protein [Homo sapiens] >gi|12654715|gb|AAH01199.1| Thioredoxin
  misc_feature (1)..(62): Homolog of NCBI NO: 20067392 NR Description: thioredoxin related protein [Homo sapiens]
  misc_feature (1)..(62): Homolog of NCBI NO: 21740140 NR Description: hypothetical protein [Homo sapiens]

SEQ ID NO: 103893 - DNA, 1085 bp, Arabidopsis thaliana
  misc_feature (1)..(1085): Ceres Seq. ID no. 13613814
  misc_feature: MA Experiment ID: 108474 Result: Down-regulated in Transcription
  misc_feature: MA Experiment 108474 PARAMETER Experiment Name: At_Drought_Flowers_cDNA_P Parameter: Timepoint (hr) Value: null
  misc_feature: MA Experiment 108474 PARAMETER Experiment Name: At_Drought_Flowers_cDNA_P Parameter: Treatment Value: Drought vs. No Drought
  misc_feature: MA Experiment ID: 108501 Result: Down-regulated in Transcription
  misc_feature: MA Experiment 108501 PARAMETER Experiment Name: At_ap2_floral_buds_cDNA_P Parameter: Plant Line Value: ap2 (Ler.)
  misc_feature: MA Experiment 108501 PARAMETER Experiment Name: At_ap2_floral_buds_cDNA_P Parameter: Tissue Value: Closed Flower
  misc_feature: MA Experiment ID: 20000265 Result: Up-regulated in Transcription
  misc_feature: MA Experiment 20000265 PARAMETER Experiment Name: At_Open_Flower_P Parameter: Age (day) Value: 21
  misc_feature: MA Experiment 20000265 PARAMETER Experiment Name: At_Open_Flower_P Parameter: Plant Line Value: WS
  misc_feature: MA Experiment 20000265 PARAMETER Experiment Name: At_Open_Flower_P Parameter: Tissue Value: Closed Flower vs. Whole Plant
  misc_feature: MA Experiment ID: 20000709 Result: Down-regulated in Transcription
  misc_feature: MA Experiment 20000709 PARAMETER Experiment Name: At_15mM_NH4NO3_L-to-H_P Parameter: Age (hr) Value: 14
  misc_feature: MA Experiment 20000709 PARAMETER Experiment Name: At_15mM_NH4NO3_L-to-H_P Parameter: Organism Value: A. thaliana
  misc_feature: MA Experiment 20000709 PARAMETER Experiment Name: At_15mM_NH4NO3_L-to-H_P Parameter: Plant Line Value: WS
  misc_feature: MA Experiment 20000709 PARAMETER Experiment Name: At_15mM_NH4NO3_L-to-H_P Parameter: Timepoint (hr) Value: 4
  misc_feature: MA Experiment 20000709 PARAMETER Experiment Name: At_15mM_NH4NO3_L-to-H_P Parameter: Tissue Value: Aerial
  misc_feature: MA Experiment 20000709 PARAMETER Experiment Name: At_15mM_NH4NO3_L-to-H_P Parameter: Treatment Value: 15mM NH4NO3 vs. 30mM Mannitol
  misc_feature: MA Experiment ID: 20001910 Result: Down-regulated in Transcription
  misc_feature: MA Experiment 20001910 PARAMETER Experiment Name: At_Drought_Reproduction_P Parameter: Age (day) Value: 37
  misc_feature: MA Experiment 20001910 PARAMETER Experiment Name: At_Drought_Reproduction_P Parameter: Organism Value: A. thaliana
  misc_feature: MA Experiment 20001910 PARAMETER Experiment Name: At_Drought_Reproduction_P Parameter: Plant Line Value: WS
  misc_feature: MA Experiment 20001910 PARAMETER Experiment Name: At_Drought_Reproduction_P Parameter: Timepoint (day) Value: 7
  misc_feature: MA Experiment 20001910 PARAMETER Experiment Name: At_Drought_Reproduction_P Parameter: Tissue Value: Flowers
  misc_feature: MA Experiment 20001910 PARAMETER Experiment Name: At_Drought_Reproduction_P Parameter: Treatment Value: Drought vs. No Drought
gatcaacatctccttgaagttgtttcataagaataagagctataaaagaggataaaaccaaaatttgaatttttttcttctatctctctccccaagatatatagcacaagaaaatgaagataccatcaattggctatgtctttttccttatcttcatctctattacaattgtttcgagttcaccagatcatggagaagttgaggacgaaacgcagtttaactacgagaagaaaggagagaaggggccagagaactggggaagactaaagccagagtgggcaatgtgtggaaaaggcaacatgcagtctccgattgatcttacggacaaaagagtcttgattgatcataatcttggataccttcgtagccagtatttaccttcaaatgccaccattaagaacagaggccatgatatcatgatgaaatttgaaggaggaaatgcaggtttaggtatcactattaatggtactgaatataaacttcaacagattcattggcactctccttccgaacacacactcaatggcaaaaggtttgttcttgaggaacacatggttcatcagagcaaagatggacgcaacgctgttgtcgctttcttttacaaattgggaaaacctgactattttctcctcacgttggaaagatacttgaagaggataactgatacacacgaatcccaggaatttgtcgagatggttcatcctagaacattcggttttgaatcaaaacactattatagatttatcggatcacttacaactccaccgtgttctgaaaatgtgatttggacgatttccaaagagatgaggactgtgacattaaaacaattgatcatgcttcgagtgactgtacacgatcaatctaactcaaatgctagaccgcttcagcgtaaaaatgagcgtccggtggcactttacataccaacatggcatagtaaactatattaaatatttaagtttggtttatattctttctagtaatctttgaaatattgtaagagataatgcttctaataaataacattggatttattggaattaatgtattgaaaaaactatgcaaatactacagtgtattttggaacg

SEQ ID NO: 103894 - protein, 277 aa, Arabidopsis thaliana
  peptide (1)..(277): Ceres Seq. ID no. 13613815
  misc_feature (42)..(268): Pfam Name: Eukaryotic-type carbonic anhydrase Pfam Description: Eukaryotic-type carbonic anhydrase
  misc_feature (29)..(277): Homolog of NCBI NO: 15223097 NR Description: carbonic anhydrase -related [Arabidopsis thaliana]
  misc_feature (27)..(195): Homolog of NCBI NO: 15241186 NR Description: proline-rich protein family [Arabidopsis >gi|10177831|dbj|BAB11260.1| contains similarity to carbonic
  misc_feature (229)..(270): Homolog of NCBI NO: 15241186 NR Description: proline-rich protein family [Arabidopsis >gi|10177831|dbj|BAB11260.1| contains similarity to carbonic
  misc_feature (1)..(24): Homolog of NCBI NO: 15241186 NR Description: proline-rich protein family [Arabidopsis >gi|10177831|dbj|BAB11260.1| contains similarity to carbonic
  misc_feature (5)..(270): Homolog of NCBI NO: 15223122 NR Description: storage protein -related [Arabidopsis thaliana]
  misc_feature (29)..(270): Homolog of NCBI NO: 25291473 NR Description: probable carbonic anhydrase [imported] - thaliana >gi|4803960|gb|AAD29832.1| putative carbonic anhydrase
  misc_feature (5)..(270): Homolog of NCBI NO: 25407021 NR Description: protein T6D22.16 [imported] - Arabidopsis >gi|8778838|gb|AAF79837.1|AC026875_17 T6D22.16 [Arabidopsis
  misc_feature (29)..(233): Homolog of NCBI NO: 30683808 NR Description: carbonic anhydrase -related [Arabidopsis thaliana]
  misc_feature (9)..(270): Homolog of NCBI NO: 15233471 NR Description: carbonic anhydrase -related protein [Arabidopsis
  misc_feature (1)..(274): Homolog of NCBI NO: 29468280 NR Description: nectarin III [Nicotiana langsdorffii x Nicotiana
MKIPSIGYVFFLIFISITIVSSSPDHGEVEDETQFNYEKKGEKGPENWGRLKPEWAMCGKGNMQSPIDLTDKRVLIDHNLGYLRSQYLPSNATIKNRGHDIMMKFEGGNAGLGITINGTEYKLQQIHWHSPSEHTLNGKRFVLEEHMVHQSKDGRNAVVAFFYKLGKPDYFLLTLERYLKRITDTHESQEFVEMVHPRTFGFESKHYYRFIGSLTTPPCSENVIWTISKEMRTVTLKQLIMLRVTVHDQSNSNARPLQRKNERPVALYIPTWHSKLY

SEQ ID NO: 103895 - protein, 221 aa, Arabidopsis thaliana; identical to SEQ ID NO: 75103
  peptide (1)..(221): Ceres Seq. ID no. 13613816
  misc_feature (1)..(212): Pfam Name: Eukaryotic-type carbonic anhydrase Pfam Description: Eukaryotic-type carbonic anhydrase
  misc_feature (1)..(221): Homolog of NCBI NO: 15223097 NR Description: carbonic anhydrase -related [Arabidopsis thaliana]
  misc_feature (1)..(139): Homolog of NCBI NO: 15241186 NR Description: proline-rich protein family [Arabidopsis >gi|10177831|dbj|BAB11260.1| contains similarity to carbonic
  misc_feature (173)..(214): Homolog of NCBI NO: 15241186 NR Description: proline-rich protein family [Arabidopsis >gi|10177831|dbj|BAB11260.1| contains similarity to carbonic
  misc_feature (1)..(214): Homolog of NCBI NO: 15223122 NR Description: storage protein -related [Arabidopsis thaliana]
  misc_feature (1)..(214): Homolog of NCBI NO: 25291473 NR Description: probable carbonic anhydrase [imported] - thaliana >gi|4803960|gb|AAD29832.1| putative carbonic anhydrase
  misc_feature (1)..(214): Homolog of NCBI NO: 25407021 NR Description: protein T6D22.16 [imported] - Arabidopsis >gi|8778838|gb|AAF79837.1|AC026875_17 T6D22.16 [Arabidopsis
  misc_feature (1)..(177): Homolog of NCBI NO: 30683808 NR Description: carbonic anhydrase -related [Arabidopsis thaliana]
  misc_feature (1)..(214): Homolog of NCBI NO: 15233471 NR Description: carbonic anhydrase -related protein [Arabidopsis
  misc_feature (1)..(218): Homolog of NCBI NO: 29468280 NR Description: nectarin III [Nicotiana langsdorffii x Nicotiana
  misc_feature (1)..(97): Homolog of NCBI NO: 25407019 NR Description: protein T6D22.14 [imported] - Arabidopsis >gi|8778840|gb|AAF79839.1|AC026875_19 T6D22.14 [Arabidopsis

SEQ ID NO: 103896 - protein, 215 aa, Arabidopsis thaliana; identical to SEQ ID NO: 75104
  peptide (1)..(215): Ceres Seq. ID no. 13613817
  misc_feature (1)..(206): Pfam Name: Eukaryotic-type carbonic anhydrase Pfam Description: Eukaryotic-type carbonic anhydrase
  misc_feature (1)..(215): Homolog of NCBI NO: 15223097 NR Description: carbonic anhydrase -related [Arabidopsis thaliana]
  misc_feature (1)..(133): Homolog of NCBI NO: 15241186 NR Description: proline-rich protein family [Arabidopsis >gi|10177831|dbj|BAB11260.1| contains similarity to carbonic
  misc_feature (167)..(208): Homolog of NCBI NO: 15241186 NR Description: proline-rich protein family [Arabidopsis >gi|10177831|dbj|BAB11260.1| contains similarity to carbonic
  misc_feature (1)..(208): Homolog of NCBI NO: 15223122 NR Description: storage protein -related [Arabidopsis thaliana]
  misc_feature (1)..(208): Homolog of NCBI NO: 25291473 NR Description: probable carbonic anhydrase [imported] - thaliana >gi|4803960|gb|AAD29832.1| putative carbonic anhydrase
  misc_feature (1)..(208): Homolog of NCBI NO: 25407021 NR Description: protein T6D22.16 [imported] - Arabidopsis >gi|8778838|gb|AAF79837.1|AC026875_17 T6D22.16 [Arabidopsis
  misc_feature (1)..(171): Homolog of NCBI NO: 30683808 NR Description: carbonic anhydrase -related [Arabidopsis thaliana]
  misc_feature (1)..(208): Homolog of NCBI NO: 15233471 NR Description: carbonic anhydrase -related protein [Arabidopsis
  misc_feature (1)..(212): Homolog of NCBI NO: 29468280 NR Description: nectarin III [Nicotiana langsdorffii x Nicotiana
  misc_feature (1)..(91): Homolog of NCBI NO: 25407019 NR Description: protein T6D22.14 [imported] - Arabidopsis >gi|8778840|gb|AAF79839.1|AC026875_19 T6D22.14 [Arabidopsis

SEQ ID NO: 103897 - DNA, 719 bp, Arabidopsis thaliana
  misc_feature (1)..(719): Ceres Seq. ID no. 13613829
  misc_feature: MA Experiment ID: 20000171 Result: Up-regulated in Transcription
  misc_feature: MA Experiment 20000171 PARAMETER Experiment Name: At_42deg_Heat_P Parameter: Age (day) Value: 14
  misc_feature: MA Experiment 20000171 PARAMETER Experiment Name: At_42deg_Heat_P Parameter: Organism Value: A. thaliana
  misc_feature: MA Experiment 20000171 PARAMETER Experiment Name: At_42deg_Heat_P Parameter: Plant Line Value: WS
  misc_feature: MA Experiment 20000171 PARAMETER Experiment Name: At_42deg_Heat_P Parameter: Temperature (deg C) Value: 42 vs. 22
  misc_feature: MA Experiment 20000171 PARAMETER Experiment Name: At_42deg_Heat_P Parameter: Timepoint (hr) Value: 1
  misc_feature: MA Experiment 20000171 PARAMETER Experiment Name: At_42deg_Heat_P Parameter: Tissue Value: Aerial
  misc_feature: MA Experiment ID: 20000173 Result: Up-regulated in Transcription
  misc_feature: MA Experiment 20000173 PARAMETER Experiment Name: At_42deg_Heat_P Parameter: Age (day) Value: 14
  misc_feature: MA Experiment 20000173 PARAMETER Experiment Name: At_42deg_Heat_P Parameter: Organism Value: A. thaliana
  misc_feature: MA Experiment 20000173 PARAMETER Experiment Name: At_42deg_Heat_P Parameter: Plant Line Value: WS
  misc_feature: MA Experiment 20000173 PARAMETER Experiment Name: At_42deg_Heat_P Parameter: Temperature (deg C) Value: 42 vs. 22
  misc_feature: MA Experiment 20000173 PARAMETER Experiment Name: At_42deg_Heat_P Parameter: Timepoint (hr) Value: 6
  misc_feature: MA Experiment 20000173 PARAMETER Experiment Name: At_42deg_Heat_P Parameter: Tissue Value: Aerial
  misc_feature: MA Experiment ID: 20000179 Result: Up-regulated in Transcription
  misc_feature: MA Experiment 20000179 PARAMETER Experiment Name: At_Germinating_Seeds_P Parameter: Age (hr) Value: 6 vs. 0
  misc_feature: MA Experiment 20000179 PARAMETER Experiment Name: At_Germinating_Seeds_P Parameter: Tissue Value: Germinating Seeds
  misc_feature: MA Experiment ID: 20000180 Result: Up-regulated in Transcription
  misc_feature: MA Experiment 20000180 PARAMETER Experiment Name: At_Germinating_Seeds_P Parameter: Age (hr) Value: 24 vs. 0
  misc_feature: MA Experiment 20000180 PARAMETER Experiment Name: At_Germinating_Seeds_P Parameter: Tissue Value: Germinating Seeds
  misc_feature: MA Experiment ID: 20000234 Result: Up-regulated in Transcription
  misc_feature: MA Experiment 20000234 PARAMETER Experiment Name: At_Siliques_P Parameter: Age (day) Value: 21
  misc_feature: MA Experiment 20000234 PARAMETER Experiment Name: At_Siliques_P Parameter: Organism Value: A. thaliana
  misc_feature: MA Experiment 20000234 PARAMETER Experiment Name: At_Siliques_P Parameter: Plant Line Value: WS
  misc_feature: MA Experiment 20000234 PARAMETER Experiment Name: At_Siliques_P Parameter: Tissue Value: Less Than 5mm Siliques vs. Whole Plant
  misc_feature: MA Experiment ID: 20000235 Result: Up-regulated in Transcription
  misc_feature: MA Experiment 20000235 PARAMETER Experiment Name: At_Siliques_P Parameter: Age (day) Value: 21
  misc_feature: MA Experiment 20000235 PARAMETER Experiment Name: At_Siliques_P Parameter: Organism Value: A. thaliana
  misc_feature: MA Experiment 20000235 PARAMETER Experiment Name: At_Siliques_P Parameter: Plant Line Value: WS
  misc_feature: MA Experiment 20000235 PARAMETER Experiment Name: At_Siliques_P Parameter: Tissue Value: 5-10mm Siliques vs. Whole Plant
  misc_feature: MA Experiment ID: 20000264 Result: Up-regulated in Transcription
  misc_feature: MA Experiment 20000264 PARAMETER Experiment Name: At_Open_Flower_P Parameter: Age (day) Value: 21
  misc_feature: MA Experiment 20000264 PARAMETER Experiment Name: At_Open_Flower_P Parameter: Plant Line Value: WS
  misc_feature: MA Experiment 20000264 PARAMETER Experiment Name: At_Open_Flower_P Parameter: Tissue Value: Open Flower vs. Whole Plant
  misc_feature: MA Experiment ID: 20000443 Result: Up-regulated in Transcription
  misc_feature: MA Experiment 20000443 PARAMETER Experiment Name: At_1uM_BR-BRZ__P Parameter: Tissue Value: Shoot Apices
  misc_feature: MA Experiment 20000443 PARAMETER Experiment Name: At_1uM_BR-BRZ__P Parameter: Treatment Value: 1uM BRZ vs. No Treatment
  misc_feature: MA Experiment ID: 20000456 Result: Up-regulated in Transcription
  misc_feature: MA Experiment 20000456 PARAMETER Experiment Name: At_100uM_BA_P Parameter: Age (day) Value: 14
  misc_feature: MA Experiment 20000456 PARAMETER Experiment Name: At_100uM_BA_P Parameter: Organism Value: A. thaliana
  misc_feature: MA Experiment 20000456 PARAMETER Experiment Name: At_100uM_BA_P Parameter: Plant Line Value: WS
  misc_feature: MA Experiment 20000456 PARAMETER Experiment Name: At_100uM_BA_P Parameter: Timepoint (hr) Value: 6
  misc_feature: MA Experiment 20000456 PARAMETER Experiment Name: At_100uM_BA_P Parameter: Tissue Value: Aerial
  misc_feature: MA Experiment 20000456 PARAMETER Experiment Name: At_100uM_BA_P Parameter: Treatment Value: 100uM BA vs. No Treatment
  misc_feature: MA Experiment ID: 20000709 Result: Up-regulated in Transcription
  misc_feature: MA Experiment 20000709 PARAMETER Experiment Name: At_15mM_NH4NO3_L-to-H_P Parameter: Age (hr) Value: 14
  misc_feature: MA Experiment 20000709 PARAMETER Experiment Name: At_15mM_NH4NO3_L-to-H_P Parameter: Organism Value: A. thaliana
  misc_feature: MA Experiment 20000709 PARAMETER Experiment Name: At_15mM_NH4NO3_L-to-H_P Parameter: Plant Line Value: WS
  misc_feature: MA Experiment 20000709 PARAMETER Experiment Name: At_15mM_NH4NO3_L-to-H_P Parameter: Timepoint (hr) Value: 4
  misc_feature: MA Experiment 20000709 PARAMETER Experiment Name: At_15mM_NH4NO3_L-to-H_P Parameter: Tissue Value: Aerial
  misc_feature: MA Experiment 20000709 PARAMETER Experiment Name: At_15mM_NH4NO3_L-to-H_P Parameter: Treatment Value: 15mM NH4NO3 vs. 30mM Mannitol
  misc_feature: MA Experiment ID: 20001450 Result: Down-regulated in Transcription
  misc_feature: MA Experiment 20001450 PARAMETER Experiment Name: At_Far-red-induction_P Parameter: Age (day) Value: 7
  misc_feature: MA Experiment 20001450 PARAMETER Experiment Name: At_Far-red-induction_P Parameter: Light Value: Far-red vs. White
  misc_feature: MA Experiment 20001450 PARAMETER Experiment Name: At_Far-red-induction_P Parameter: Organism Value: A. thaliana
  misc_feature: MA Experiment 20001450 PARAMETER Experiment Name: At_Far-red-induction_P Parameter: Plant Line Value: Columbia
  misc_feature: MA Experiment 20001450 PARAMETER Experiment Name: At_Far-red-induction_P Parameter: Timepoint (hr) Value: 8
  misc_feature: MA Experiment 20001450 PARAMETER Experiment Name: At_Far-red-induction_P Parameter: Tissue Value: Whole Plant
  misc_feature: MA Experiment ID: 20001451 Result: Down-regulated in Transcription
  misc_feature: MA Experiment 20001451 PARAMETER Experiment Name: At_Far-red-induction_P Parameter: Age (day) Value: 7
  misc_feature: MA Experiment 20001451 PARAMETER Experiment Name: At_Far-red-induction_P Parameter: Light Value: Far-red vs. White
  misc_feature: MA Experiment 20001451 PARAMETER Experiment Name: At_Far-red-induction_P Parameter: Organism Value: A. thaliana
  misc_feature: MA Experiment 20001451 PARAMETER Experiment Name: At_Far-red-induction_P Parameter: Plant Line Value: Columbia
  misc_feature: MA Experiment 20001451 PARAMETER Experiment Name: At_Far-red-induction_P Parameter: Timepoint (hr) Value: 24
  misc_feature: MA Experiment 20001451 PARAMETER Experiment Name: At_Far-red-induction_P Parameter: Tissue Value: Whole Plant
  misc_feature: MA Experiment ID: 20001557 Result: Up-regulated in Transcription
  misc_feature: MA Experiment 20001557 PARAMETER Experiment Name: At_Drought_Soil_Dry_P Parameter: Age (day) Value: 27
  misc_feature: MA Experiment 20001557 PARAMETER Experiment Name: At_Drought_Soil_Dry_P Parameter: Organism Value: A. thaliana
  misc_feature: MA Experiment 20001557 PARAMETER Experiment Name: At_Drought_Soil_Dry_P Parameter: Plant Line Value: WS
  misc_feature: MA Experiment 20001557 PARAMETER Experiment Name: At_Drought_Soil_Dry_P Parameter: Post Timepoint (hr) Value: 3
  misc_feature: MA Experiment 20001557 PARAMETER Experiment Name: At_Drought_Soil_Dry_P Parameter: Post-Treatment Value: Re-Water vs. No Drought
  misc_feature: MA Experiment 20001557 PARAMETER Experiment Name: At_Drought_Soil_Dry_P Parameter: Timepoint (day) Value: 13
  misc_feature: MA Experiment 20001557 PARAMETER Experiment Name: At_Drought_Soil_Dry_P Parameter: Treatment Value: Drought vs. No Drought
  misc_feature: MA Experiment ID: 20001768 Result: Up-regulated in Transcription
  misc_feature: MA Experiment 20001768 PARAMETER Experiment Name: At_Far-red-enriched-adult_P Parameter: Age (day) Value: 28
  misc_feature: MA Experiment 20001768 PARAMETER Experiment Name: At_Far-red-enriched-adult_P Parameter: Light Value: Far-red enriched vs. White
  misc_feature: MA Experiment 20001768 PARAMETER Experiment Name: At_Far-red-enriched-adult_P Parameter: Organism Value: A. thaliana
  misc_feature: MA Experiment 20001768 PARAMETER Experiment Name: At_Far-red-enriched-adult_P Parameter: Plant Line Value: Columbia
  misc_feature: MA Experiment 20001768 PARAMETER Experiment Name: At_Far-red-enriched-adult_P Parameter: Timepoint (hr) Value: 1
  misc_feature: MA Experiment 20001768 PARAMETER Experiment Name: At_Far-red-enriched-adult_P Parameter: Tissue Value: Aerial
atcataaattcgaaattcaattcgtcggaaaattgttcagatttcgaaatcaaccgagaaaatgtcgctgattccaagcttcttcggcaacaacaggcgaatcaacaacaacatattcgatccattctcactcgacgtatgggatccattcaaggaacttcaattcccgtcatcgtcttcgtcggcgatagcaaacgcacgtgtggattggaaagagacggcggaggcgcacgtgttcaaggcggatttaccggggatgaagaaagaagaggttaaagtagagattgaggatgatagtgtgcttaagatcagcggagagagacacgttgagaaagaggagaagcaggacacgtggcatcgtgtagagagatcgagtgggggattctcgaggaagtttaggttaccggagaatgtgaagatggatcaagttaaagcttcaatggagaatggtgttttgactgtgactgtgcctaaagtggagactaataagaagaaggctcaagttaagtctattgatatctctggctaagccaatttagcttgatttgagttctctctgggtcttgactttgtgtgtgtgtgtctctgatgattatggttcttcgtttgattgtagttttaaactaataatcaatggaagctagtaacttgtgtgacaagtaaatgtatggtggagaaatgtgtgtatttggattataatagaaatacctattttcatc

SEQ ID NO: 103898 - protein, 155 aa, Arabidopsis thaliana
  peptide (1)..(155): Ceres Seq. ID no. 13613830
  misc_feature (1)..(155): Homolog of NCBI NO: 15218934 NR Description: heat shock protein, putative [Arabidopsis >gi|25295702|pir||G96622 probable Heat shock hsp20 protein
  misc_feature (1)..(155): Homolog of NCBI NO: 21592809 NR Description: heat shock protein, putative [Arabidopsis
  misc_feature (1)..(155): Homolog of NCBI NO: 15222395 NR Description: heat shock protein, putative [Arabidopsis >gi|8778561|gb|AAF79569.1|AC022464_27 F22G5.25 [Arabidopsis >gi|21555637|gb|AAM63903.1| heat shock protein, putative shock
  misc_feature (1)..(155): Homolog of NCBI NO: 15227552 NR Description: small heat shock protein -related [Arabidopsis
  misc_feature (1)..(155): Homolog of NCBI NO: 3341464 NR Description: Hsp20.1 protein [Lycopersicon peruvianum]
  misc_feature (1)..(155): Homolog of NCBI NO: 123538 NR Description: 17.5 KD CLASS I HEAT SHOCK PROTEIN (HSP 17.5-M)
  misc_feature (1)..(155): Homolog of NCBI NO: 4836473 NR Description: 17.6 kD class I small heat shock protein esculentum] >gi|24954791|gb|AAN64315.1| type I small heat shock
  misc_feature (1)..(155): Homolog of NCBI NO: 123556 NR Description: 18.2 KD CLASS I HEAT SHOCK PROTEIN
MSLIPSFFGNNRRINNNIFDPFSLDVWDPFKELQFPSSSSSAIANARVDWKETAEAHVFKADLPGMKKEEVKVEIEDDSVLKISGERHVEKEEKQDTWHRVERSSGGFSRKFRLPENVKMDQVKASMENGVLTVTVPKVETNKKKAQVKSIDISG

SEQ ID NO: 103899 - protein, 91 aa, Arabidopsis thaliana
  peptide (1)..(91): Ceres Seq. ID no. 13613831
IINSKFNSSENCSDFEINRENVADSKLLRQQQANQQQHIRSILTRRMGSIQGTSIPVIVFVGDSKRTCGLERDGGGARVQGGFTGDEERRG

SEQ ID NO: 103900 - protein, 90 aa, Arabidopsis thaliana; identical to SEQ ID NO: 22187
  peptide (1)..(90): Ceres Seq. ID no. 13613832
  misc_feature (1)..(90): Homolog of NCBI NO: 15218934 NR Description: heat shock protein, putative [Arabidopsis >gi|25295702|pir||G96622 probable Heat shock hsp20 protein
  misc_feature (1)..(90): Homolog of NCBI NO: 21592809 NR Description: heat shock protein, putative [Arabidopsis
  misc_feature (1)..(90): Homolog of NCBI NO: 15222395 NR Description: heat shock protein, putative [Arabidopsis >gi|8778561|gb|AAF79569.1|AC022464_27 F22G5.25 [Arabidopsis >gi|21555637|gb|AAM63903.1| heat shock protein, putative shock
  misc_feature (1)..(90): Homolog of NCBI NO: 15227552 NR Description: small heat shock protein -related [Arabidopsis
  misc_feature (1)..(90): Homolog of NCBI NO: 3341464 NR Description: Hsp20.1 protein [Lycopersicon peruvianum]
  misc_feature (1)..(90): Homolog of NCBI NO: 123538 NR Description: 17.5 KD CLASS I HEAT SHOCK PROTEIN (HSP 17.5-M)
  misc_feature (1)..(90): Homolog of NCBI NO: 4836473 NR Description: 17.6 kD class I small heat shock protein esculentum] >gi|24954791|gb|AAN64315.1| type I small heat shock
  misc_feature (1)..(90): Homolog of NCBI NO: 123556 NR Description: 18.2 KD CLASS I HEAT SHOCK PROTEIN

SEQ ID NO: 103901 - DNA, 1972 bp, Arabidopsis thaliana
  misc_feature (1)..(1972): Ceres Seq. ID no. 13613837
  misc_feature: MA Experiment ID: 20000182 Result: Up-regulated in Transcription
  misc_feature: MA Experiment 20000182 PARAMETER Experiment Name: At_2mM_SA_P Parameter: Age (day) Value: 14
  misc_feature: MA Experiment 20000182 PARAMETER Experiment Name: At_2mM_SA_P Parameter: Organism Value: A. thaliana
  misc_feature: MA Experiment 20000182 PARAMETER Experiment Name: At_2mM_SA_P Parameter: Plant Line Value: WS
  misc_feature: MA Experiment 20000182 PARAMETER Experiment Name: At_2mM_SA_P Parameter: Timepoint (hr) Value: 6
  misc_feature: MA Experiment 20000182 PARAMETER Experiment Name: At_2mM_SA_P Parameter: Tissue Value: Aerial
  misc_feature: MA Experiment 20000182 PARAMETER Experiment Name: At_2mM_SA_P Parameter: Treatment Value: 2mM SA vs. No Treatment
aaaagaatacacagaccagtcttcgtgtgctcgtaattggcgattctcaaattcgatctccgtacaaacaatggccgaaacctcgaagcaagtcaacggcgacgatgcccaggatcttcactcgcttctttcttctccggcgagggatttcctcgttcgtaatgacggcgaacaggtgaaagttgacagcttgttagggaagaagattggattgtatttttcagctgcttggtgtggaccgtgtcagcggtttactccacagctggtggaagtctacaacgagctctcttcgaaagttggttttgagattgtgtttgtgtcaggtgatgaggatgaagagtcatttggagattatttcagaaagatgccctggctcgctgttccgtttactgattcggaaacccgtgaccgtttggatgagttgtttaaggttaggggaatacctaacctagtgatggttgatgatcatggtaaacttgtgaatgagaatggtgttggggtcatacgaagctatggagctgatgcttatcctttcacaccagagaaaatgaaggagatcaaagaggatgaagatagagctcggagaggacagaccttaagatctgtcttggtgactccttcacgagactttgtgatttcgcctgacggaaacaaggtacccgtatcagagcttgagggaaaaaccattggccttctcttctctgtggcctcttacaggaaatgcacagagcttactccaaagcttgttgagttttatacgaagctgaaggagaataaggaggattttgagattgtgttgatatctcttgaagatgatgaggagtcttttaatcaagacttcaagaccaagccatggctagcattgccgttcaacgacaaaagtggatcaaaattggctcggcatttcatgctgtcaacactaccgacactggtcattctcggccctgatggaaaaacccgtcactcgaatgtcgctgaagctattgatgactatggagttcttgcgtatcctttcactccagagaagtttcaagaactcaaggagctagaaaaggcaaaggtagaggctcaaacgctcgagtcacttcttgtctcaggtgatctcaactacgttctcggaaaagatggggcaaaggtgcttgtttcggatctggtggggaagactattcttatgtacttctcagctcactggtgtcctccttgtcgcgcttttacaccaaagcttgttgaagtatacaagcagataaaggagcggaatgaagcgtttgaattgatcttcatctccagtgaccgtgaccaggaatcattcgatgagtactattcgcaaatgccgtggctggctcttccatttggtgatcctaggaaagcatccttggcaaaaacctttaaggttggtgggatcccaatgctagcagctctgggaccaactgggcaaaccgtaacaaaagaagcaagggaccttgtcgtagcccatggagccgatgcttacccttttactgaggaacgtttgaaggagattgaagctaagtacgatgagatagcaaaagattggcctaagaaggtgaaacatgttctccatgaagaacatgagctagaactaactcgtgttcaggtttacacatgcgataagtgtgaggaagaagggacaatatggtcttaccattgcgacgaatgcgactttgatcttcacgccaagtgtgctttaaacgaggacacaaaagaaaacggcgatgaggctgtgaaagttggtggcgacgagtccaaagatggttgggtttgtgaaggaaacgtatgcaccaaggcctgataggtagcttcaggcacagttatgtcactatgtgtatgcaaagctatttcctttctttgtataattgctaagagtgagaatgtgtggttacaatctgatatctgattaagaccttggagataaactctgttaatctaaagtaataataaaagaatcttcttattt

SEQ ID NO: 103902 - protein, 601 aa, Arabidopsis thaliana
  peptide (1)..(601): Ceres Seq. ID no. 13613838
  misc_feature (539)..(567): Pfam Name: DC1 domain Pfam Description: DC1 domain
  misc_feature (24)..(601): Homolog of NCBI NO: 18406743 NR Description: expressed protein [Arabidopsis thaliana]
  misc_feature (24)..(601): Homolog of NCBI NO: 21592996 NR Description: PDI-like protein [Arabidopsis thaliana]
  misc_feature (35)..(601): Homolog of NCBI NO: 31415915 NR Description: putative trypanothione-dependent peroxidase
  misc_feature (24)..(601): Homolog of NCBI NO: 4056568 NR Description: PDI-like protein [Zea mays]
  misc_feature (42)..(600): Homolog of NCBI NO: 31415911 NR Description: putative trypanothione-dependent peroxidase
  misc_feature (32)..(522): Homolog of NCBI NO: 23304737 NR Description: PDI-like protein [Quercus suber]
  misc_feature (199)..(571): Homolog of NCBI NO: 18417767 NR Description: receptor kinase -related [Arabidopsis thaliana] unknown protein [Arabidopsis thaliana]
  misc_feature (35)..(351): Homolog of NCBI NO: 31415911 NR Description: putative trypanothione-dependent peroxidase
  misc_feature (211)..(539): Homolog of NCBI NO: 38567893 NR Description: OSJNBa0060N03.13 [Oryza sativa (japonica
  misc_feature (29)..(366): Homolog of NCBI NO: 23304737 NR Description: PDI-like protein [Quercus suber]
KEYTDQSSCARNWRFSNSISVQTMAETSKQVNGDDAQDLHSLLSSPARDFLVRNDGEQVKVDSLLGKKIGLYFSAAWCGPCQRFTPQLVEVYNELSSKVGFEIVFVSGDEDEESFGDYFRKMPWLAVPFTDSETRDRLDELFKVRGIPNLVMVDDHGKLVNENGVGVIRSYGADAYPFTPEKMKEIKEDEDRARRGQTLRSVLVTPSRDFVISPDGNKVPVSELEGKTIGLLFSVASYRKCTELTPKLVEFYTKLKENKEDFEIVLISLEDDEESFNQDFKTKPWLALPFNDKSGSKLARHFMLSTLPTLVILGPDGKTRHSNVAEAIDDYGVLAYPFTPEKFQELKELEKAKVEAQTLESLLVSGDLNYVLGKDGAKVLVSDLVGKTILMYFSAHWCPPCRAFTPKLVEVYKQIKERNEAFELIFISSDRDQESFDEYYSQMPWLALPFGDPRKASLAKTFKVGGIPMLAALGPTGQTVTKEARDLVVAHGADAYPFTEERLKEIEAKYDEIAKDWPKKVKHVLHEEHELELTRVQVYTCDKCEEEGTIWSYHCDECDFDLHAKCALNEDTKENGDEAVKVGGDESKDGWVCEGNVCTKA

SEQ ID NO: 103903 - protein, 578 aa, Arabidopsis thaliana; identical to SEQ ID NO: 22942
  peptide (1)..(578): Ceres Seq. ID no. 13613839
  misc_feature (516)..(544): Pfam Name: DC1 domain Pfam Description: DC1 domain
  misc_feature (1)..(578): Homolog of NCBI NO: 18406743 NR Description: expressed protein [Arabidopsis thaliana]
  misc_feature (1)..(578): Homolog of NCBI NO: 21592996 NR Description: PDI-like protein [Arabidopsis thaliana]
  misc_feature (12)..(578): Homolog of NCBI NO: 31415915 NR Description: putative trypanothione-dependent peroxidase
  misc_feature (1)..(578): Homolog of NCBI NO: 4056568 NR Description: PDI-like protein [Zea mays]
  misc_feature (19)..(577): Homolog of NCBI NO: 31415911 NR Description: putative trypanothione-dependent peroxidase
  misc_feature (9)..(499): Homolog of NCBI NO: 23304737 NR Description: PDI-like protein [Quercus suber]
  misc_feature (176)..(548): Homolog of NCBI NO: 18417767 NR Description: receptor kinase -related [Arabidopsis thaliana] unknown protein [Arabidopsis thaliana]
  misc_feature (12)..(328): Homolog of NCBI NO: 31415911 NR Description: putative trypanothione-dependent peroxidase
  misc_feature (188)..(516): Homolog of NCBI NO: 38567893 NR Description: OSJNBa0060N03.13 [Oryza sativa (japonica
  misc_feature (6)..(343): Homolog of NCBI NO: 23304737 NR Description: PDI-like protein [Quercus suber]

SEQ ID NO: 103904 - protein, 480 aa, Arabidopsis thaliana; identical to SEQ ID NO: 22943
  peptide (1)..(480): Ceres Seq. ID no. 13613840
  misc_feature (418)..(446): Pfam Name: DC1 domain Pfam Description: DC1 domain
  misc_feature (1)..(480): Homolog of NCBI NO: 18406743 NR Description: expressed protein [Arabidopsis thaliana]
  misc_feature (1)..(480): Homolog of NCBI NO: 21592996 NR Description: PDI-like protein [Arabidopsis thaliana]
  misc_feature (1)..(480): Homolog of NCBI NO: 31415915 NR Description: putative trypanothione-dependent peroxidase
  misc_feature (1)..(480): Homolog of NCBI NO: 4056568 NR Description: PDI-like protein [Zea mays]
  misc_feature (1)..(479): Homolog of NCBI NO: 31415911 NR Description: putative trypanothione-dependent peroxidase
  misc_feature (1)..(401): Homolog of NCBI NO: 23304737 NR Description: PDI-like protein [Quercus suber]
  misc_feature (78)..(450): Homolog of NCBI NO: 18417767 NR Description: receptor kinase -related [Arabidopsis thaliana] unknown protein [Arabidopsis thaliana]
  misc_feature (1)..(230): Homolog of NCBI NO: 31415911 NR Description: putative trypanothione-dependent peroxidase
  misc_feature (90)..(418): Homolog of NCBI NO: 38567893 NR Description: OSJNBa0060N03.13 [Oryza sativa (japonica
  misc_feature (1)..(245): Homolog of NCBI NO: 23304737 NR Description: PDI-like protein [Quercus suber]

SEQ ID NO: 103905 - DNA, 1794 bp, Arabidopsis thaliana
  misc_feature (1)..(1794): Ceres Seq. ID no. 13613851
  misc_feature: MA Experiment ID: 108434 Result: Up-regulated in Transcription
  misc_feature: MA Experiment 108434 PARAMETER Experiment Name: At_Root_Tips_cDNA_P Parameter: Tissue Value: Root Tips
  misc_feature: MA Experiment ID: 108461 Result: Down-regulated in Transcription
  misc_feature: MA Experiment 108461 PARAMETER Experiment Name: At_Germinating_Seeds_cDNA_P Parameter: Age (day) Value: 1 vs. 0
  misc_feature: MA Experiment 108461 PARAMETER Experiment Name: At_Germinating_Seeds_cDNA_P Parameter: Tissue Value: Germinating Seeds
  misc_feature: MA Experiment ID: 108462 Result: Down-regulated in Transcription
  misc_feature: MA Experiment 108462 PARAMETER Experiment Name: At_Germinating_Seeds_cDNA_P Parameter: Age (day) Value: 2 vs. 0
  misc_feature: MA Experiment 108462 PARAMETER Experiment Name: At_Germinating_Seeds_cDNA_P Parameter: Tissue Value: Germinating Seeds
  misc_feature: MA Experiment ID: 108463 Result: Down-regulated in Transcription
  misc_feature: MA Experiment 108463 PARAMETER Experiment Name: At_Germinating_Seeds_cDNA_P Parameter: Age (day) Value: 3 vs. 0
  misc_feature: MA Experiment 108463 PARAMETER Experiment Name: At_Germinating_Seeds_cDNA_P Parameter: Tissue Value: Germinating Seeds
  misc_feature: MA Experiment ID: 108464 Result: Down-regulated in Transcription
  misc_feature: MA Experiment 108464 PARAMETER Experiment Name: At_Germinating_Seeds_cDNA_P Parameter: Age (day) Value: 4 vs. 0
  misc_feature: MA Experiment 108464 PARAMETER Experiment Name: At_Germinating_Seeds_cDNA_P Parameter: Tissue Value: Germinating Seeds
  misc_feature: MA Experiment ID: 108572 Result: Down-regulated in Transcription
  misc_feature: MA Experiment 108572 PARAMETER Experiment Name: At_Drought_cDNA_P Parameter: Timepoint (hr) Value: 1
  misc_feature: MA Experiment 108572 PARAMETER Experiment Name: At_Drought_cDNA_P Parameter: Tissue Value: Aerial
  misc_feature: MA Experiment 108572 PARAMETER Experiment Name: At_Drought_cDNA_P Parameter: Treatment Value: Drought vs. No Drought
  misc_feature: MA Experiment ID: 108573 Result: Down-regulated in Transcription
  misc_feature: MA Experiment 108573 PARAMETER Experiment Name: At_Drought_cDNA_P Parameter: Timepoint (hr) Value: 6
  misc_feature: MA Experiment 108573 PARAMETER Experiment Name: At_Drought_cDNA_P Parameter: Tissue Value: Aerial
  misc_feature: MA Experiment 108573 PARAMETER Experiment Name: At_Drought_cDNA_P Parameter: Treatment Value: Drought vs. No Drought
  misc_feature: MA Experiment ID: 108585 Result: Down-regulated in Transcription
  misc_feature: MA Experiment 108585 PARAMETER Experiment Name: At_5mM_NaNP_cDNA_P Parameter: Timepoint (hr) Value: 6
  misc_feature: MA Experiment 108585 PARAMETER Experiment Name: At_5mM_NaNP_cDNA_P Parameter: Tissue Value: Aerial
  misc_feature: MA Experiment 108585 PARAMETER Experiment Name: At_5mM_NaNP_cDNA_P Parameter: Treatment Value: null
  misc_feature: MA Experiment ID: 20000227 Result: Up-regulated in Transcription
  misc_feature: MA Experiment 20000227 PARAMETER Experiment Name: At_Root-Tips-vs-Tops_P Parameter: Tissue Value: Root Tips vs. Root Tops
  misc_feature: MA Experiment ID: 20001558 Result: Up-regulated in Transcription
  misc_feature: MA Experiment 20001558 PARAMETER Experiment Name: At_Drought_Soil_Dry_P Parameter: Age (day) Value: 27
  misc_feature: MA Experiment 20001558 PARAMETER Experiment Name: At_Drought_Soil_Dry_P Parameter: Organism Value: A. thaliana
  misc_feature: MA Experiment 20001558 PARAMETER Experiment Name: At_Drought_Soil_Dry_P Parameter: Plant Line Value: WS
  misc_feature: MA Experiment 20001558 PARAMETER Experiment Name: At_Drought_Soil_Dry_P Parameter: Post Timepoint (hr) Value: 6
  misc_feature: MA Experiment 20001558 PARAMETER Experiment Name: At_Drought_Soil_Dry_P Parameter: Post-Treatment Value: Re-Water vs. No Drought
  misc_feature: MA Experiment 20001558 PARAMETER Experiment Name: At_Drought_Soil_Dry_P Parameter: Timepoint (day) Value: 13
  misc_feature: MA Experiment 20001558 PARAMETER Experiment Name: At_Drought_Soil_Dry_P Parameter: Treatment Value: Drought vs. No Drought
gaattagggttttactcaaaaaaccttctcgttgtcgttgtttactgctccgacgagaaaatggcgatgcgacatttgagccgatcgagagacgttacaaagagatcgacaaagaagtacatcgaagaacctctgtacaatcgcctcttcaaagatggtggtacagaggtcaaagttcgacagcagcttaatcagttcctcaaaggcactaaacacgtcttcaaatgggaggtcggcgatacgatcaagaaactccgaaatcgcggcctctattacccagctctcaagctatctgaagttatggaagagagaggtatgaacaagacagtgagtgatcaagcaatccatcttgatcttgttgctaaagctcgtgaaattactgctggggagaattattttgttgatcttccggaaacatctaagacggaactcacgtatgggtctcttttgaactgttactgcaaggagttgttgacagagaaagcggaaggtttgctgaataagatgaaagagctcaacattactcctagttccatgtcttataacagcctcatgactctttacaccaagacaggtgagactgagaaagttccggcgatgattcaagaattgaaggcggagaatgtgatgccggattcgtacacttataatgtctggatgagggctttggctgctactaatgatatttctggtgttgagagagtcattgaagagatgaatagagatggtagagttgctccggattggactacgtatagcaatatggcatcgatatatgttgatgctggactgtctcagaaagctgagaaggctcttcaggaactggagatgaaaaacacgcaacgggattttacggcatatcagtttcttattactttgtatggacgtctggggaagctgactgaagtttacagaatttggcgttcgttgaggctggctattccgaaaacctcaaatgtagcttatctaaacatgatacaagtgctggtcaagttgaatgatttacctggtgcagagacattgttcaaggaatggcaagctaactgttctacttatgacatcaggattgtgaatgtgttgattggagcttatgctcaagagggtctaatccagaaagcaaatgagctcaaggagaaagctcccagaagaggtggaaagctcaatgctaaaacatgggagatcttcatggattactatgtaaagagcggtgatatggctcgagcactcgaatgcatgtcaaaggcagtctccatcggcaaaggagatggtggcaagtggctaccgtcacctgaaacagtcagagctttgatgagctatttcgagcaaaagaaagatgttaatggagctgagaatttgttggagattttaaagaatggaacagacaacataggcgcagaaatatttgaaccattgataagaacatatgcagcagcgggaaagagtcaccctgctatgcgacggcgcctgaagatggaaaacgtggaggttaatgaagcgacaaagaagctactcgatgaagtatctcaggatgtgtgaggtctgttccatctctttctccttcattattcacttcagacaaagacatcattagtcgtgatagggtcacttgcattctcacagctctgtctcttattggtaataaaaaaataggctctgaatcggcaaaatcaattgtatgggtctgttttactttcaccgtagactgtttgttcatgtttttgtgaattgtttttggtttagcttggatttacagttgagacagctctcacaatgtaatccctttttttggagatc

SEQ ID NO: 103906 - protein, 511 aa, Arabidopsis thaliana
  peptide (1)..(511): Ceres Seq. ID no. 13613852
  misc_feature (320)..(354): Pfam Name: PPR repeat Pfam Description: PPR repeat
  misc_feature (21)..(511): Homolog of NCBI NO: 15219808 NR Description: pentatricopeptide (PPR) repeat-containing protein
  misc_feature (27)..(347): Homolog of NCBI NO: 32490390 NR Description: OSJNBa0041M06.2 [Oryza sativa (japonica
  misc_feature (42)..(507): Homolog of NCBI NO: 15217734 NR Description: pentatricopeptide (PPR) repeat-containing protein
  misc_feature (42)..(507): Homolog of NCBI NO: 17529324 NR Description: unknown protein [Arabidopsis thaliana]
  misc_feature (19)..(476): Homolog of NCBI NO: 32488964 NR Description: OSJNBb0038F03.9 [Oryza sativa (japonica
  misc_feature (33)..(507): Homolog of NCBI NO: 18411800 NR Description: pentatricopeptide (PPR) repeat-containing protein thaliana] >gi|14517494|gb|AAK62637.1| AT4g01990/T7B11_26 thaliana] >gi|16323354|gb|AAL15390.1| AT4g01990/T7B11_26
  misc_feature (33)..(507): Homolog of NCBI NO: 25407143 NR Description: hypothetical protein AT4g01990 [imported] - thaliana >gi|4558568|gb|AAD22661.1|AC007138_25 hypothetical [Arabidopsis thaliana] >gi|7268583|emb|CAB80692.1| hypothetical
  misc_feature (71)..(457): Homolog of NCBI NO: 34393591 NR Description: putative DNA-binding protein [Oryza sativa
  misc_feature (11)..(461): Homolog of NCBI NO: 22329290 NR Description: pentatricopeptide (PPR) repeat-containing protein thaliana] >gi|2317908|gb|AAC24372.1| Unknown protein [Arabidopsis
  misc_feature (11)..(461): Homolog of NCBI NO: 20453085 NR Description: At1g02150/T7I23.8 [Arabidopsis thaliana]
ELGFYSKNLLVVVVYCSDEKMAMRHLSRSRDVTKRSTKKYIEEPLYNRLFKDGGTEVKVRQQLNQFLKGTKHVFKWEVGDTIKKLRNRGLYYPALKLSEVMEERGMNKTVSDQAIHLDLVAKAREITAGENYFVDLPETSKTELTYGSLLNCYCKELLTEKAEGLLNKMKELNITPSSMSYNSLMTLYTKTGETEKVPAMIQELKAENVMPDSYTYNVWMRALAATNDISGVERVIEEMNRDGRVAPDWTTYSNMASIYVDAGLSQKAEKALQELEMKNTQRDFTAYQFLITLYGRLGKLTEVYRIWRSLRLAIPKTSNVAYLNMIQVLVKLNDLPGAETLFKEWQANCSTYDIRIVNVLIGAYAQEGLIQKANELKEKAPRRGGKLNAKTWEIFMDYYVKSGDMARALECMSKAVSIGKGDGGKWLPSPETVRALMSYFEQKKDVNGAENLLEILKNGTDNIGAEIFEPLIRTYAAAGKSHPAMRRRLKMENVEVNEATKKLLDEVSQDV

SEQ ID NO: 103907 - protein, 491 aa, Arabidopsis thaliana; identical to SEQ ID NO: 35372
  peptide (1)..(491): Ceres Seq. ID no. 13613853
  misc_feature (300)..(334): Pfam Name: PPR repeat Pfam Description: PPR repeat
  misc_feature (1)..(491): Homolog of NCBI NO: 15219808 NR Description: pentatricopeptide (PPR) repeat-containing protein
  misc_feature (7)..(327): Homolog of NCBI NO: 32490390 NR Description: OSJNBa0041M06.2 [Oryza sativa (japonica
  misc_feature (22)..(487): Homolog of NCBI NO: 15217734 NR Description: pentatricopeptide (PPR) repeat-containing protein
  misc_feature (22)..(487): Homolog of NCBI NO: 17529324 NR Description: unknown protein [Arabidopsis thaliana]
  misc_feature (1)..(456): Homolog of NCBI NO: 32488964 NR Description: OSJNBb0038F03.9 [Oryza sativa (japonica
  misc_feature (13)..(487): Homolog of NCBI NO: 18411800 NR Description: pentatricopeptide (PPR) repeat-containing protein thaliana] >gi|14517494|gb|AAK62637.1| AT4g01990/T7B11_26 thaliana] >gi|16323354|gb|AAL15390.1| AT4g01990/T7B11_26
  misc_feature (13)..(487): Homolog of NCBI NO: 25407143 NR Description: hypothetical protein AT4g01990 [imported] - thaliana >gi|4558568|gb|AAD22661.1|AC007138_25 hypothetical [Arabidopsis thaliana] >gi|7268583|emb|CAB80692.1| hypothetical
  misc_feature (51)..(437): Homolog of NCBI NO: 34393591 NR Description: putative DNA-binding protein [Oryza sativa
  misc_feature (1)..(441): Homolog of NCBI NO: 22329290 NR Description: pentatricopeptide (PPR) repeat-containing protein thaliana] >gi|2317908|gb|AAC24372.1| Unknown protein [Arabidopsis
  misc_feature (1)..(441): Homolog of NCBI NO: 20453085 NR Description: At1g02150/T7I23.8 [Arabidopsis thaliana]

SEQ ID NO: 103908 - protein, 489 aa, Arabidopsis thaliana; identical to SEQ ID NO: 35373
  peptide (1)..(489): Ceres Seq. ID no. 13613854
  misc_feature (298)..(332): Pfam Name: PPR repeat Pfam Description: PPR repeat
  misc_feature (1)..(489): Homolog of NCBI NO: 15219808 NR Description: pentatricopeptide (PPR) repeat-containing protein
  misc_feature (5)..(325): Homolog of NCBI NO: 32490390 NR Description: OSJNBa0041M06.2 [Oryza sativa (japonica
  misc_feature (20)..(485): Homolog of NCBI NO: 15217734 NR Description: pentatricopeptide (PPR) repeat-containing protein
  misc_feature (20)..(485): Homolog of NCBI NO: 17529324 NR Description: unknown protein [Arabidopsis thaliana]
  misc_feature (1)..(454): Homolog of NCBI NO: 32488964 NR Description: OSJNBb0038F03.9 [Oryza sativa (japonica
  misc_feature (11)..(485): Homolog of NCBI NO: 18411800 NR Description: pentatricopeptide (PPR) repeat-containing protein thaliana] >gi|14517494|gb|AAK62637.1| AT4g01990/T7B11_26 thaliana] >gi|16323354|gb|AAL15390.1| AT4g01990/T7B11_26
  misc_feature (11)..(485): Homolog of NCBI NO: 25407143 NR Description: hypothetical protein AT4g01990 [imported] - thaliana >gi|4558568|gb|AAD22661.1|AC007138_25 hypothetical [Arabidopsis thaliana] >gi|7268583|emb|CAB80692.1| hypothetical
  misc_feature (49)..(435): Homolog of NCBI NO: 34393591 NR Description: putative DNA-binding protein [Oryza sativa
  misc_feature (1)..(439): Homolog of NCBI NO: 22329290 NR Description: pentatricopeptide (PPR) repeat-containing protein thaliana] >gi|2317908|gb|AAC24372.1| Unknown protein [Arabidopsis
  misc_feature (1)..(439): Homolog of NCBI NO: 20453085 NR Description: At1g02150/T7I23.8 [Arabidopsis thaliana]

SEQ ID NO: 103909 - DNA, 1460 bp, Arabidopsis thaliana
  misc_feature (1)..(1460): Ceres Seq. ID no. 13613867
  misc_feature: MA Experiment ID: 20000171 Result: Up-regulated in Transcription
  misc_feature: MA Experiment 20000171 PARAMETER Experiment Name: At_42deg_Heat_P Parameter: Age (day) Value: 14
  misc_feature: MA Experiment 20000171 PARAMETER Experiment Name: At_42deg_Heat_P Parameter: Organism Value: A. thaliana
  misc_feature: MA Experiment 20000171 PARAMETER Experiment Name: At_42deg_Heat_P Parameter: Plant Line Value: WS
  misc_feature: MA Experiment 20000171 PARAMETER Experiment Name: At_42deg_Heat_P Parameter: Temperature (deg C) Value: 42 vs. 22
  misc_feature: MA Experiment 20000171 PARAMETER Experiment Name: At_42deg_Heat_P Parameter: Timepoint (hr) Value: 1
  misc_feature: MA Experiment 20000171 PARAMETER Experiment Name: At_42deg_Heat_P Parameter: Tissue Value: Aerial
  misc_feature: MA Experiment ID: 20000173 Result: Up-regulated in Transcription
  misc_feature: MA Experiment 20000173 PARAMETER Experiment Name: At_42deg_Heat_P Parameter: Age (day) Value: 14
  misc_feature: MA Experiment 20000173 PARAMETER Experiment Name: At_42deg_Heat_P Parameter: Organism Value: A. thaliana
  misc_feature: MA Experiment 20000173 PARAMETER Experiment Name: At_42deg_Heat_P Parameter: Plant Line Value: WS
  misc_feature: MA Experiment 20000173 PARAMETER Experiment Name: At_42deg_Heat_P Parameter: Temperature (deg C) Value: 42 vs. 22
  misc_feature: MA Experiment 20000173 PARAMETER Experiment Name: At_42deg_Heat_P Parameter: Timepoint (hr) Value: 6
  misc_feature: MA Experiment 20000173 PARAMETER Experiment Name: At_42deg_Heat_P Parameter: Tissue Value: Aerial
  misc_feature: MA Experiment ID: 20000179 Result: Up-regulated in Transcription
  misc_feature: MA Experiment 20000179 PARAMETER Experiment Name: At_Germinating_Seeds_P Parameter: Age (hr) Value: 6 vs. 0
  misc_feature: MA Experiment 20000179 PARAMETER Experiment Name: At_Germinating_Seeds_P Parameter: Tissue Value: Germinating Seeds
  misc_feature: MA Experiment ID: 20000180 Result: Up-regulated in Transcription
  misc_feature: MA Experiment 20000180 PARAMETER Experiment Name: At_Germinating_Seeds_P Parameter: Age (hr) Value: 24 vs. 0
  misc_feature: MA Experiment 20000180 PARAMETER Experiment Name: At_Germinating_Seeds_P Parameter: Tissue Value: Germinating Seeds
  misc_feature: MA Experiment ID: 20000182 Result: Down-regulated in Transcription
  misc_feature: MA Experiment 20000182 PARAMETER Experiment Name: At_2mM_SA_P Parameter: Age (day) Value: 14
  misc_feature: MA Experiment 20000182 PARAMETER Experiment Name: At_2mM_SA_P Parameter: Organism Value: A. thaliana
  misc_feature: MA Experiment 20000182 PARAMETER Experiment Name: At_2mM_SA_P Parameter: Plant Line Value: WS
  misc_feature: MA Experiment 20000182 PARAMETER Experiment Name: At_2mM_SA_P Parameter: Timepoint (hr) Value: 6
  misc_feature: MA Experiment 20000182 PARAMETER Experiment Name: At_2mM_SA_P Parameter: Tissue Value: Aerial
  misc_feature: MA Experiment 20000182 PARAMETER Experiment Name: At_2mM_SA_P Parameter: Treatment Value: 2mM SA vs. No Treatment
  misc_feature: MA Experiment ID: 20000184 Result: Up-regulated in Transcription
  misc_feature: MA Experiment 20000184 PARAMETER Experiment Name: At_Shoots__P Parameter: Age (day) Value: 7
  misc_feature: MA Experiment 20000184 PARAMETER Experiment Name: At_Shoots__P Parameter: Tissue Value: Shoots vs. Whole Plant
  misc_feature: MA Experiment ID: 20000185 Result: Up-regulated in Transcription
  misc_feature: MA Experiment 20000185 PARAMETER Experiment Name: At_Roots__P Parameter: Age (day) Value: 7 vs. 21
  misc_feature: MA Experiment 20000185 PARAMETER Experiment Name: At_Roots__P Parameter: Organism Value: A. thaliana
  misc_feature: MA Experiment 20000185 PARAMETER Experiment Name: At_Roots__P Parameter: Tissue Value: Roots vs. Whole Plant
  misc_feature: MA Experiment ID: 20000264 Result: Down-regulated in Transcription
  misc_feature: MA Experiment 20000264 PARAMETER Experiment Name: At_Open_Flower_P Parameter: Age (day) Value: 21
  misc_feature: MA Experiment 20000264 PARAMETER Experiment Name: At_Open_Flower_P Parameter: Plant Line Value: WS
  misc_feature: MA Experiment 20000264 PARAMETER Experiment Name: At_Open_Flower_P Parameter: Tissue Value: Open Flower vs. Whole Plant
  misc_feature: MA Experiment ID: 20000439 Result: Up-regulated in Transcription
  misc_feature: MA Experiment 20000439 PARAMETER Experiment Name: At_Roots__P Parameter: Age (day) Value: 14 vs. 21
  misc_feature: MA Experiment 20000439 PARAMETER Experiment Name: At_Roots__P Parameter: Organism Value: A. thaliana
  misc_feature: MA Experiment 20000439 PARAMETER Experiment Name: At_Roots__P Parameter: Tissue Value: Roots vs. Whole Plant
  misc_feature: MA Experiment ID: 20000495 Result: Up-regulated in Transcription
  misc_feature: MA Experiment 20000495 PARAMETER Experiment Name: At_Guard_Cells_P Parameter: Harvest Date Value: 8/2/2002
  misc_feature: MA Experiment 20000495 PARAMETER Experiment Name: At_Guard_Cells_P Parameter: Organism Value: A. thaliana
  misc_feature: MA Experiment 20000495 PARAMETER Experiment Name: At_Guard_Cells_P Parameter: Tissue Value: Guard Cells vs. Leaves
  misc_feature: MA Experiment ID: 20000527 Result: Down-regulated in Transcription
  misc_feature: MA Experiment 20000527 PARAMETER Experiment Name: At_10percent_PEG_P Parameter: Age (day) Value: 20
  misc_feature: MA Experiment 20000527 PARAMETER Experiment Name: At_10percent_PEG_P Parameter: Organism Value: A. thaliana
  misc_feature: MA Experiment 20000527 PARAMETER Experiment Name: At_10percent_PEG_P Parameter: Plant Line Value: WS
  misc_feature: MA Experiment 20000527 PARAMETER Experiment Name: At_10percent_PEG_P Parameter: Timepoint (day) Value: 20
  misc_feature: MA Experiment 20000527 PARAMETER Experiment Name: At_10percent_PEG_P Parameter: Tissue Value: Whole Plant
  misc_feature: MA Experiment 20000527 PARAMETER Experiment Name: At_10percent_PEG_P Parameter: Treatment Value: 10percent PEG vs. No Treatment
  misc_feature: MA Experiment ID: 20001560 Result: Up-regulated in Transcription
  misc_feature: MA Experiment 20001560 PARAMETER Experiment Name: At_Drought_Soil_Dry_P Parameter: Age (day) Value: 28
  misc_feature: MA Experiment 20001560 PARAMETER Experiment Name: At_Drought_Soil_Dry_P Parameter: Organism Value: A. thaliana
  misc_feature: MA Experiment 20001560 PARAMETER Experiment Name: At_Drought_Soil_Dry_P Parameter: Plant Line Value: WS
  misc_feature: MA Experiment 20001560 PARAMETER Experiment Name: At_Drought_Soil_Dry_P Parameter: Post Timepoint (hr) Value: None
  misc_feature: MA Experiment 20001560 PARAMETER Experiment Name: At_Drought_Soil_Dry_P Parameter: Post-Treatment Value: None
  misc_feature: MA Experiment 20001560 PARAMETER Experiment Name: At_Drought_Soil_Dry_P Parameter: Timepoint (day) Value: 14
  misc_feature: MA Experiment 20001560 PARAMETER Experiment Name: At_Drought_Soil_Dry_P Parameter: Treatment Value: Drought vs. No Drought
  misc_feature: MA Experiment ID: 20001911 Result: Down-regulated in Transcription
  misc_feature: MA Experiment 20001911 PARAMETER Experiment Name: At_Drought_Reproduction_P Parameter: Age (day) Value: 40
  misc_feature: MA Experiment 20001911 PARAMETER Experiment Name: At_Drought_Reproduction_P Parameter: Organism Value: A. thaliana
  misc_feature: MA Experiment 20001911 PARAMETER Experiment Name: At_Drought_Reproduction_P Parameter: Plant Line Value: WS
  misc_feature: MA Experiment 20001911 PARAMETER Experiment Name: At_Drought_Reproduction_P Parameter: Timepoint (day) Value: 10
  misc_feature: MA Experiment 20001911 PARAMETER Experiment Name: At_Drought_Reproduction_P Parameter: Tissue Value: Flowers
  misc_feature: MA Experiment 20001911 PARAMETER Experiment Name: At_Drought_Reproduction_P Parameter: Treatment Value: Drought vs. No Drought
aattcccattcgtgttttttcggattgcgagaatcctacgttatttcttcacttttcatgatcccgaggacatcttagaccccaaatgttcttcgtcgatgttctttggaaactggttcctctatacttgttcggatcagaaacaaagtctctctcagcaacagagtccattttgcagatagttcctgaggcaatggctgctacttcatctaacgtcctttgcaatgctagcgagtcagatctttgtcgtgatgattccgctgcatttctacttaaatttgtagccattgcttcgattctcttagctggagctgctggtgtaactataccactcattggcaggaaccgtcgtttccttcaaactgatggtaatctctttgtgactgctaaagcttttgcagctggtgtgattctcgccacgggttttgttcatatgttggcgggtggcacggaagctttgaagaacccgtgcttaccggatttcccttggtctaagtttcctttcccgggattctttgcgatgattgctgctttgatcactctgtttgtggatttcatggggactcagtactatgaacggaagcaagagagggaagctagtgagtctgttgaaccgtttggccgtgaacaatcaccgggtattgttgttcccatgattggagaaggaacgaatgatgggaaagtgtttggtgaagaagacagtggtgggattcacattgttggcattcatgctcatgctgctcatcatagacatagtcatcctcctggtcatgattcatgtgaaggacacagtaaaatcgacattggtcatgctcatgctcatgggcacgggcatggacacggacatggacacgtacacgggggtttggatgctgttaatggagctaggcatatcgttgtttctcaggttctggagcttggaattgtgtcacattccataatcatcggtctatcccttggagtatctcagtctccttgcacaatccggcctctaatcgcagcactatccttccatcaattctttgaaggatttgcgctcggtggatgcatctcccaagcgcaattcaggaacaaatcagcgaccataatggcttgttttttcgccctcacaaccccgatagggatcgggattggaaccgcagtggcgtcgtctttcaattctcacagtgtcggagcattggtcactgaaggtatcttggactcgctctcagccggaattcttgtgtacatggctttagtggatctcatagctgctgatttcttgagtacaaaaatgaggtgtaactttaggcttcaaattgtatcttatgtaatgttgttcctaggagctggactcatgtcttctcttgccatttgggcttaattagagtataagattccatagtttcttctatagctacaaataacatgtatagttctttctagagaatttatcaatctaagatttcacaattgctcgc

SEQ ID NO: 103910 - protein, 425 aa, Arabidopsis thaliana
  peptide (1)..(425): Ceres Seq. ID no. 13613868
  misc_feature (207)..(309): Pfam Name: Cation efflux family Pfam Description: Cation efflux family
  misc_feature (1)..(425): Homolog of NCBI NO: 18406954 NR Description: metal transporter, putative (IRT3) [Arabidopsis >gi|17385796|gb|AAL38438.1|AF369915_1 putative metal transporter
  misc_feature (37)..(425): Homolog of NCBI NO: 21553732 NR Description: putative iron-regulated transporter [Arabidopsis
  misc_feature (1)..(424): Homolog of NCBI NO: 14582257 NR Description: ZIP-like zinc transporter [Thlaspi caerulescens]
  misc_feature (37)..(424): Homolog of NCBI NO: 12006859 NR Description: putative Zn transporter ZNT4 [Thlaspi
  misc_feature (24)..(425): Homolog of NCBI NO: 30682009 NR Description: metal transporter, putative (ZIP4) [Arabidopsis
  misc_feature (1)..(425): Homolog of NCBI NO: 14582255 NR Description: ZIP-like zinc transporter [Thlaspi caerulescens]
  misc_feature (37)..(425): Homolog of NCBI NO: 7381054 NR Description: Zn and Cd transporter ZNT1 [Thlaspi caerulescens]
  misc_feature (38)..(390): Homolog of NCBI NO: 28070974 NR Description: putative Zn transporter [Thlaspi caerulescens]
  misc_feature (36)..(230): Homolog of NCBI NO: 40888862 NR Description: TPA: putative ZIP-like protein [Oryza sativa
  misc_feature (242)..(425): Homolog of NCBI NO: 40888862 NR Description: TPA: putative ZIP-like protein [Oryza sativa
MFFVDVLWKLVPLYLFGSETKSLSATESILQIVPEAMAATSSNVLCNASESDLCRDDSAAFLLKFVAIASILLAGAAGVTIPLIGRNRRFLQTDGNLFVTAKAFAAGVILATGFVHMLAGGTEALKNPCLPDFPWSKFPFPGFFAMIAALITLFVDFMGTQYYERKQEREASESVEPFGREQSPGIVVPMIGEGTNDGKVFGEEDSGGIHIVGIHAHAAHHRHSHPPGHDSCEGHSKIDIGHAHAHGHGHGHGHGHVHGGLDAVNGARHIVVSQVLELGIVSHSIIIGLSLGVSQSPCTIRPLIAALSFHQFFEGFALGGCISQAQFRNKSATIMACFFALTTPIGIGIGTAVASSFNSHSVGALVTEGILDSLSAGILVYMALVDLIAADFLSTKMRCNFRLQIVSYVMLFLGAGLMSSLAIWA

SEQ ID NO: 103911 - protein, 389 aa, Arabidopsis thaliana; identical to SEQ ID NO: 29956
  peptide (1)..(389): Ceres Seq. ID no. 13613869
  misc_feature (171)..(273): Pfam Name: Cation efflux family Pfam Description: Cation efflux family
  misc_feature (1)..(389): Homolog of NCBI NO: 18406954 NR Description: metal transporter, putative (IRT3) [Arabidopsis >gi|17385796|gb|AAL38438.1|AF369915_1 putative metal transporter
  misc_feature (1)..(389): Homolog of NCBI NO: 21553732 NR Description: putative iron-regulated transporter [Arabidopsis
  misc_feature (1)..(388): Homolog of NCBI NO: 14582257 NR Description: ZIP-like zinc transporter [Thlaspi caerulescens]
  misc_feature (1)..(388): Homolog of NCBI NO: 12006859 NR Description: putative Zn transporter ZNT4 [Thlaspi
  misc_feature (1)..(389): Homolog of NCBI NO: 30682009 NR Description: metal transporter, putative (ZIP4) [Arabidopsis
  misc_feature (1)..(389): Homolog of NCBI NO: 14582255 NR Description: ZIP-like zinc transporter [Thlaspi caerulescens]
  misc_feature (1)..(389): Homolog of NCBI NO: 7381054 NR Description: Zn and Cd transporter ZNT1 [Thlaspi caerulescens]
  misc_feature (2)..(354): Homolog of NCBI NO: 28070974 NR Description: putative Zn transporter [Thlaspi caerulescens]
  misc_feature (1)..(194): Homolog of NCBI NO: 40888862 NR Description: TPA: putative ZIP-like protein [Oryza sativa
  misc_feature (206)..(389): Homolog of NCBI NO: 40888862 NR Description: TPA: putative ZIP-like protein [Oryza sativa

SEQ ID NO: 103912 - protein, 309 aa, Arabidopsis thaliana
  peptide (1)..(309): Ceres Seq. ID no. 13613870
  misc_feature (91)..(193): Pfam Name: Cation efflux family Pfam Description: Cation efflux family
  misc_feature (1)..(309): Homolog of NCBI NO: 18406954 NR Description: metal transporter, putative (IRT3) [Arabidopsis >gi|17385796|gb|AAL38438.1|AF369915_1 putative metal transporter
  misc_feature (1)..(309): Homolog of NCBI NO: 21553732 NR Description: putative iron-regulated transporter [Arabidopsis
  misc_feature (1)..(308): Homolog of NCBI NO: 14582257 NR Description: ZIP-like zinc transporter [Thlaspi caerulescens]
  misc_feature (1)..(308): Homolog of NCBI NO: 12006859 NR Description: putative Zn transporter ZNT4 [Thlaspi
  misc_feature (1)..(309): Homolog of NCBI NO: 30682009 NR Description: metal transporter, putative (ZIP4) [Arabidopsis
  misc_feature (1)..(309): Homolog of NCBI NO: 14582255 NR Description: ZIP-like zinc transporter [Thlaspi caerulescens]
  misc_feature (1)..(309): Homolog of NCBI NO: 7381054 NR Description: Zn and Cd transporter ZNT1 [Thlaspi caerulescens]
  misc_feature (1)..(274): Homolog of NCBI NO: 28070974 NR Description: putative Zn transporter [Thlaspi caerulescens]
  misc_feature (1)..(114): Homolog of NCBI NO: 40888862 NR Description: TPA: putative ZIP-like protein [Oryza sativa
  misc_feature (126)..(309): Homolog of NCBI NO: 40888862 NR Description: TPA: putative ZIP-like protein [Oryza sativa
MLAGGTEALKNPCLPDFPWSKFPFPGFFAMIAALITLFVDFMGTQYYERKQEREASESVEPFGREQSPGIVVPMIGEGTNDGKVFGEEDSGGIHIVGIHAHAAHHRHSHPPGHDSCEGHSKIDIGHAHAHGHGHGHGHGHVHGGLDAVNGARHIVVSQVLELGIVSHSIIIGLSLGVSQSPCTIRPLIAALSFHQFFEGFALGGCISQAQFRNKSATIMACFFALTTPIGIGIGTAVASSFNSHSVGALVTEGILDSLSAGILVYMALVDLIAADFLSTKMRCNFRLQIVSYVMLFLGAGLMSSLAIWA

SEQ ID NO: 103913 - DNA, 1329 bp, Arabidopsis thaliana
  misc_feature (1)..(1329): Ceres Seq. ID no. 13613882
  misc_feature: MA Experiment ID: 108435 Result: Down-regulated in Transcription
  misc_feature: MA Experiment 108435 PARAMETER Experiment Name: At_stm_Mutants_cDNA_P Parameter: Plant Line Value: wt Landsburg vs stm
  misc_feature: MA Experiment 108435 PARAMETER Experiment Name: At_stm_Mutants_cDNA_P Parameter: Tissue Value: Shoot Apical Meristem Region
  misc_feature: MA Experiment ID: 108488 Result: Up-regulated in Transcription
  misc_feature: MA Experiment ID: 108595 Result: Down-regulated in Transcription
  misc_feature: MA Experiment 108595 PARAMETER Experiment Name: At_Ler-pi_Ovule_cDNA_P Parameter: Plant Line Value: null
  misc_feature: MA Experiment ID: 20000068 Result: Down-regulated in Transcription
  misc_feature: MA Experiment ID: 20000069 Result: Down-regulated in Transcription
  misc_feature: MA Experiment 20000069 PARAMETER Experiment Name: At_100uM_ABA_Mutants_cDNA_P Parameter: Plant Line Value: CS23
  misc_feature: MA Experiment 20000069 PARAMETER Experiment Name: At_100uM_ABA_Mutants_cDNA_P Parameter: Timepoint (hr) Value: 6
  misc_feature: MA Experiment 20000069 PARAMETER Experiment Name: At_100uM_ABA_Mutants_cDNA_P Parameter: Tissue Value: Aerial
  misc_feature: MA Experiment 20000069 PARAMETER Experiment Name: At_100uM_ABA_Mutants_cDNA_P Parameter: Treatment Value: 100uM ABA vs. No Treatment
  misc_feature: MA Experiment ID: 20000070 Result: Down-regulated in Transcription
  misc_feature: MA Experiment 20000070 PARAMETER Experiment Name: At_100uM_ABA_Mutants_cDNA_P Parameter: Plant Line Value: CS24
  misc_feature: MA Experiment 20000070 PARAMETER Experiment Name: At_100uM_ABA_Mutants_cDNA_P Parameter: Timepoint (hr) Value: 6
  misc_feature: MA Experiment 20000070 PARAMETER Experiment Name: At_100uM_ABA_Mutants_cDNA_P Parameter: Tissue Value: Aerial
  misc_feature: MA Experiment 20000070 PARAMETER Experiment Name: At_100uM_ABA_Mutants_cDNA_P Parameter: Treatment Value: 100uM ABA vs. No Treatment
  misc_feature: MA Experiment ID: 20000087 Result: Down-regulated in Transcription
  misc_feature: MA Experiment 20000087 PARAMETER Experiment Name: At_100uM_ABA_Mutants_cDNA_P Parameter: Plant Line Value: WS
  misc_feature: MA Experiment 20000087 PARAMETER Experiment Name: At_100uM_ABA_Mutants_cDNA_P Parameter: Timepoint (hr) Value: 6
  misc_feature: MA Experiment 20000087 PARAMETER Experiment Name: At_100uM_ABA_Mutants_cDNA_P Parameter: Tissue Value: Aerial
  misc_feature: MA Experiment 20000087 PARAMETER Experiment Name: At_100uM_ABA_Mutants_cDNA_P Parameter: Treatment Value: 100uM ABA vs. No Treatment
  misc_feature: MA Experiment ID: 20000090 Result: Down-regulated in Transcription
  misc_feature: MA Experiment ID: 20000185 Result: Down-regulated in Transcription
  misc_feature: MA Experiment 20000185 PARAMETER Experiment Name: At_Roots__P Parameter: Age (day) Value: 7 vs. 21
  misc_feature: MA Experiment 20000185 PARAMETER Experiment Name: At_Roots__P Parameter: Organism Value: A. thaliana
  misc_feature: MA Experiment 20000185 PARAMETER Experiment Name: At_Roots__P Parameter: Tissue Value: Roots vs. Whole Plant
  misc_feature: MA Experiment ID: 20000438 Result: Up-regulated in Transcription
  misc_feature: MA Experiment 20000438 PARAMETER Experiment Name: At_Shoots__P Parameter: Age (day) Value: 14
  misc_feature: MA Experiment 20000438 PARAMETER Experiment Name: At_Shoots__P Parameter: Tissue Value: Shoots vs. Whole Plant
  misc_feature: MA Experiment ID: 20000439 Result: Down-regulated in Transcription
  misc_feature: MA Experiment 20000439 PARAMETER Experiment Name: At_Roots__P Parameter: Age (day) Value: 14 vs. 21
  misc_feature: MA Experiment 20000439 PARAMETER Experiment Name: At_Roots__P Parameter: Organism Value: A. thaliana
  misc_feature: MA Experiment 20000439 PARAMETER Experiment Name: At_Roots__P Parameter: Tissue Value: Roots vs. Whole Plant
  misc_feature: MA Experiment ID: 20000452 Result: Up-regulated in Transcription
  misc_feature: MA Experiment 20000452 PARAMETER Experiment Name: At_CS6879_Shoots-Roots_P Parameter: Age (day) Value: 14
  misc_feature: MA Experiment 20000452 PARAMETER Experiment Name: At_CS6879_Shoots-Roots_P Parameter: Organism Value: A. thaliana
  misc_feature: MA Experiment 20000452 PARAMETER Experiment Name: At_CS6879_Shoots-Roots_P Parameter: Plant Line Value: CS6879 vs. WS
  misc_feature: MA Experiment 20000452 PARAMETER Experiment Name: At_CS6879_Shoots-Roots_P Parameter: Tissue Value: Shoots
  misc_feature: MA Experiment ID: 20001248 Result: Down-regulated in Transcription
  misc_feature: MA Experiment 20001248 PARAMETER Experiment Name: At_Far-red-induction_P Parameter: Age (day) Value: 7
  misc_feature: MA Experiment 20001248 PARAMETER Experiment Name: At_Far-red-induction_P Parameter: Light Value: Far-red vs. White
  misc_feature: MA Experiment 20001248 PARAMETER Experiment Name: At_Far-red-induction_P Parameter: Organism Value: A. thaliana
  misc_feature: MA Experiment 20001248 PARAMETER Experiment Name: At_Far-red-induction_P Parameter: Plant Line Value: Columbia
  misc_feature: MA Experiment 20001248 PARAMETER Experiment Name: At_Far-red-induction_P Parameter: Timepoint (hr) Value: 4
  misc_feature: MA Experiment 20001248 PARAMETER Experiment Name: At_Far-red-induction_P Parameter: Tissue Value: Whole Plant
atgtccaccatccgttcacttggccgcgttcatataaaccaaaaaccgaacaacaacaaaaattcgaaaattctccggcgacaccaacaatgggaaggtctctaatattctctggaaacatgtcattgagaatctctcacttacccagatcatctcttccgctgcaaaacccaatttcaggccggacagtgaacagaactttccgatatcggtgtacgaggattttgtctaatagcttcaagtccacaacgagacttcaaaccaaagctgttctgtctgaggtttctgatcagacgcgatatcccagaatcggcgctaaaaccaccggaactatatctccggcacacctccttgaagtcgttgaactcgccgctaaaaccggcgctgaggtggttatggaagctgtaaataagccaaggaatattacttataaaggtctcagtgacttagtaactgatactgataaagcaagcgaggctgctattttggaagtagtgaagaagaattttagtgatcatcttattcttggtgaagaaggaggtatcatcggcgattcgtcttctgattacctctggtgcattgatcctctagatggaactacaaattttgctcatggatatcccagttttgctgtttccgtcggtgttctgtatcgtggaaatcccgccgctgcttctgtggtagagtttgtcggtggtccgatgtgctggaacactcgaaccttttctgcaactgcaggtggtggagcattgtgtaacgggcaaaaaattcatgtcagtaagaccgatgctgtggagagagcacttcttatcacagggtttggttatgaacatgatgatgcatggagcactaacatggaactgttcaaagagtttactgatgtgagtcggggagtgcgaagactcggtgctgctgcagttgacatgtgtcatgttgcacttgggattgcggaatcatattgggagtaccgtttaaagccatgggacatggctgctggtgttcttatagttgaggaagctggaggagctgtgactcggatggacggagggaagttttctgtgtttgataggtctgttttggtctccaacggcgttcttcaccccaagcttctggaaagaattgcacccgcaactgagaatttgaagtcgaaaggaatcgatttctcgttatggttcaaaccggaagattatcatacagagctttaagacttgttcaagaaaggtatataagattacattgttatgatctaaagctcttatatttgaactgaaacgaggtataagatttgcgttcggattatgaaaatcaataatgatcatattccccctt

SEQ ID NO: 103914 - protein, 400 aa, Arabidopsis thaliana
  peptide (1)..(400): Ceres Seq. ID no. 13613883
  misc_feature (30)..(400): Homolog of NCBI NO: 18397837 NR Description: expressed protein [Arabidopsis thaliana]
  misc_feature (30)..(400): Homolog of NCBI NO: 14423530 NR Description: Unknown protein [Arabidopsis thaliana]
  misc_feature (30)..(400): Homolog of NCBI NO: 21537207 NR Description: unknown [Arabidopsis thaliana]
  misc_feature (153)..(400): Homolog of NCBI NO: 25518324 NR Description: hypothetical protein F28K20.15 [imported] - thaliana >gi|4512616|gb|AAD21685.1| Contains similarity to extragenic suppressor (SuhB) from Synechocystis sp. gb|D90912 and
  misc_feature (40)..(130): Homolog of NCBI NO: 25518324 NR Description: hypothetical protein F28K20.15 [imported] - thaliana >gi|4512616|gb|AAD21685.1| Contains similarity to extragenic suppressor (SuhB) from Synechocystis sp. gb|D90912 and
  misc_feature (117)..(377): Homolog of NCBI NO: 37520891 NR Description: inositol monophophatase family [Gloeobacter >gi|35211886|dbj|BAC89263.1| inositol monophophatase family
  misc_feature (117)..(369): Homolog of NCBI NO: 17230409 NR Description: inositol monophophatase family [Nostoc sp. PCC
  misc_feature (117)..(395): Homolog of NCBI NO: 22299200 NR Description: ORF_ID:tlr1657~extragenic suppressor protein SuhB
  misc_feature (117)..(369): Homolog of NCBI NO: 23127553 NR Description: hypothetical protein [Nostoc punctiforme]
  misc_feature (114)..(380): Homolog of NCBI NO: 39996045 NR Description: inositol-1-monophosphatase [Geobacter
VHHPFTWPRSYKPKTEQQQKFENSPATPTMGRSLIFSGNMSLRISHLPRSSLPLQNPISGRTVNRTFRYRCTRILSNSFKSTTRLQTKAVLSEVSDQTRYPRIGAKTTGTISPAHLLEVVELAAKTGAEVVMEAVNKPRNITYKGLSDLVTDTDKASEAAILEVVKKNFSDHLILGEEGGIIGDSSSDYLWCIDPLDGTTNFAHGYPSFAVSVGVLYRGNPAAASVVEFVGGPMCWNTRTFSATAGGGALCNGQKIHVSKTDAVERALLITGFGYEHDDAWSTNMELFKEFTDVSRGVRRLGAAAVDMCHVALGIAESYWEYRLKPWDMAAGVLIVEEAGGAVTRMDGGKFSVFDRSVLVSNGVLHPKLLERIAPATENLKSKGIDFSLWFKPEDYHTEL

SEQ ID NO: 103915 - protein, 371 aa, Arabidopsis thaliana
  peptide (1)..(371): Ceres Seq. ID no. 13613884
  misc_feature (1)..(371): Homolog of NCBI NO: 18397837 NR Description: expressed protein [Arabidopsis thaliana]
  misc_feature (1)..(371): Homolog of NCBI NO: 14423530 NR Description: Unknown protein [Arabidopsis thaliana]
  misc_feature (1)..(371): Homolog of NCBI NO: 21537207 NR Description: unknown [Arabidopsis thaliana]
  misc_feature (124)..(371): Homolog of NCBI NO: 25518324 NR Description: hypothetical protein F28K20.15 [imported] - thaliana >gi|4512616|gb|AAD21685.1| Contains similarity to extragenic suppressor (SuhB) from Synechocystis sp. gb|D90912 and
  misc_feature (11)..(101): Homolog of NCBI NO: 25518324 NR Description: hypothetical protein F28K20.15 [imported] - thaliana >gi|4512616|gb|AAD21685.1| Contains similarity to extragenic suppressor (SuhB) from Synechocystis sp. gb|D90912 and
  misc_feature (88)..(348): Homolog of NCBI NO: 37520891 NR Description: inositol monophophatase family [Gloeobacter >gi|35211886|dbj|BAC89263.1| inositol monophophatase family
  misc_feature (88)..(340): Homolog of NCBI NO: 17230409 NR Description: inositol monophophatase family [Nostoc sp. PCC
  misc_feature (88)..(366): Homolog of NCBI NO: 22299200 NR Description: ORF_ID:tlr1657~extragenic suppressor protein SuhB
  misc_feature (88)..(340): Homolog of NCBI NO: 23127553 NR Description: hypothetical protein [Nostoc punctiforme]
  misc_feature (85)..(351): Homolog of NCBI NO: 39996045 NR Description: inositol-1-monophosphatase [Geobacter
MGRSLIFSGNMSLRISHLPRSSLPLQNPISGRTVNRTFRYRCTRILSNSFKSTTRLQTKAVLSEVSDQTRYPRIGAKTTGTISPAHLLEVVELAAKTGAEVVMEAVNKPRNITYKGLSDLVTDTDKASEAAILEVVKKNFSDHLILGEEGGIIGDSSSDYLWCIDPLDGTTNFAHGYPSFAVSVGVLYRGNPAAASVVEFVGGPMCWNTRTFSATAGGGALCNGQKIHVSKTDAVERALLITGFGYEHDDAWSTNMELFKEFTDVSRGVRRLGAAAVDMCHVALGIAESYWEYRLKPWDMAAGVLIVEEAGGAVTRMDGGKFSVFDRSVLVSNGVLHPKLLERIAPATENLKSKGIDFSLWFKPEDYHTEL

SEQ ID NO: 103916 - protein, 361 aa, Arabidopsis thaliana
  peptide (1)..(361): Ceres Seq. ID no. 13613885
  misc_feature (1)..(361): Homolog of NCBI NO: 18397837 NR Description: expressed protein [Arabidopsis thaliana]
  misc_feature (1)..(361): Homolog of NCBI NO: 14423530 NR Description: Unknown protein [Arabidopsis thaliana]
  misc_feature (1)..(361): Homolog of NCBI NO: 21537207 NR Description: unknown [Arabidopsis thaliana]
  misc_feature (114)..(361): Homolog of NCBI NO: 25518324 NR Description: hypothetical protein F28K20.15 [imported] - thaliana >gi|4512616|gb|AAD21685.1| Contains similarity to extragenic suppressor (SuhB) from Synechocystis sp. gb|D90912 and
  misc_feature (1)..(91): Homolog of NCBI NO: 25518324 NR Description: hypothetical protein F28K20.15 [imported] - thaliana >gi|4512616|gb|AAD21685.1| Contains similarity to extragenic suppressor (SuhB) from Synechocystis sp. gb|D90912 and
  misc_feature (78)..(338): Homolog of NCBI NO: 37520891 NR Description: inositol monophophatase family [Gloeobacter >gi|35211886|dbj|BAC89263.1| inositol monophophatase family
  misc_feature (78)..(330): Homolog of NCBI NO: 17230409 NR Description: inositol monophophatase family [Nostoc sp. PCC
  misc_feature (78)..(356): Homolog of NCBI NO: 22299200 NR Description: ORF_ID:tlr1657~extragenic suppressor protein SuhB
  misc_feature (78)..(330): Homolog of NCBI NO: 23127553 NR Description: hypothetical protein [Nostoc punctiforme]
  misc_feature (75)..(341): Homolog of NCBI NO: 39996045 NR Description: inositol-1-monophosphatase [Geobacter
MSLRISHLPRSSLPLQNPISGRTVNRTFRYRCTRILSNSFKSTTRLQTKAVLSEVSDQTRYPRIGAKTTGTISPAHLLEVVELAAKTGAEVVMEAVNKPRNITYKGLSDLVTDTDKASEAAILEVVKKNFSDHLILGEEGGIIGDSSSDYLWCIDPLDGTTNFAHGYPSFAVSVGVLYRGNPAAASVVEFVGGPMCWNTRTFSATAGGGALCNGQKIHVSKTDAVERALLITGFGYEHDDAWSTNMELFKEFTDVSRGVRRLGAAAVDMCHVALGIAESYWEYRLKPWDMAAGVLIVEEAGGAVTRMDGGKFSVFDRSVLVSNGVLHPKLLERIAPATENLKSKGIDFSLWFKPEDYHTEL

SEQ ID NO: 103917 - DNA, 1459 bp, Arabidopsis thaliana
  misc_feature (1)..(1459): Ceres Seq. ID no. 13613886
  misc_feature: MA Experiment ID: 20000180 Result: Up-regulated in Transcription
  misc_feature: MA Experiment 20000180 PARAMETER Experiment Name: At_Germinating_Seeds_P Parameter: Age (hr) Value: 24 vs. 0
  misc_feature: MA Experiment 20000180 PARAMETER Experiment Name: At_Germinating_Seeds_P Parameter: Tissue Value: Germinating Seeds
  misc_feature: MA Experiment ID: 20000234 Result: Down-regulated in Transcription
  misc_feature: MA Experiment 20000234 PARAMETER Experiment Name: At_Siliques_P Parameter: Age (day) Value: 21
  misc_feature: MA Experiment 20000234 PARAMETER Experiment Name: At_Siliques_P Parameter: Organism Value: A. thaliana
  misc_feature: MA Experiment 20000234 PARAMETER Experiment Name: At_Siliques_P Parameter: Plant Line Value: WS
  misc_feature: MA Experiment 20000234 PARAMETER Experiment Name: At_Siliques_P Parameter: Tissue Value: Less Than 5mm Siliques vs. Whole Plant
  misc_feature: MA Experiment ID: 20000235 Result: Down-regulated in Transcription
  misc_feature: MA Experiment 20000235 PARAMETER Experiment Name: At_Siliques_P Parameter: Age (day) Value: 21
  misc_feature: MA Experiment 20000235 PARAMETER Experiment Name: At_Siliques_P Parameter: Organism Value: A. thaliana
  misc_feature: MA Experiment 20000235 PARAMETER Experiment Name: At_Siliques_P Parameter: Plant Line Value: WS
  misc_feature: MA Experiment 20000235 PARAMETER Experiment Name: At_Siliques_P Parameter: Tissue Value: 5-10mm Siliques vs. Whole Plant
  misc_feature: MA Experiment ID: 20000437 Result: Down-regulated in Transcription
  misc_feature: MA Experiment 20000437 PARAMETER Experiment Name: At_Drought_P Parameter: Age (day) Value: 8
  misc_feature: MA Experiment 20000437 PARAMETER Experiment Name: At_Drought_P Parameter: Organism Value: A. thaliana
  misc_feature: MA Experiment 20000437 PARAMETER Experiment Name: At_Drought_P Parameter: Plant Line Value: WS
  misc_feature: MA Experiment 20000437 PARAMETER Experiment Name: At_Drought_P Parameter: Timepoint (hr) Value: 24
  misc_feature: MA Experiment 20000437 PARAMETER Experiment Name: At_Drought_P Parameter: Tissue Value: Whole Plant
  misc_feature: MA Experiment 20000437 PARAMETER Experiment Name: At_Drought_P Parameter: Treatment Value: Drought vs. No Drought
  misc_feature: MA Experiment ID: 20000573 Result: Down-regulated in Transcription
  misc_feature: MA Experiment 20000573 PARAMETER Experiment Name: At_100uM_ABA_Mutants__P Parameter: Organism Value: A. thaliana
  misc_feature: MA Experiment 20000573 PARAMETER Experiment Name: At_100uM_ABA_Mutants__P Parameter: Plant Line Value: CS22 vs. Ler wt
  misc_feature: MA Experiment 20000573 PARAMETER Experiment Name: At_100uM_ABA_Mutants__P Parameter: Timepoint (hr) Value: N/A
  misc_feature: MA Experiment 20000573 PARAMETER Experiment Name: At_100uM_ABA_Mutants__P Parameter: Tissue Value: Whole Plant
  misc_feature: MA Experiment 20000573 PARAMETER Experiment Name: At_100uM_ABA_Mutants__P Parameter: Treatment Value: None
  misc_feature: MA Experiment ID: 20000574 Result: Down-regulated in Transcription
  misc_feature: MA Experiment 20000574 PARAMETER Experiment Name: At_100uM_ABA_Mutants__P Parameter: Organism Value: A. thaliana
  misc_feature: MA Experiment 20000574 PARAMETER Experiment Name: At_100uM_ABA_Mutants__P Parameter: Plant Line Value: CS23 vs. Ler wt
  misc_feature: MA Experiment 20000574 PARAMETER Experiment Name: At_100uM_ABA_Mutants__P Parameter: Timepoint (hr) Value: N/A
  misc_feature: MA Experiment 20000574 PARAMETER Experiment Name: At_100uM_ABA_Mutants__P Parameter: Tissue Value: Whole Plant
  misc_feature: MA Experiment 20000574 PARAMETER Experiment Name: At_100uM_ABA_Mutants__P Parameter: Treatment Value: None
  misc_feature: MA Experiment ID: 20001450 Result: Up-regulated in Transcription
  misc_feature: MA Experiment 20001450 PARAMETER Experiment Name: At_Far-red-induction_P Parameter: Age (day) Value: 7
  misc_feature: MA Experiment 20001450 PARAMETER Experiment Name: At_Far-red-induction_P Parameter: Light Value: Far-red vs. White
  misc_feature: MA Experiment 20001450 PARAMETER Experiment Name: At_Far-red-induction_P Parameter: Organism Value: A. thaliana
  misc_feature: MA Experiment 20001450 PARAMETER Experiment Name: At_Far-red-induction_P Parameter: Plant Line Value: Columbia
  misc_feature: MA Experiment 20001450 PARAMETER Experiment Name: At_Far-red-induction_P Parameter: Timepoint (hr) Value: 8
  misc_feature: MA Experiment 20001450 PARAMETER Experiment Name: At_Far-red-induction_P Parameter: Tissue Value: Whole Plant
  misc_feature: MA Experiment ID: 20001451 Result: Up-regulated in Transcription
  misc_feature: MA Experiment 20001451 PARAMETER Experiment Name: At_Far-red-induction_P Parameter: Age (day) Value: 7
  misc_feature: MA Experiment 20001451 PARAMETER Experiment Name: At_Far-red-induction_P Parameter: Light Value: Far-red vs. White
  misc_feature: MA Experiment 20001451 PARAMETER Experiment Name: At_Far-red-induction_P Parameter: Organism Value: A. thaliana
  misc_feature: MA Experiment 20001451 PARAMETER Experiment Name: At_Far-red-induction_P Parameter: Plant Line Value: Columbia
  misc_feature: MA Experiment 20001451 PARAMETER Experiment Name: At_Far-red-induction_P Parameter: Timepoint (hr) Value: 24
  misc_feature: MA Experiment 20001451 PARAMETER Experiment Name: At_Far-red-induction_P Parameter: Tissue Value: Whole Plant
  misc_feature: MA Experiment ID: 20001910 Result: Down-regulated in Transcription
  misc_feature: MA Experiment 20001910 PARAMETER Experiment Name: At_Drought_Reproduction_P Parameter: Age (day) Value: 37
  misc_feature: MA Experiment 20001910 PARAMETER Experiment Name: At_Drought_Reproduction_P Parameter: Organism Value: A. thaliana
  misc_feature: MA Experiment 20001910 PARAMETER Experiment Name: At_Drought_Reproduction_P Parameter: Plant Line Value: WS
  misc_feature: MA Experiment 20001910 PARAMETER Experiment Name: At_Drought_Reproduction_P Parameter: Timepoint (day) Value: 7
  misc_feature: MA Experiment 20001910 PARAMETER Experiment Name: At_Drought_Reproduction_P Parameter: Tissue Value: Flowers
  misc_feature: MA Experiment 20001910 PARAMETER Experiment Name: At_Drought_Reproduction_P Parameter: Treatment Value: Drought vs. No Drought
aagacaatccctttcttctcccctttctccaacacctaccaaaagcctctctctctctctagttcttgatttttcaagatttcaagaaaacatggctgaccaaagtggtgggttggttatgatgagagagtacagaaaaggcaactggacgttgaatgagacgatggttctcattgaggccaagaggatggatgatgagaggaggatgcggcggtccatcggccttccaccgccggagcagcaacaagatatccggagtaataaaccggcggagctacggtggaagtggatagaagattactgttggagaaaaggttgtatgagaagtcagaatcagtgcaatgacaaatgggacaatctcatgagagactacaaaaaagttagagagtacgagagacgaagggtagaatcgtctattaccgccggtgagtcgtcttcatcttcagctccagctggagaaacggcgtcgtactggaagatggagaagagtgagaggaaagagagaagcttaccaagtaatatgttacctcaaacataccaagctttgtttgaagttgttgagagtaaaacgcttccttcttctaccgccgtaaccgctgtaaccgctgcagttgcggctgctgctgctgctattagtagtggaaacggttcaggcggtggacaaatccaaaaagtgatacaacaaggtttaggatttgttgttcctaaagtacatcaaatcattcagcagcaacctgttttgttaccacttcagccaccgccgccaccaccaccgtctcagccgttaccacgaccactactactgccaccgcctccaccgccttcttttcatgctcagccaatactgcccacagtagaaggatagtagcacagattctgatacaagtgagtattcagacacatctccggcgaagagaaggagaacaatgccgacaaccacaaccgccggtcccagcggcggcggtgtagatgtggaggaggttggacgtagtaagagagatgaagagacgacagtagcggctgcgttatcaaggagtgtgtcagtgatcgcaaacgcgattagggagagtgaggagagacaagatcggagacataaagaagtgatgaacgtacaagagaggagactcaagatcgaagaatctaatgttgagatgaatagagaaggcatgaatggattagtggaagccattaataagctagctagctccattttcgctctggcttcttcttctcgccataataattagcatcaaggaggtccagtaccatagtaatttaaatgattattatgtagttaatttgattagggaagtgattaaattgttgagcgtgatgatcggagtacataaattgatattgaagtcttaattaatcttgttttcatcactctcaatgttttcttaagtaaattgttgattccatgcaatataaattgaaatgtgatcatataaagttgatt

SEQ ID NO: 103918 - protein, 287 aa, Arabidopsis thaliana
  peptide (1)..(287): Ceres Seq. ID no. 13613887
  misc_feature (31)..(285): Homolog of NCBI NO: 6692131 NR Description: T19E23.10 [Arabidopsis thaliana]
  misc_feature (31)..(284): Homolog of NCBI NO: 15221676 NR Description: proline-rich protein family [Arabidopsis thaliana]
  misc_feature (32)..(263): Homolog of NCBI NO: 15227458 NR Description: proline-rich protein family [Arabidopsis thaliana]
  misc_feature (154)..(285): Homolog of NCBI NO: 15227458 NR Description: proline-rich protein family [Arabidopsis thaliana]
  misc_feature (31)..(219): Homolog of NCBI NO: 40538915 NR Description: hypothetical protein [Oryza sativa (japonica
  misc_feature (36)..(263): Homolog of NCBI NO: 38347161 NR Description: OSJNBa0039C07.7 [Oryza sativa (japonica
  misc_feature (45)..(182): Homolog of NCBI NO: 34907058 NR Description: hypothetical protein [Oryza sativa (japonica group)] >gi|20160733|dbj|BAB89675.1| hypothetical protein [Oryza
  misc_feature (29)..(179): Homolog of NCBI NO: 25408286 NR Description: hypothetical protein At2g33550 [imported] - thaliana >gi|2459437|gb|AAB80672.1| hypothetical protein
  misc_feature (29)..(179): Homolog of NCBI NO: 30685749 NR Description: expressed protein [Arabidopsis thaliana] unknown protein [Arabidopsis thaliana]
RQSLSSPLSPTPTKSLSLSLVLDFSRFQENMADQSGGLVMMREYRKGNWTLNETMVLIEAKRMDDERRMRRSIGLPPPEQQQDIRSNKPAELRWKWIEDYCWRKGCMRSQNQCNDKWDNLMRDYKKVREYERRRVESSITAGESSSSSAPAGETASYWKMEKSERKERSLPSNMLPQTYQALFEVVESKTLPSSTAVTAVTAAVAAAAAAISSGNGSGGGQIQKVIQQGLGFVVPKVHQIIQQQPVLLPLQPPPPPPPSQPLPRPLLLPPPPPPSFHAQPILPTVEG

SEQ ID NO: 103919 - protein, 257 aa, Arabidopsis thaliana
  peptide (1)..(257): Ceres Seq. ID no. 13613888
  misc_feature (1)..(255): Homolog of NCBI NO: 6692131 NR Description: T19E23.10 [Arabidopsis thaliana]
  misc_feature (1)..(254): Homolog of NCBI NO: 15221676 NR Description: proline-rich protein family [Arabidopsis thaliana]
  misc_feature (2)..(233): Homolog of NCBI NO: 15227458 NR Description: proline-rich protein family [Arabidopsis thaliana]
  misc_feature (124)..(255): Homolog of NCBI NO: 15227458 NR Description: proline-rich protein family [Arabidopsis thaliana]
  misc_feature (1)..(189): Homolog of NCBI NO: 40538915 NR Description: hypothetical protein [Oryza sativa (japonica
  misc_feature (6)..(233): Homolog of NCBI NO: 38347161 NR Description: OSJNBa0039C07.7 [Oryza sativa (japonica
  misc_feature (15)..(152): Homolog of NCBI NO: 34907058 NR Description: hypothetical protein [Oryza sativa (japonica group)] >gi|20160733|dbj|BAB89675.1| hypothetical protein [Oryza
  misc_feature (1)..(149): Homolog of NCBI NO: 25408286 NR Description: hypothetical protein At2g33550 [imported] - thaliana >gi|2459437|gb|AAB80672.1| hypothetical protein
  misc_feature (1)..(149): Homolog of NCBI NO: 30685749 NR Description: expressed protein [Arabidopsis thaliana] unknown protein [Arabidopsis thaliana]
MADQSGGLVMMREYRKGNWTLNETMVLIEAKRMDDERRMRRSIGLPPPEQQQDIRSNKPAELRWKWIEDYCWRKGCMRSQNQCNDKWDNLMRDYKKVREYERRRVESSITAGESSSSSAPAGETASYWKMEKSERKERSLPSNMLPQTYQALFEVVESKTLPSSTAVTAVTAAVAAAAAAISSGNGSGGGQIQKVIQQGLGFVVPKVHQIIQQQPVLLPLQPPPPPPPSQPLPRPLLLPPPPPPSFHAQPILPTVEG

SEQ ID NO: 103920 - protein, 248 aa, Arabidopsis thaliana
  peptide (1)..(248): Ceres Seq. ID no. 13613889
  misc_feature (1)..(246): Homolog of NCBI NO: 6692131 NR Description: T19E23.10 [Arabidopsis thaliana]
  misc_feature (1)..(245): Homolog of NCBI NO: 15221676 NR Description: proline-rich protein family [Arabidopsis thaliana]
  misc_feature (1)..(224): Homolog of NCBI NO: 15227458 NR Description: proline-rich protein family [Arabidopsis thaliana]
  misc_feature (115)..(246): Homolog of NCBI NO: 15227458 NR Description: proline-rich protein family [Arabidopsis thaliana]
  misc_feature (1)..(180): Homolog of NCBI NO: 40538915 NR Description: hypothetical protein [Oryza sativa (japonica
  misc_feature (1)..(224): Homolog of NCBI NO: 38347161 NR Description: OSJNBa0039C07.7 [Oryza sativa (japonica
  misc_feature (6)..(143): Homolog of NCBI NO: 34907058 NR Description: hypothetical protein [Oryza sativa (japonica group)] >gi|20160733|dbj|BAB89675.1| hypothetical protein [Oryza
  misc_feature (1)..(140): Homolog of NCBI NO: 25408286 NR Description: hypothetical protein At2g33550 [imported] - thaliana >gi|2459437|gb|AAB80672.1| hypothetical protein
  misc_feature (1)..(140): Homolog of NCBI NO: 30685749 NR Description: expressed protein [Arabidopsis thaliana] unknown protein [Arabidopsis thaliana]
MMREYRKGNWTLNETMVLIEAKRMDDERRMRRSIGLPPPEQQQDIRSNKPAELRWKWIEDYCWRKGCMRSQNQCNDKWDNLMRDYKKVREYERRRVESSITAGESSSSSAPAGETASYWKMEKSERKERSLPSNMLPQTYQALFEVVESKTLPSSTAVTAVTAAVAAAAAAISSGNGSGGGQIQKVIQQGLGFVVPKVHQIIQQQPVLLPLQPPPPPPPSQPLPRPLLLPPPPPPSFHAQPILPTVEG

SEQ ID NO: 103921 - DNA, 1648 bp, Arabidopsis thaliana
  misc_feature (1)..(1648): Ceres Seq. ID no. 13613901
  misc_feature: MA Experiment ID: 108434 Result: Up-regulated in Transcription
  misc_feature: MA Experiment 108434 PARAMETER Experiment Name: At_Root_Tips_cDNA_P Parameter: Tissue Value: Root Tips
  misc_feature: MA Experiment ID: 108461 Result: Down-regulated in Transcription
  misc_feature: MA Experiment 108461 PARAMETER Experiment Name: At_Germinating_Seeds_cDNA_P Parameter: Age (day) Value: 1 vs. 0
  misc_feature: MA Experiment 108461 PARAMETER Experiment Name: At_Germinating_Seeds_cDNA_P Parameter: Tissue Value: Germinating Seeds
  misc_feature: MA Experiment ID: 108462 Result: Down-regulated in Transcription
  misc_feature: MA Experiment 108462 PARAMETER Experiment Name: At_Germinating_Seeds_cDNA_P Parameter: Age (day) Value: 2 vs. 0
  misc_feature: MA Experiment 108462 PARAMETER Experiment Name: At_Germinating_Seeds_cDNA_P Parameter: Tissue Value: Germinating Seeds
  misc_feature: MA Experiment ID: 108463 Result: Down-regulated in Transcription
  misc_feature: MA Experiment 108463 PARAMETER Experiment Name: At_Germinating_Seeds_cDNA_P Parameter: Age (day) Value: 3 vs. 0
  misc_feature: MA Experiment 108463 PARAMETER Experiment Name: At_Germinating_Seeds_cDNA_P Parameter: Tissue Value: Germinating Seeds
  misc_feature: MA Experiment ID: 108464 Result: Down-regulated in Transcription
  misc_feature: MA Experiment 108464 PARAMETER Experiment Name: At_Germinating_Seeds_cDNA_P Parameter: Age (day) Value: 4 vs. 0
  misc_feature: MA Experiment 108464 PARAMETER Experiment Name: At_Germinating_Seeds_cDNA_P Parameter: Tissue Value: Germinating Seeds
  misc_feature: MA Experiment ID: 108488 Result: Up-regulated in Transcription
  misc_feature: MA Experiment ID: 108489 Result: Up-regulated in Transcription
  misc_feature: MA Experiment ID: 108572 Result: Down-regulated in Transcription
  misc_feature: MA Experiment 108572 PARAMETER Experiment Name: At_Drought_cDNA_P Parameter: Timepoint (hr) Value: 1
  misc_feature: MA Experiment 108572 PARAMETER Experiment Name: At_Drought_cDNA_P Parameter: Tissue Value: Aerial
  misc_feature: MA Experiment 108572 PARAMETER Experiment Name: At_Drought_cDNA_P Parameter: Treatment Value: Drought vs. No Drought
  misc_feature: MA Experiment ID: 108573 Result: Down-regulated in Transcription
  misc_feature: MA Experiment 108573 PARAMETER Experiment Name: At_Drought_cDNA_P Parameter: Timepoint (hr) Value: 6
  misc_feature: MA Experiment 108573 PARAMETER Experiment Name: At_Drought_cDNA_P Parameter: Tissue Value: Aerial
  misc_feature: MA Experiment 108573 PARAMETER Experiment Name: At_Drought_cDNA_P Parameter: Treatment Value: Drought vs. No Drought
  misc_feature: MA Experiment ID: 108595 Result: Down-regulated in Transcription
  misc_feature: MA Experiment 108595 PARAMETER Experiment Name: At_Ler-pi_Ovule_cDNA_P Parameter: Plant Line Value: null
  misc_feature: MA Experiment ID: 20000179 Result: Down-regulated in Transcription
  misc_feature: MA Experiment 20000179 PARAMETER Experiment Name: At_Germinating_Seeds_P Parameter: Age (hr) Value: 6 vs. 0
  misc_feature: MA Experiment 20000179 PARAMETER Experiment Name: At_Germinating_Seeds_P Parameter: Tissue Value: Germinating Seeds
  misc_feature: MA Experiment ID: 20000180 Result: Down-regulated in Transcription
  misc_feature: MA Experiment 20000180 PARAMETER Experiment Name: At_Germinating_Seeds_P Parameter: Age (hr) Value: 24 vs. 0
  misc_feature: MA Experiment 20000180 PARAMETER Experiment Name: At_Germinating_Seeds_P Parameter: Tissue Value: Germinating Seeds
  misc_feature: MA Experiment ID: 20000227 Result: Up-regulated in Transcription
  misc_feature: MA Experiment 20000227 PARAMETER Experiment Name: At_Root-Tips-vs-Tops_P Parameter: Tissue Value: Root Tips vs. Root Tops
  misc_feature: MA Experiment ID: 20001451 Result: Down-regulated in Transcription
  misc_feature: MA Experiment 20001451 PARAMETER Experiment Name: At_Far-red-induction_P Parameter: Age (day) Value: 7
  misc_feature: MA Experiment 20001451 PARAMETER Experiment Name: At_Far-red-induction_P Parameter: Light Value: Far-red vs. White
  misc_feature: MA Experiment 20001451 PARAMETER Experiment Name: At_Far-red-induction_P Parameter: Organism Value: A. thaliana
  misc_feature: MA Experiment 20001451 PARAMETER Experiment Name: At_Far-red-induction_P Parameter: Plant Line Value: Columbia
  misc_feature: MA Experiment 20001451 PARAMETER Experiment Name: At_Far-red-induction_P Parameter: Timepoint (hr) Value: 24
  misc_feature: MA Experiment 20001451 PARAMETER Experiment Name: At_Far-red-induction_P Parameter: Tissue Value: Whole Plant
  misc_feature: MA Experiment ID: 20001458 Result: Up-regulated in Transcription
  misc_feature: MA Experiment 20001458 PARAMETER Experiment Name: At_50mM_NH4NO3_L-to-H_P Parameter: Age (day) Value: Undefined
  misc_feature: MA Experiment 20001458 PARAMETER Experiment Name: At_50mM_NH4NO3_L-to-H_P Parameter: Organism Value: Undefined
  misc_feature: MA Experiment 20001458 PARAMETER Experiment Name: At_50mM_NH4NO3_L-to-H_P Parameter: Plant Line Value: Undefined
  misc_feature: MA Experiment 20001458 PARAMETER Experiment Name: At_50mM_NH4NO3_L-to-H_P Parameter: Timepoint (hr) Value: 2
  misc_feature: MA Experiment 20001458 PARAMETER Experiment Name: At_50mM_NH4NO3_L-to-H_P Parameter: Tissue Value: Siliques
  misc_feature: MA Experiment 20001458 PARAMETER Experiment Name: At_50mM_NH4NO3_L-to-H_P Parameter: Treatment Value: 50mM NH4NO3 vs. 100mM Manitol
  misc_feature: MA Experiment ID: 20001556 Result: Up-regulated in Transcription
  misc_feature: MA Experiment 20001556 PARAMETER Experiment Name: At_Drought_Soil_Dry_P Parameter: Age (day) Value: 26
  misc_feature: MA Experiment 20001556 PARAMETER Experiment Name: At_Drought_Soil_Dry_P Parameter: Organism Value: A. thaliana
  misc_feature: MA Experiment 20001556 PARAMETER Experiment Name: At_Drought_Soil_Dry_P Parameter: Plant Line Value: WS
  misc_feature: MA Experiment 20001556 PARAMETER Experiment Name: At_Drought_Soil_Dry_P Parameter: Post Timepoint (hr) Value: None
  misc_feature: MA Experiment 20001556 PARAMETER Experiment Name: At_Drought_Soil_Dry_P Parameter: Post-Treatment Value: None
  misc_feature: MA Experiment 20001556 PARAMETER Experiment Name: At_Drought_Soil_Dry_P Parameter: Timepoint (day) Value: 12
  misc_feature: MA Experiment 20001556 PARAMETER Experiment Name: At_Drought_Soil_Dry_P Parameter: Treatment Value: Drought vs. No Drought
  misc_feature: MA Experiment ID: 20001557 Result: Up-regulated in Transcription
  misc_feature: MA Experiment 20001557 PARAMETER Experiment Name: At_Drought_Soil_Dry_P Parameter: Age (day) Value: 27
  misc_feature: MA Experiment 20001557 PARAMETER Experiment Name: At_Drought_Soil_Dry_P Parameter: Organism Value: A. thaliana
  misc_feature: MA Experiment 20001557 PARAMETER Experiment Name: At_Drought_Soil_Dry_P Parameter: Plant Line Value: WS
  misc_feature: MA Experiment 20001557 PARAMETER Experiment Name: At_Drought_Soil_Dry_P Parameter: Post Timepoint (hr) Value: 3
  misc_feature: MA Experiment 20001557 PARAMETER Experiment Name: At_Drought_Soil_Dry_P Parameter: Post-Treatment Value: Re-Water vs. No Drought
  misc_feature: MA Experiment 20001557 PARAMETER Experiment Name: At_Drought_Soil_Dry_P Parameter: Timepoint (day) Value: 13
  misc_feature: MA Experiment 20001557 PARAMETER Experiment Name: At_Drought_Soil_Dry_P Parameter: Treatment Value: Drought vs. No Drought
  misc_feature: MA Experiment ID: 20001558 Result: Up-regulated in Transcription
  misc_feature: MA Experiment 20001558 PARAMETER Experiment Name: At_Drought_Soil_Dry_P Parameter: Age (day) Value: 27
  misc_feature: MA Experiment 20001558 PARAMETER Experiment Name: At_Drought_Soil_Dry_P Parameter: Organism Value: A. thaliana
  misc_feature: MA Experiment 20001558 PARAMETER Experiment Name: At_Drought_Soil_Dry_P Parameter: Plant Line Value: WS
  misc_feature: MA Experiment 20001558 PARAMETER Experiment Name: At_Drought_Soil_Dry_P Parameter: Post Timepoint (hr) Value: 6
  misc_feature: MA Experiment 20001558 PARAMETER Experiment Name: At_Drought_Soil_Dry_P Parameter: Post-Treatment Value: Re-Water vs. No Drought
  misc_feature: MA Experiment 20001558 PARAMETER Experiment Name: At_Drought_Soil_Dry_P Parameter: Timepoint (day) Value: 13
  misc_feature: MA Experiment 20001558 PARAMETER Experiment Name: At_Drought_Soil_Dry_P Parameter: Treatment Value: Drought vs. No Drought
  misc_feature: MA Experiment ID: 20001560 Result: Up-regulated in Transcription
  misc_feature: MA Experiment 20001560 PARAMETER Experiment Name: At_Drought_Soil_Dry_P Parameter: Age (day) Value: 28
  misc_feature: MA Experiment 20001560 PARAMETER Experiment Name: At_Drought_Soil_Dry_P Parameter: Organism Value: A. thaliana
  misc_feature: MA Experiment 20001560 PARAMETER Experiment Name: At_Drought_Soil_Dry_P Parameter: Plant Line Value: WS
  misc_feature: MA Experiment 20001560 PARAMETER Experiment Name: At_Drought_Soil_Dry_P Parameter: Post Timepoint (hr) Value: None
  misc_feature: MA Experiment 20001560 PARAMETER Experiment Name: At_Drought_Soil_Dry_P Parameter: Post-Treatment Value: None
  misc_feature: MA Experiment 20001560 PARAMETER Experiment Name: At_Drought_Soil_Dry_P Parameter: Timepoint (day) Value: 14
  misc_feature: MA Experiment 20001560 PARAMETER Experiment Name: At_Drought_Soil_Dry_P Parameter: Treatment Value: Drought vs. No Drought
  misc_feature: MA Experiment ID: 20001757 Result: Up-regulated in Transcription
  misc_feature: MA Experiment 20001757 PARAMETER Experiment Name: At_50mM_NH4NO3_L-to-H_P Parameter: Timepoint (hr) Value: 6
  misc_feature: MA Experiment 20001757 PARAMETER Experiment Name: At_50mM_NH4NO3_L-to-H_P Parameter: Tissue Value: Leaf
  misc_feature: MA Experiment 20001757 PARAMETER Experiment Name: At_50mM_NH4NO3_L-to-H_P Parameter: Treatment Value: 50mM NH4NO3 vs 100mM Mannitol
aaaatcaattagggttttaacaaaaggttttagattcctggattgctactctttctcacctgtgccgtcctgtggaaaacatcgttctttcaccaacaatggcgaagaagcgagatcgaattgtcaacactcaaccttttatctccgatgacgcctccgtcgcttcttccaggaaacgatcaaaggttccaaaaacccatcagaaacaggaaaagttgattgaagctggtatgagcgagaagatcatgaaacaagctcttgcccaacaaaaggaagttgctgatgaagagaacgccgagagaaaccctagtagcgccgcttttgctgttgccggcgctgcgactgctggagaggagcagaaaattctggaggaggaagaagatgatattgatgattttgatggaacctttgaaaaccagagccaattcgataagcaagaggagattaatgaggatgatgagaagttgtttgagtcattcttaaataagaatgctcctcctcaacgtacgcttactgatatcattatcaagaagctcaaagataaggatgctgacttagctgaagaagagcgtcccgatcctaaaatggaccctgcaataactaagttatataaaggtgttggcaagtttatgagtgagtatacagttgggaaattgccaaaagcatttaagcttgttacttcaatggaacactgggaggatgttttatacttgactgagccagagaaatggtcacctaacgcattgtatcaagccacaaggatctttgcttccaacttgaaagacagacaagttcaacggttttataactatgttttgcttccgcgagtgagagaggatattagaaagcacaagaagctgcactttgctctgtaccaggctctgaaaaagtcactgtataagcctagtgctttcaatcaagggatactattcccgctttgtaagtcggggacatgcaatctcagagaagctgtaattatagggagcattcttgaaaagtgttcgatccctatgcttcactcatgtgttgccttgaacagactggctgagatggattattgtggcacaacaagttactttataaaagttcttttggagaagaaatattgtatgccgtatcgggtgcttgatgcattggttgctcacttcatgagatttgttgacgatataagagttatgcctgtgatttggcaccagtctcttcttacctttgtgcaacggtacaagtatgaaatactaaaggaagacaaagaacatctccaaactctcctccagaggcaaaaacaccatcttgttactcctgagattctgagagagcttaaggatagcagaaaccgtggagagaaagaagatcctatggtggataattttgccccagtaccggctaaagaagacaggtttgacattcctgaagtaccaatggaagaagactgatgattcatggtgtttggtattgaaagaggactgatgattcatagcagcagagataaaccctgaaactgggtgggtatgattctggttttccagttttgacatcgttgtattattatttcttatttgagtaagatttgaaatttttattactacatgatagtgtatctttaaacatggtttaatctttttgatataatccaaatttggtcttgtct

SEQ ID NO: 103922 - protein, 444 aa, Arabidopsis thaliana
  peptide (1)..(444): Ceres Seq. ID no. 13613902
  misc_feature (127)..(423): Pfam Name: Bystin Pfam Description: Bystin
  misc_feature (1)..(444): Homolog of NCBI NO: 20268780 NR Description: putative bystin [Arabidopsis thaliana]
  misc_feature (1)..(444): Homolog of NCBI NO: 15222394 NR Description: bystin -related [Arabidopsis thaliana]
  misc_feature (12)..(418): Homolog of NCBI NO: 31419416 NR Description: Unknown (protein for MGC:63889) [Danio rerio]
  misc_feature (15)..(420): Homolog of NCBI NO: 29792064 NR Description: bystin-like [Homo sapiens]
  misc_feature (116)..(420): Homolog of NCBI NO: 38566213 NR Description: BYSL protein [Homo sapiens]
  misc_feature (116)..(421): Homolog of NCBI NO: 32996727 NR Description: bystin-like [Rattus norvegicus]
  misc_feature (116)..(420): Homolog of NCBI NO: 33873575 NR Description: BYSL protein [Homo sapiens]
  misc_feature (127)..(420): Homolog of NCBI NO: 21264404 NR Description: Bystin >gi|13938404|gb|AAH07340.1|AAH07340
  misc_feature (128)..(420): Homolog of NCBI NO: 15208645 NR Description: bystin [Homo sapiens]
  misc_feature (128)..(420): Homolog of NCBI NO: 15011984 NR Description: bystin [Homo sapiens]
MAKKRDRIVNTQPFISDDASVASSRKRSKVPKTHQKQEKLIEAGMSEKIMKQALAQQKEVADEENAERNPSSAAFAVAGAATAGEEQKILEEEEDDIDDFDGTFENQSQFDKQEEINEDDEKLFESFLNKNAPPQRTLTDIIIKKLKDKDADLAEEERPDPKMDPAITKLYKGVGKFMSEYTVGKLPKAFKLVTSMEHWEDVLYLTEPEKWSPNALYQATRIFASNLKDRQVQRFYNYVLLPRVREDIRKHKKLHFALYQALKKSLYKPSAFNQGILFPLCKSGTCNLREAVIIGSILEKCSIPMLHSCVALNRLAEMDYCGTTSYFIKVLLEKKYCMPYRVLDALVAHFMRFVDDIRVMPVIWHQSLLTFVQRYKYEILKEDKEHLQTLLQRQKHHLVTPEILRELKDSRNRGEKEDPMVDNFAPVPAKEDRFDIPEVPMEED

SEQ ID NO: 103923 - protein, 400 aa, Arabidopsis thaliana
  peptide (1)..(400): Ceres Seq. ID no. 13613903
  misc_feature (83)..(379): Pfam Name: Bystin Pfam Description: Bystin
  misc_feature (1)..(400): Homolog of NCBI NO: 20268780 NR Description: putative bystin [Arabidopsis thaliana]
  misc_feature (1)..(400): Homolog of NCBI NO: 15222394 NR Description: bystin -related [Arabidopsis thaliana]
  misc_feature (1)..(374): Homolog of NCBI NO: 31419416 NR Description: Unknown (protein for MGC:63889) [Danio rerio]
  misc_feature (1)..(376): Homolog of NCBI NO: 29792064 NR Description: bystin-like [Homo sapiens]
  misc_feature (72)..(376): Homolog of NCBI NO: 38566213 NR Description: BYSL protein [Homo sapiens]
  misc_feature (72)..(377): Homolog of NCBI NO: 32996727 NR Description: bystin-like [Rattus norvegicus]
  misc_feature (72)..(376): Homolog of NCBI NO: 33873575 NR Description: BYSL protein [Homo sapiens]
  misc_feature (83)..(376): Homolog of NCBI NO: 21264404 NR Description: Bystin >gi|13938404|gb|AAH07340.1|AAH07340
  misc_feature (84)..(376): Homolog of NCBI NO: 15208645 NR Description: bystin [Homo sapiens]
  misc_feature (84)..(376): Homolog of NCBI NO: 15011984 NR Description: bystin [Homo sapiens]
MSEKIMKQALAQQKEVADEENAERNPSSAAFAVAGAATAGEEQKILEEEEDDIDDFDGTFENQSQFDKQEEINEDDEKLFESFLNKNAPPQRTLTDIIIKKLKDKDADLAEEERPDPKMDPAITKLYKGVGKFMSEYTVGKLPKAFKLVTSMEHWEDVLYLTEPEKWSPNALYQATRIFASNLKDRQVQRFYNYVLLPRVREDIRKHKKLHFALYQALKKSLYKPSAFNQGILFPLCKSGTCNLREAVIIGSILEKCSIPMLHSCVALNRLAEMDYCGTTSYFIKVLLEKKYCMPYRVLDALVAHFMRFVDDIRVMPVIWHQSLLTFVQRYKYEILKEDKEHLQTLLQRQKHHLVTPEILRELKDSRNRGEKEDPMVDNFAPVPAKEDRFDIPEVPMEED

SEQ ID NO: 103924 - protein, 395 aa, Arabidopsis thaliana
  peptide (1)..(395): Ceres Seq. ID no. 13613904
  misc_feature (78)..(374): Pfam Name: Bystin Pfam Description: Bystin
  misc_feature (1)..(395): Homolog of NCBI NO: 20268780 NR Description: putative bystin [Arabidopsis thaliana]
  misc_feature (1)..(395): Homolog of NCBI NO: 15222394 NR Description: bystin -related [Arabidopsis thaliana]
  misc_feature (1)..(369): Homolog of NCBI NO: 31419416 NR Description: Unknown (protein for MGC:63889) [Danio rerio]
  misc_feature (1)..(371): Homolog of NCBI NO: 29792064 NR Description: bystin-like [Homo sapiens]
  misc_feature (67)..(371): Homolog of NCBI NO: 38566213 NR Description: BYSL protein [Homo sapiens]
  misc_feature (67)..(372): Homolog of NCBI NO: 32996727 NR Description: bystin-like [Rattus norvegicus]
  misc_feature (67)..(371): Homolog of NCBI NO: 33873575 NR Description: BYSL protein [Homo sapiens]
  misc_feature (78)..(371): Homolog of NCBI NO: 21264404 NR Description: Bystin >gi|13938404|gb|AAH07340.1|AAH07340
  misc_feature (79)..(371): Homolog of NCBI NO: 15208645 NR Description: bystin [Homo sapiens]
  misc_feature (79)..(371): Homolog of NCBI NO: 15011984 NR Description: bystin [Homo sapiens]
MKQALAQQKEVADEENAERNPSSAAFAVAGAATAGEEQKILEEEEDDIDDFDGTFENQSQFDKQEEINEDDEKLFESFLNKNAPPQRTLTDIIIKKLKDKDADLAEEERPDPKMDPAITKLYKGVGKFMSEYTVGKLPKAFKLVTSMEHWEDVLYLTEPEKWSPNALYQATRIFASNLKDRQVQRFYNYVLLPRVREDIRKHKKLHFALYQALKKSLYKPSAFNQGILFPLCKSGTCNLREAVIIGSILEKCSIPMLHSCVALNRLAEMDYCGTTSYFIKVLLEKKYCMPYRVLDALVAHFMRFVDDIRVMPVIWHQSLLTFVQRYKYEILKEDKEHLQTLLQRQKHHLVTPEILRELKDSRNRGEKEDPMVDNFAPVPAKEDRFDIPEVPMEED

SEQ ID NO: 103925 - DNA, 708 bp, Arabidopsis thaliana
  misc_feature (1)..(708): Ceres Seq. ID no. 13613905
  misc_feature: MA Experiment ID: 108473 Result: Up-regulated in Transcription
  misc_feature: MA Experiment 108473 PARAMETER Experiment Name: At_Drought_Flowers_cDNA_P Parameter: Timepoint (hr) Value: 7 d
  misc_feature: MA Experiment 108473 PARAMETER Experiment Name: At_Drought_Flowers_cDNA_P Parameter: Tissue Value: Flower
  misc_feature: MA Experiment 108473 PARAMETER Experiment Name: At_Drought_Flowers_cDNA_P Parameter: Treatment Value: Drought vs. No Drought
  misc_feature: MA Experiment ID: 108561 Result: Up-regulated in Transcription
  misc_feature: MA Experiment 108561 PARAMETER Experiment Name: At_100uM_ABA_cDNA_P Parameter: Timepoint (hr) Value: 6
  misc_feature: MA Experiment 108561 PARAMETER Experiment Name: At_100uM_ABA_cDNA_P Parameter: Tissue Value: Aerial
  misc_feature: MA Experiment 108561 PARAMETER Experiment Name: At_100uM_ABA_cDNA_P Parameter: Treatment Value: 100uM ABA vs. No Treatment
  misc_feature: MA Experiment ID: 108573 Result: Up-regulated in Transcription
  misc_feature: MA Experiment 108573 PARAMETER Experiment Name: At_Drought_cDNA_P Parameter: Timepoint (hr) Value: 6
  misc_feature: MA Experiment 108573 PARAMETER Experiment Name: At_Drought_cDNA_P Parameter: Tissue Value: Aerial
  misc_feature: MA Experiment 108573 PARAMETER Experiment Name: At_Drought_cDNA_P Parameter: Treatment Value: Drought vs. No Drought
  misc_feature: MA Experiment ID: 108595 Result: Up-regulated in Transcription
  misc_feature: MA Experiment 108595 PARAMETER Experiment Name: At_Ler-pi_Ovule_cDNA_P Parameter: Plant Line Value: null
  misc_feature: MA Experiment ID: 20000068 Result: Up-regulated in Transcription
  misc_feature: MA Experiment ID: 20000069 Result: Up-regulated in Transcription
  misc_feature: MA Experiment 20000069 PARAMETER Experiment Name: At_100uM_ABA_Mutants_cDNA_P Parameter: Plant Line Value: CS23
  misc_feature: MA Experiment 20000069 PARAMETER Experiment Name: At_100uM_ABA_Mutants_cDNA_P Parameter: Timepoint (hr) Value: 6
  misc_feature: MA Experiment 20000069 PARAMETER Experiment Name: At_100uM_ABA_Mutants_cDNA_P Parameter: Tissue Value: Aerial
  misc_feature: MA Experiment 20000069 PARAMETER Experiment Name: At_100uM_ABA_Mutants_cDNA_P Parameter: Treatment Value: 100uM ABA vs. No Treatment
  misc_feature: MA Experiment ID: 20000070 Result: Up-regulated in Transcription
  misc_feature: MA Experiment 20000070 PARAMETER Experiment Name: At_100uM_ABA_Mutants_cDNA_P Parameter: Plant Line Value: CS24
  misc_feature: MA Experiment 20000070 PARAMETER Experiment Name: At_100uM_ABA_Mutants_cDNA_P Parameter: Timepoint (hr) Value: 6
  misc_feature: MA Experiment 20000070 PARAMETER Experiment Name: At_100uM_ABA_Mutants_cDNA_P Parameter: Tissue Value: Aerial
  misc_feature: MA Experiment 20000070 PARAMETER Experiment Name: At_100uM_ABA_Mutants_cDNA_P Parameter: Treatment Value: 100uM ABA vs. No Treatment
  misc_feature: MA Experiment ID: 20000071 Result: Up-regulated in Transcription
  misc_feature: MA Experiment 20000071 PARAMETER Experiment Name: At_100uM_ABA_Mutants_cDNA_P Parameter: Plant Line Value: CS8104
  misc_feature: MA Experiment 20000071 PARAMETER Experiment Name: At_100uM_ABA_Mutants_cDNA_P Parameter: Timepoint (hr) Value: 6
  misc_feature: MA Experiment 20000071 PARAMETER Experiment Name: At_100uM_ABA_Mutants_cDNA_P Parameter: Tissue Value: Aerial
  misc_feature: MA Experiment 20000071 PARAMETER Experiment Name: At_100uM_ABA_Mutants_cDNA_P Parameter: Treatment Value: 100uM ABA vs. No Treatment
  misc_feature: MA Experiment ID: 20000072 Result: Up-regulated in Transcription
  misc_feature: MA Experiment 20000072 PARAMETER Experiment Name: At_100uM_ABA_Mutants_cDNA_P Parameter: Plant Line Value: CS8105
  misc_feature: MA Experiment 20000072 PARAMETER Experiment Name: At_100uM_ABA_Mutants_cDNA_P Parameter: Timepoint (hr) Value: 6
  misc_feature: MA Experiment 20000072 PARAMETER Experiment Name: At_100uM_ABA_Mutants_cDNA_P Parameter: Tissue Value: Aerial
  misc_feature: MA Experiment 20000072 PARAMETER Experiment Name: At_100uM_ABA_Mutants_cDNA_P Parameter: Treatment Value: 100uM ABA vs. No Treatment
  misc_feature: MA Experiment ID: 20000087 Result: Up-regulated in Transcription
  misc_feature: MA Experiment 20000087 PARAMETER Experiment Name: At_100uM_ABA_Mutants_cDNA_P Parameter: Plant Line Value: WS
  misc_feature: MA Experiment 20000087 PARAMETER Experiment Name: At_100uM_ABA_Mutants_cDNA_P Parameter: Timepoint (hr) Value: 6
  misc_feature: MA Experiment 20000087 PARAMETER Experiment Name: At_100uM_ABA_Mutants_cDNA_P Parameter: Tissue Value: Aerial
  misc_feature: MA Experiment 20000087 PARAMETER Experiment Name: At_100uM_ABA_Mutants_cDNA_P Parameter: Treatment Value: 100uM ABA vs. No Treatment
  misc_feature: MA Experiment ID: 20000169 Result: Up-regulated in Transcription
  misc_feature: MA Experiment 20000169 PARAMETER Experiment Name: At_100uM_ABA_P Parameter: Age (day) Value: 14
  misc_feature: MA Experiment 20000169 PARAMETER Experiment Name: At_100uM_ABA_P Parameter: Organism Value: A. thaliana
  misc_feature: MA Experiment 20000169 PARAMETER Experiment Name: At_100uM_ABA_P Parameter: Plant Line Value: WS
  misc_feature: MA Experiment 20000169 PARAMETER Experiment Name: At_100uM_ABA_P Parameter: Timepoint (hr) Value: 6
  misc_feature: MA Experiment 20000169 PARAMETER Experiment Name: At_100uM_ABA_P Parameter: Tissue Value: Aerial
  misc_feature: MA Experiment 20000169 PARAMETER Experiment Name: At_100uM_ABA_P Parameter: Treatment Value: 100uM ABA vs. No Treatment
  misc_feature: MA Experiment ID: 20000265 Result: Up-regulated in Transcription
  misc_feature: MA Experiment 20000265 PARAMETER Experiment Name: At_Open_Flower_P Parameter: Age (day) Value: 21
  misc_feature: MA Experiment 20000265 PARAMETER Experiment Name: At_Open_Flower_P Parameter: Plant Line Value: WS
  misc_feature: MA Experiment 20000265 PARAMETER Experiment Name: At_Open_Flower_P Parameter: Tissue Value: Closed Flower vs. Whole Plant
  misc_feature: MA Experiment ID: 20000267 Result: Up-regulated in Transcription
  misc_feature: MA Experiment 20000267 PARAMETER Experiment Name: At_Drought_P Parameter: Age (day) Value: 7
  misc_feature: MA Experiment 20000267 PARAMETER Experiment Name: At_Drought_P Parameter: Organism Value: A. thaliana
  misc_feature: MA Experiment 20000267 PARAMETER Experiment Name: At_Drought_P Parameter: Plant Line Value: WS
  misc_feature: MA Experiment 20000267 PARAMETER Experiment Name: At_Drought_P Parameter: Timepoint (hr) Value: 6
  misc_feature: MA Experiment 20000267 PARAMETER Experiment Name: At_Drought_P Parameter: Tissue Value: Whole Plant
  misc_feature: MA Experiment 20000267 PARAMETER Experiment Name: At_Drought_P Parameter: Treatment Value: Drought vs. No Drought
  misc_feature: MA Experiment ID: 20000436 Result: Up-regulated in Transcription
  misc_feature: MA Experiment 20000436 PARAMETER Experiment Name: At_Drought_P Parameter: Age (day) Value: 7
  misc_feature: MA Experiment 20000436 PARAMETER Experiment Name: At_Drought_P Parameter: Organism Value: A. thaliana
  misc_feature: MA Experiment 20000436 PARAMETER Experiment Name: At_Drought_P Parameter: Plant Line Value: WS
  misc_feature: MA Experiment 20000436 PARAMETER Experiment Name: At_Drought_P Parameter: Timepoint (hr) Value: 12
  misc_feature: MA Experiment 20000436 PARAMETER Experiment Name: At_Drought_P Parameter: Tissue Value: Whole Plant
  misc_feature: MA Experiment 20000436 PARAMETER Experiment Name: At_Drought_P Parameter: Treatment Value: Drought vs. No Drought
  misc_feature: MA Experiment ID: 20000437 Result: Up-regulated in Transcription
  misc_feature: MA Experiment 20000437 PARAMETER Experiment Name: At_Drought_P Parameter: Age (day) Value: 8
  misc_feature: MA Experiment 20000437 PARAMETER Experiment Name: At_Drought_P Parameter: Organism Value: A. thaliana
  misc_feature: MA Experiment 20000437 PARAMETER Experiment Name: At_Drought_P Parameter: Plant Line Value: WS
  misc_feature: MA Experiment 20000437 PARAMETER Experiment Name: At_Drought_P Parameter: Timepoint (hr) Value: 24
  misc_feature: MA Experiment 20000437 PARAMETER Experiment Name: At_Drought_P Parameter: Tissue Value: Whole Plant
  misc_feature: MA Experiment 20000437 PARAMETER Experiment Name: At_Drought_P Parameter: Treatment Value: Drought vs. No Drought
  misc_feature: MA Experiment ID: 20000527 Result: Up-regulated in Transcription
  misc_feature: MA Experiment 20000527 PARAMETER Experiment Name: At_10percent_PEG_P Parameter: Age (day) Value: 20
  misc_feature: MA Experiment 20000527 PARAMETER Experiment Name: At_10percent_PEG_P Parameter: Organism Value: A. thaliana
  misc_feature: MA Experiment 20000527 PARAMETER Experiment Name: At_10percent_PEG_P Parameter: Plant Line Value: WS
  misc_feature: MA Experiment 20000527 PARAMETER Experiment Name: At_10percent_PEG_P Parameter: Timepoint (day) Value: 20
  misc_feature: MA Experiment 20000527 PARAMETER Experiment Name: At_10percent_PEG_P Parameter: Tissue Value: Whole Plant
  misc_feature: MA Experiment 20000527 PARAMETER Experiment Name: At_10percent_PEG_P Parameter: Treatment Value: 10percent PEG vs. No Treatment
  misc_feature: MA Experiment ID: 20000794 Result: Up-regulated in Transcription
  misc_feature: MA Experiment 20000794 PARAMETER Experiment Name: At_Petals_P Parameter: Age (day) Value: 23-25 days
  misc_feature: MA Experiment 20000794 PARAMETER Experiment Name: At_Petals_P Parameter: Plant Line Value: WS
  misc_feature: MA Experiment 20000794 PARAMETER Experiment Name: At_Petals_P Parameter: Tissue Value: Petals vs. Whole plant
  misc_feature: MA Experiment ID: 20001554 Result: Up-regulated in Transcription
  misc_feature: MA Experiment 20001554 PARAMETER Experiment Name: At_Drought_Soil_Dry_P Parameter: Age (day) Value: 21
  misc_feature: MA Experiment 20001554 PARAMETER Experiment Name: At_Drought_Soil_Dry_P Parameter: Organism Value: A. thaliana
  misc_feature: MA Experiment 20001554 PARAMETER Experiment Name: At_Drought_Soil_Dry_P Parameter: Plant Line Value: WS
  misc_feature: MA Experiment 20001554 PARAMETER Experiment Name: At_Drought_Soil_Dry_P Parameter: Post Timepoint (hr) Value: None
  misc_feature: MA Experiment 20001554 PARAMETER Experiment Name: At_Drought_Soil_Dry_P Parameter: Post-Treatment Value: None
  misc_feature: MA Experiment 20001554 PARAMETER Experiment Name: At_Drought_Soil_Dry_P Parameter: Timepoint (day) Value: 7
  misc_feature: MA Experiment 20001554 PARAMETER Experiment Name: At_Drought_Soil_Dry_P Parameter: Treatment Value: Drought vs. No Drought
  misc_feature: MA Experiment ID: 20001555 Result: Up-regulated in Transcription
  misc_feature: MA Experiment 20001555 PARAMETER Experiment Name: At_Drought_Soil_Dry_P Parameter: Age (day) Value: 24
  misc_feature: MA Experiment 20001555 PARAMETER Experiment Name: At_Drought_Soil_Dry_P Parameter: Organism Value: A. thaliana
  misc_feature: MA Experiment 20001555 PARAMETER Experiment Name: At_Drought_Soil_Dry_P Parameter: Plant Line Value: WS
  misc_feature: MA Experiment 20001555 PARAMETER Experiment Name: At_Drought_Soil_Dry_P Parameter: Post Timepoint (hr) Value: None
  misc_feature: MA Experiment 20001555 PARAMETER Experiment Name: At_Drought_Soil_Dry_P Parameter: Post-Treatment Value: None
  misc_feature: MA Experiment 20001555 PARAMETER Experiment Name: At_Drought_Soil_Dry_P Parameter: Timepoint (day) Value: 10
  misc_feature: MA Experiment 20001555 PARAMETER Experiment Name: At_Drought_Soil_Dry_P Parameter: Treatment Value: Drought vs. No Drought
  misc_feature: MA Experiment ID: 20001556 Result: Up-regulated in Transcription
  misc_feature: MA Experiment 20001556 PARAMETER Experiment Name: At_Drought_Soil_Dry_P Parameter: Age (day) Value: 26
  misc_feature: MA Experiment 20001556 PARAMETER Experiment Name: At_Drought_Soil_Dry_P Parameter: Organism Value: A. thaliana
  misc_feature: MA Experiment 20001556 PARAMETER Experiment Name: At_Drought_Soil_Dry_P Parameter: Plant Line Value: WS
  misc_feature: MA Experiment 20001556 PARAMETER Experiment Name: At_Drought_Soil_Dry_P Parameter: Post Timepoint (hr) Value: None
  misc_feature: MA Experiment 20001556 PARAMETER Experiment Name: At_Drought_Soil_Dry_P Parameter: Post-Treatment Value: None
  misc_feature: MA Experiment 20001556 PARAMETER Experiment Name: At_Drought_Soil_Dry_P Parameter: Timepoint (day) Value: 12
  misc_feature: MA Experiment 20001556 PARAMETER Experiment Name: At_Drought_Soil_Dry_P Parameter: Treatment Value: Drought vs. No Drought
  misc_feature: MA Experiment ID: 20001904 Result: Up-regulated in Transcription
  misc_feature: MA Experiment 20001904 PARAMETER Experiment Name: At_Drought_Reproduction_P Parameter: Age (day) Value: 37
  misc_feature: MA Experiment 20001904 PARAMETER Experiment Name: At_Drought_Reproduction_P Parameter: Organism Value: A. thaliana
  misc_feature: MA Experiment 20001904 PARAMETER Experiment Name: At_Drought_Reproduction_P Parameter: Plant Line Value: WS
  misc_feature: MA Experiment 20001904 PARAMETER Experiment Name: At_Drought_Reproduction_P Parameter: Timepoint (day) Value: 7
  misc_feature: MA Experiment 20001904 PARAMETER Experiment Name: At_Drought_Reproduction_P Parameter: Tissue Value: Rosettes
  misc_feature: MA Experiment 20001904 PARAMETER Experiment Name: At_Drought_Reproduction_P Parameter: Treatment Value: Drought vs. No Drought
  misc_feature: MA Experiment ID: 20001905 Result: Up-regulated in Transcription
  misc_feature: MA Experiment 20001905 PARAMETER Experiment Name: At_Drought_Reproduction_P Parameter: Age (day) Value: 40
  misc_feature: MA Experiment 20001905 PARAMETER Experiment Name: At_Drought_Reproduction_P Parameter: Organism Value: A. thaliana
  misc_feature: MA Experiment 20001905 PARAMETER Experiment Name: At_Drought_Reproduction_P Parameter: Plant Line Value: WS
  misc_feature: MA Experiment 20001905 PARAMETER Experiment Name: At_Drought_Reproduction_P Parameter: Timepoint (day) Value: 10
  misc_feature: MA Experiment 20001905 PARAMETER Experiment Name: At_Drought_Reproduction_P Parameter: Tissue Value: Rosettes
  misc_feature: MA Experiment 20001905 PARAMETER Experiment Name: At_Drought_Reproduction_P Parameter: Treatment Value: Drought vs. No Drought
  misc_feature: MA Experiment ID: 20001906 Result: Up-regulated in Transcription
  misc_feature: MA Experiment 20001906 PARAMETER Experiment Name: At_Drought_Reproduction_P Parameter: Age (day) Value: 35
  misc_feature: MA Experiment 20001906 PARAMETER Experiment Name: At_Drought_Reproduction_P Parameter: Organism Value: A. thaliana
  misc_feature: MA Experiment 20001906 PARAMETER Experiment Name: At_Drought_Reproduction_P Parameter: Plant Line Value: WS
  misc_feature: MA Experiment 20001906 PARAMETER Experiment Name: At_Drought_Reproduction_P Parameter: Timepoint (day) Value: 5
  misc_feature: MA Experiment 20001906 PARAMETER Experiment Name: At_Drought_Reproduction_P Parameter: Tissue Value: Siliques
  misc_feature: MA Experiment 20001906 PARAMETER Experiment Name: At_Drought_Reproduction_P Parameter: Treatment Value: Drought vs. No Drought
  misc_feature: MA Experiment ID: 20001907 Result: Up-regulated in Transcription
  misc_feature: MA Experiment 20001907 PARAMETER Experiment Name: At_Drought_Reproduction_P Parameter: Age (day) Value: 37
  misc_feature: MA Experiment 20001907 PARAMETER Experiment Name: At_Drought_Reproduction_P Parameter: Organism Value: A. thaliana
  misc_feature: MA Experiment 20001907 PARAMETER Experiment Name: At_Drought_Reproduction_P Parameter: Plant Line Value: WS
  misc_feature: MA Experiment 20001907 PARAMETER Experiment Name: At_Drought_Reproduction_P Parameter: Timepoint (day) Value: 7
  misc_feature: MA Experiment 20001907 PARAMETER Experiment Name: At_Drought_Reproduction_P Parameter: Tissue Value: Siliques
  misc_feature: MA Experiment 20001907 PARAMETER Experiment Name: At_Drought_Reproduction_P Parameter: Treatment Value: Drought vs. No Drought
  misc_feature: MA Experiment ID: 20001908 Result: Up-regulated in Transcription
  misc_feature: MA Experiment 20001908 PARAMETER Experiment Name: At_Drought_Reproduction_P Parameter: Age (day) Value: 40
  misc_feature: MA Experiment 20001908 PARAMETER Experiment Name: At_Drought_Reproduction_P Parameter: Organism Value: A. thaliana
  misc_feature: MA Experiment 20001908 PARAMETER Experiment Name: At_Drought_Reproduction_P Parameter: Plant Line Value: WS
  misc_feature: MA Experiment 20001908 PARAMETER Experiment Name: At_Drought_Reproduction_P Parameter: Timepoint (day) Value: 10
  misc_feature: MA Experiment 20001908 PARAMETER Experiment Name: At_Drought_Reproduction_P Parameter: Tissue Value: Siliques
  misc_feature: MA Experiment 20001908 PARAMETER Experiment Name: At_Drought_Reproduction_P Parameter: Treatment Value: Drought vs. No Drought
  misc_feature: MA Experiment ID: 20001909 Result: Up-regulated in Transcription
  misc_feature: MA Experiment 20001909 PARAMETER Experiment Name: At_Drought_Reproduction_P Parameter: Age (day) Value: 35
  misc_feature: MA Experiment 20001909 PARAMETER Experiment Name: At_Drought_Reproduction_P Parameter: Organism Value: A. thaliana
  misc_feature: MA Experiment 20001909 PARAMETER Experiment Name: At_Drought_Reproduction_P Parameter: Plant Line Value: WS
  misc_feature: MA Experiment 20001909 PARAMETER Experiment Name: At_Drought_Reproduction_P Parameter: Timepoint (day) Value: 5
  misc_feature: MA Experiment 20001909 PARAMETER Experiment Name: At_Drought_Reproduction_P Parameter: Tissue Value: Flowers
  misc_feature: MA Experiment 20001909 PARAMETER Experiment Name: At_Drought_Reproduction_P Parameter: Treatment Value: Drought vs. No Drought
  misc_feature: MA Experiment ID: 20001910 Result: Up-regulated in Transcription
  misc_feature: MA Experiment 20001910 PARAMETER Experiment Name: At_Drought_Reproduction_P Parameter: Age (day) Value: 37
  misc_feature: MA Experiment 20001910 PARAMETER Experiment Name: At_Drought_Reproduction_P Parameter: Organism Value: A. thaliana
  misc_feature: MA Experiment 20001910 PARAMETER Experiment Name: At_Drought_Reproduction_P Parameter: Plant Line Value: WS
  misc_feature: MA Experiment 20001910 PARAMETER Experiment Name: At_Drought_Reproduction_P Parameter: Timepoint (day) Value: 7
  misc_feature: MA Experiment 20001910 PARAMETER Experiment Name: At_Drought_Reproduction_P Parameter: Tissue Value: Flowers
  misc_feature: MA Experiment 20001910 PARAMETER Experiment Name: At_Drought_Reproduction_P Parameter: Treatment Value: Drought vs. No Drought
  misc_feature: MA Experiment ID: 20001911 Result: Up-regulated in Transcription
  misc_feature: MA Experiment 20001911 PARAMETER Experiment Name: At_Drought_Reproduction_P Parameter: Age (day) Value: 40
  misc_feature: MA Experiment 20001911 PARAMETER Experiment Name: At_Drought_Reproduction_P Parameter: Organism Value: A. thaliana
  misc_feature: MA Experiment 20001911 PARAMETER Experiment Name: At_Drought_Reproduction_P Parameter: Plant Line Value: WS
  misc_feature: MA Experiment 20001911 PARAMETER Experiment Name: At_Drought_Reproduction_P Parameter: Timepoint (day) Value: 10
  misc_feature: MA Experiment 20001911 PARAMETER Experiment Name: At_Drought_Reproduction_P Parameter: Tissue Value: Flowers
  misc_feature: MA Experiment 20001911 PARAMETER Experiment Name: At_Drought_Reproduction_P Parameter: Treatment Value: Drought vs. No Drought
atatcatcttattatctctcaagttcttgattttaattaaagatgggtaaagacgaccaccacgaacaagacaaaagattcttctcacatcataatcatcacggccatgggtatccgccaggagcttatcctcctccaccgcagggagcttatcctccaccgggaggttaccctccgcaaggttatcctccaccacctcacggctatccaccggccgcttacccacctccacccggtgcttatcctcccgccgggtatcccggaccatccggtcctcgtccagggtttggaggaggagttgggggattgatagcaggagcggcaacagcggcagcggctgcaatgggaggtcaccatgcgggtcatcacggaggctacgggcaccacggccacggaaaatacaaaagagggtttttcggaggaggaaagtacaagcgaggaaagcatagtatgtttggtggagggaagtacaagcgtggcaagcacggtatgttcggaggcaaaagaagcaagcatggcatgttcggagggaaacgaggcaaaggcatgttcggacgaaagaagtggaaatgatccattagcatcctctctacatatattatcgtaacaatttaacattaagcttaatataaaaatgtggatgtataatttgttttatatgatgtatatatagctatatgtatctatgaagagtatttaatatggttg

SEQ ID NO: 103926 - protein, 176 aa, Arabidopsis thaliana
  peptide (1)..(176): Ceres Seq. ID no. 13613906
  misc_feature (25)..(84): Pfam Name: Collagen triple helix repeat (20 copies) Pfam Description: Collagen triple helix repeat (20 copies)
  misc_feature (1)..(176): Homolog of NCBI NO: 18398103 NR Description: proline-rich protein family [Arabidopsis thaliana]
  misc_feature (1)..(176): Homolog of NCBI NO: 21553447 NR Description: putative glycine and proline-rich protein
  misc_feature (2)..(176): Homolog of NCBI NO: 15234178 NR Description: glycine/proline-rich protein [Arabidopsis
  misc_feature (81)..(176): Homolog of NCBI NO: 15228076 NR Description: glycine-rich protein [Arabidopsis thaliana]
  misc_feature (16)..(176): Homolog of NCBI NO: 33668156 NR Description: GPRP [Oryza sativa (indica cultivar-group)]
  misc_feature (17)..(176): Homolog of NCBI NO: 6478148 NR Description: putative glycine and proline-rich protein
  misc_feature (2)..(142): Homolog of NCBI NO: 7487135 NR Description: hypothetical protein T18B16.170 - Arabidopsis >gi|2828295|emb|CAA16709.1| putative protein [Arabidopsis
  misc_feature (1)..(176): Homolog of NCBI NO: 15238005 NR Description: glycine/proline-rich protein [Arabidopsis
  misc_feature (1)..(176): Homolog of NCBI NO: 18422542 NR Description: proline-rich protein family [Arabidopsis thaliana]
  misc_feature (2)..(174): Homolog of NCBI NO: 13543234 NR Description: Unknown (protein for MGC:12025) [Mus musculus]
MGKDDHHEQDKRFFSHHNHHGHGYPPGAYPPPPQGAYPPPGGYPPQGYPPPPHGYPPAAYPPPPGAYPPAGYPGPSGPRPGFGGGVGGLIAGAATAAAAAMGGHHAGHHGGYGHHGHGKYKRGFFGGGKYKRGKHSMFGGGKYKRGKHGMFGGKRSKHGMFGGKRGKGMFGRKKWK

SEQ ID NO: 103927 - DNA, 1464 bp, Arabidopsis thaliana
  misc_feature (1)..(1464): Ceres Seq. ID no. 13613911
  misc_feature: MA Experiment ID: 108434 Result: Up-regulated in Transcription
  misc_feature: MA Experiment 108434 PARAMETER Experiment Name: At_Root_Tips_cDNA_P Parameter: Tissue Value: Root Tips
  misc_feature: MA Experiment ID: 108461 Result: Up-regulated in Transcription
  misc_feature: MA Experiment 108461 PARAMETER Experiment Name: At_Germinating_Seeds_cDNA_P Parameter: Age (day) Value: 1 vs. 0
  misc_feature: MA Experiment 108461 PARAMETER Experiment Name: At_Germinating_Seeds_cDNA_P Parameter: Tissue Value: Germinating Seeds
  misc_feature: MA Experiment ID: 108463 Result: Up-regulated in Transcription
  misc_feature: MA Experiment 108463 PARAMETER Experiment Name: At_Germinating_Seeds_cDNA_P Parameter: Age (day) Value: 3 vs. 0
  misc_feature: MA Experiment 108463 PARAMETER Experiment Name: At_Germinating_Seeds_cDNA_P Parameter: Tissue Value: Germinating Seeds
  misc_feature: MA Experiment ID: 108605 Result: Up-regulated in Transcription
  misc_feature: MA Experiment 108605 PARAMETER Experiment Name: At_100uM_ABA_cDNA_P Parameter: Timepoint (hr) Value: 6
  misc_feature: MA Experiment 108605 PARAMETER Experiment Name: At_100uM_ABA_cDNA_P Parameter: Tissue Value: Aerial
  misc_feature: MA Experiment 108605 PARAMETER Experiment Name: At_100uM_ABA_cDNA_P Parameter: Treatment Value: 100uM ABA vs. No Treatment
  misc_feature: MA Experiment ID: 20000111 Result: Down-regulated in Transcription
  misc_feature: MA Experiment 20000111 PARAMETER Experiment Name: At_42deg_Heat_cDNA_P Parameter: Temperature (deg C) Value: 42 vs. 22
  misc_feature: MA Experiment 20000111 PARAMETER Experiment Name: At_42deg_Heat_cDNA_P Parameter: Timepoint (hr) Value: 6
  misc_feature: MA Experiment 20000111 PARAMETER Experiment Name: At_42deg_Heat_cDNA_P Parameter: Tissue Value: Aerial
  misc_feature: MA Experiment ID: 20000112 Result: Down-regulated in Transcription
  misc_feature: MA Experiment 20000112 PARAMETER Experiment Name: At_42deg_Heat_cDNA_P Parameter: Temperature (deg C) Value: 42 vs. 22
  misc_feature: MA Experiment 20000112 PARAMETER Experiment Name: At_42deg_Heat_cDNA_P Parameter: Timepoint (hr) Value: 2
  misc_feature: MA Experiment 20000112 PARAMETER Experiment Name: At_42deg_Heat_cDNA_P Parameter: Tissue Value: Aerial
  misc_feature: MA Experiment ID: 20000113 Result: Down-regulated in Transcription
  misc_feature: MA Experiment 20000113 PARAMETER Experiment Name: At_42deg_Heat_cDNA_P Parameter: Temperature (deg C) Value: 42 vs. 22
  misc_feature: MA Experiment 20000113 PARAMETER Experiment Name: At_42deg_Heat_cDNA_P Parameter: Timepoint (hr) Value: 8
  misc_feature: MA Experiment 20000113 PARAMETER Experiment Name: At_42deg_Heat_cDNA_P Parameter: Tissue Value: Aerial
  misc_feature: MA Experiment ID: 20000180 Result: Up-regulated in Transcription
  misc_feature: MA Experiment 20000180 PARAMETER Experiment Name: At_Germinating_Seeds_P Parameter: Age (hr) Value: 24 vs. 0
  misc_feature: MA Experiment 20000180 PARAMETER Experiment Name: At_Germinating_Seeds_P Parameter: Tissue Value: Germinating Seeds
  misc_feature: MA Experiment ID: 20000185 Result: Up-regulated in Transcription
  misc_feature: MA Experiment 20000185 PARAMETER Experiment Name: At_Roots__P Parameter: Age (day) Value: 7 vs. 21
  misc_feature: MA Experiment 20000185 PARAMETER Experiment Name: At_Roots__P Parameter: Organism Value: A. thaliana
  misc_feature: MA Experiment 20000185 PARAMETER Experiment Name: At_Roots__P Parameter: Tissue Value: Roots vs. Whole Plant
  misc_feature: MA Experiment ID: 20000227 Result: Up-regulated in Transcription
  misc_feature: MA Experiment 20000227 PARAMETER Experiment Name: At_Root-Tips-vs-Tops_P Parameter: Tissue Value: Root Tips vs. Root Tops
  misc_feature: MA Experiment ID: 20000234 Result: Up-regulated in Transcription
  misc_feature: MA Experiment 20000234 PARAMETER Experiment Name: At_Siliques_P Parameter: Age (day) Value: 21
  misc_feature: MA Experiment 20000234 PARAMETER Experiment Name: At_Siliques_P Parameter: Organism Value: A. thaliana
  misc_feature: MA Experiment 20000234 PARAMETER Experiment Name: At_Siliques_P Parameter: Plant Line Value: WS
  misc_feature: MA Experiment 20000234 PARAMETER Experiment Name: At_Siliques_P Parameter: Tissue Value: Less Than 5mm Siliques vs. Whole Plant
  misc_feature: MA Experiment ID: 20000265 Result: Up-regulated in Transcription
  misc_feature: MA Experiment 20000265 PARAMETER Experiment Name: At_Open_Flower_P Parameter: Age (day) Value: 21
  misc_feature: MA Experiment 20000265 PARAMETER Experiment Name: At_Open_Flower_P Parameter: Plant Line Value: WS
  misc_feature: MA Experiment 20000265 PARAMETER Experiment Name: At_Open_Flower_P Parameter: Tissue Value: Closed Flower vs. Whole Plant
attttcaactactttgaagctgcagatctcttttggagattcacatggcgacggagaaatgggtgttcatggtgacggcgcaaactccgacgaacattgcggtgattaagtattggggaaagagagatgaggttcggattctccccgttaacgatagcattagcgtaactcttgatcctgatcatctctgcacagtcaccactgttgccgttagtcctgcttttgatcgggatcgaatgtggctcaatggcaaggaaatatctctttctggaagtaggtaccaaaattgtttgagggaaatacgaggtcgtgctggtgatgttgaagacatggaaaaggggatcaagataaggaagaaagattgggagaaattgaatctacatattgcttctcataataacttccctactgctgctggcttagcatcttcagctgctggatttgcttgtctagttttttctcttgcaaagttgatgaatgtagatgaagatccaagccatctttctgcaatagccaggcaaggttcaggaagtgcttgccggagtttatttggtggatttgtcaagtggacaatgggaagcaaagaagatggaagtgacagcgttgcagttcaactggcagatgagaagcattgggatgatcttgttatcatcattgctgtggtgagttcacggcagaaggaaacgagcagtacctccggaatgcgtgaaagtgttgagacaagtttgcttttacagcatagagcaaaagaagttgtgccaaaacggattttgcaaatggaggaagctataaaaaatcgagactttgcatcgtttacacaattgacatgtacagatagtaatcagtttcatgctgtttgtctggatacatctccacccatattctacatgaatgacacttcacacagaataattagcttagttgaaaagtggaaccgttctgaagggacaccacaggttgcttacacatttgatgctggtccaaatgctgtactgattgcacgcaacagaaaggtcgcagtccaattgctccaggggcttctgtactattttccccctaagtcagacactgatatgaagagttacgtagtgggcgataattcaattctaaaagaagcaggattagatggagcaagtggtgtagagaatctgcaacctccacctgaaattaaagacaacattggatctcaggatcaaaaaggagaagtcagttattttatctgcactagacctggaaaaggtcccatcgtgcttcacgaccaaactcaagcccttctcgatcctgaaacaggccttcctaagtgagcattctctctgcttcaaactaattattatgattagcatctcctttaactgcaagtttaagatacgatatatgtggcagaataggtgcaggtacgttgtcatctaactattagctttcctatttccaaataaaagaaattcattggttttgttttaccag

SEQ ID NO: 103928 - protein, 419 aa, Arabidopsis thaliana
  peptide (1)..(419): Ceres Seq. ID no. 13613912
  misc_feature (1)..(419): Homolog of NCBI NO: 18410026 NR Description: mevalonate diphosphate decarboxylase, putative
  misc_feature (1)..(419): Homolog of NCBI NO: 21593243 NR Description: diphosphomevalonate decarboxylase-like protein
  misc_feature (1)..(419): Homolog of NCBI NO: 11281655 NR Description: diphosphomevalonate decarboxylase (EC 4.1.1.33)
  misc_feature (1)..(419): Homolog of NCBI NO: 15224931 NR Description: mevalonate diphosphate decarboxylase [Arabidopsis >gi|25347967|pir||T52625 diphosphomevalonate decarboxylase (EC
  misc_feature (9)..(419): Homolog of NCBI NO: 21593039 NR Description: mevalonate diphosphate decarboxylase [Arabidopsis
  misc_feature (4)..(419): Homolog of NCBI NO: 16417950 NR Description: mevalonate disphosphate decarboxylase [Hevea
  misc_feature (1)..(414): Homolog of NCBI NO: 13592005 NR Description: mevalonate pyrophosphate decarboxylase [Rattus >gi|2498339|sp|Q62967|ER19_RAT Diphosphomevalonate decarboxylase pyrophosphate decarboxylase) (Mevalonate
  misc_feature (1)..(411): Homolog of NCBI NO: 20149736 NR Description: mevalonate (diphospho) decarboxylase; decarboxylase [Mus musculus] >gi|14250208|gb|AAH08526.1|
  misc_feature (1)..(411): Homolog of NCBI NO: 26354448 NR Description: unnamed protein product [Mus musculus]
  misc_feature (1)..(411): Homolog of NCBI NO: 23814095 NR Description: Diphosphomevalonate decarboxylase (Mevalonate decarboxylase) (Mevalonate (diphospho)decarboxylase)
MATEKWVFMVTAQTPTNIAVIKYWGKRDEVRILPVNDSISVTLDPDHLCTVTTVAVSPAFDRDRMWLNGKEISLSGSRYQNCLREIRGRAGDVEDMEKGIKIRKKDWEKLNLHIASHNNFPTAAGLASSAAGFACLVFSLAKLMNVDEDPSHLSAIARQGSGSACRSLFGGFVKWTMGSKEDGSDSVAVQLADEKHWDDLVIIIAVVSSRQKETSSTSGMRESVETSLLLQHRAKEVVPKRILQMEEAIKNRDFASFTQLTCTDSNQFHAVCLDTSPPIFYMNDTSHRIISLVEKWNRSEGTPQVAYTFDAGPNAVLIARNRKVAVQLLQGLLYYFPPKSDTDMKSYVVGDNSILKEAGLDGASGVENLQPPPEIKDNIGSQDQKGEVSYFICTRPGKGPIVLHDQTQALLDPETGLPK

SEQ ID NO: 103929 - protein, 411 aa, Arabidopsis thaliana
  peptide (1)..(411): Ceres Seq. ID no. 13613913
  misc_feature (1)..(411): Homolog of NCBI NO: 18410026 NR Description: mevalonate diphosphate decarboxylase, putative
  misc_feature (1)..(411): Homolog of NCBI NO: 21593243 NR Description: diphosphomevalonate decarboxylase-like protein
  misc_feature (1)..(411): Homolog of NCBI NO: 11281655 NR Description: diphosphomevalonate decarboxylase (EC 4.1.1.33)
  misc_feature (1)..(411): Homolog of NCBI NO: 15224931 NR Description: mevalonate diphosphate decarboxylase [Arabidopsis >gi|25347967|pir||T52625 diphosphomevalonate decarboxylase (EC
  misc_feature (1)..(411): Homolog of NCBI NO: 21593039 NR Description: mevalonate diphosphate decarboxylase [Arabidopsis
  misc_feature (1)..(411): Homolog of NCBI NO: 16417950 NR Description: mevalonate disphosphate decarboxylase [Hevea
  misc_feature (1)..(406): Homolog of NCBI NO: 13592005 NR Description: mevalonate pyrophosphate decarboxylase [Rattus >gi|2498339|sp|Q62967|ER19_RAT Diphosphomevalonate decarboxylase pyrophosphate decarboxylase) (Mevalonate
  misc_feature (1)..(403): Homolog of NCBI NO: 20149736 NR Description: mevalonate (diphospho) decarboxylase; decarboxylase [Mus musculus] >gi|14250208|gb|AAH08526.1|
  misc_feature (1)..(403): Homolog of NCBI NO: 26354448 NR Description: unnamed protein product [Mus musculus]
  misc_feature (1)..(403): Homolog of NCBI NO: 23814095 NR Description: Diphosphomevalonate decarboxylase (Mevalonate decarboxylase) (Mevalonate (diphospho)decarboxylase)
MVTAQTPTNIAVIKYWGKRDEVRILPVNDSISVTLDPDHLCTVTTVAVSPAFDRDRMWLNGKEISLSGSRYQNCLREIRGRAGDVEDMEKGIKIRKKDWEKLNLHIASHNNFPTAAGLASSAAGFACLVFSLAKLMNVDEDPSHLSAIARQGSGSACRSLFGGFVKWTMGSKEDGSDSVAVQLADEKHWDDLVIIIAVVSSRQKETSSTSGMRESVETSLLLQHRAKEVVPKRILQMEEAIKNRDFASFTQLTCTDSNQFHAVCLDTSPPIFYMNDTSHRIISLVEKWNRSEGTPQVAYTFDAGPNAVLIARNRKVAVQLLQGLLYYFPPKSDTDMKSYVVGDNSILKEAGLDGASGVENLQPPPEIKDNIGSQDQKGEVSYFICTRPGKGPIVLHDQTQALLDPETGLPK

SEQ ID NO: 103930 - protein, 355 aa, Arabidopsis thaliana
  peptide (1)..(355): Ceres Seq. ID no. 13613914
  misc_feature (1)..(355): Homolog of NCBI NO: 18410026 NR Description: mevalonate diphosphate decarboxylase, putative
  misc_feature (1)..(355): Homolog of NCBI NO: 21593243 NR Description: diphosphomevalonate decarboxylase-like protein
  misc_feature (1)..(355): Homolog of NCBI NO: 11281655 NR Description: diphosphomevalonate decarboxylase (EC 4.1.1.33)
  misc_feature (1)..(355): Homolog of NCBI NO: 15224931 NR Description: mevalonate diphosphate decarboxylase [Arabidopsis >gi|25347967|pir||T52625 diphosphomevalonate decarboxylase (EC
  misc_feature (1)..(355): Homolog of NCBI NO: 21593039 NR Description: mevalonate diphosphate decarboxylase [Arabidopsis
  misc_feature (1)..(355): Homolog of NCBI NO: 16417950 NR Description: mevalonate disphosphate decarboxylase [Hevea
  misc_feature (1)..(350): Homolog of NCBI NO: 13592005 NR Description: mevalonate pyrophosphate decarboxylase [Rattus >gi|2498339|sp|Q62967|ER19_RAT Diphosphomevalonate decarboxylase pyrophosphate decarboxylase) (Mevalonate
  misc_feature (1)..(347): Homolog of NCBI NO: 20149736 NR Description: mevalonate (diphospho) decarboxylase; decarboxylase [Mus musculus] >gi|14250208|gb|AAH08526.1|
  misc_feature (1)..(347): Homolog of NCBI NO: 26354448 NR Description: unnamed protein product [Mus musculus]
  misc_feature (1)..(347): Homolog of NCBI NO: 23814095 NR Description: Diphosphomevalonate decarboxylase (Mevalonate decarboxylase) (Mevalonate (diphospho)decarboxylase)
MWLNGKEISLSGSRYQNCLREIRGRAGDVEDMEKGIKIRKKDWEKLNLHIASHNNFPTAAGLASSAAGFACLVFSLAKLMNVDEDPSHLSAIARQGSGSACRSLFGGFVKWTMGSKEDGSDSVAVQLADEKHWDDLVIIIAVVSSRQKETSSTSGMRESVETSLLLQHRAKEVVPKRILQMEEAIKNRDFASFTQLTCTDSNQFHAVCLDTSPPIFYMNDTSHRIISLVEKWNRSEGTPQVAYTFDAGPNAVLIARNRKVAVQLLQGLLYYFPPKSDTDMKSYVVGDNSILKEAGLDGASGVENLQPPPEIKDNIGSQDQKGEVSYFICTRPGKGPIVLHDQTQALLDPETGLPK

SEQ ID NO: 103931 - DNA, 970 bp, Arabidopsis thaliana
  misc_feature (1)..(970): Ceres Seq. ID no. 13613919
  misc_feature: MA Experiment ID: 108488 Result: Down-regulated in Transcription
  misc_feature: MA Experiment ID: 108668 Result: Up-regulated in Transcription
  misc_feature: MA Experiment 108668 PARAMETER Experiment Name: At_2mM_SA_cDNA_P Parameter: Plant Line Value: WS
  misc_feature: MA Experiment 108668 PARAMETER Experiment Name: At_2mM_SA_cDNA_P Parameter: Timepoint (hr) Value: 6
  misc_feature: MA Experiment 108668 PARAMETER Experiment Name: At_2mM_SA_cDNA_P Parameter: Treatment Value: 2mM SA vs. No Treatment
  misc_feature: MA Experiment ID: 20000224 Result: Down-regulated in Transcription
aaaactagtcgtgactcgtcgtcgtctgatattaccagattcctgagaatttgagcctaatccttcatcaccaagctaagtctcaaggtttcacgagtacaataatgagtcaaaagggtttgatatatagctttgttgctaaaggaacagttgttctagcagagcatactccttattcaggaaactttagcaccattgctgttcaatgtctgcagaagctacccacaaatagcagcaagtatacttactcttgcgatggtcatactttcaatttccttgttgacaatggctttgtgtttctagtggttgctgatgagtccaccggaagaagtgttcctttcgtgtttctcgaacgggtcaaggaagactttaagaagcggtatgaagcgagtataaagaatgatgagcgacatcctcttgcggatgaggacgaagatgatgatttgtttggagatcggtttagcgttgcatacaatcttgacagggagttcgggcccatactaaaggagcatatgcagtattgtatgagccatccagaagagatgagcaaactttctaagttgaaggcccaaataactgaggtcaaggggatcatgatggacaacattgagaaggttctggacagaggagagaagatcgaacttctggttgacaaaaccgagaacctacagttccaggcagatagcttccagagacaaggaaggcagttaagaaggaagatgtggctacagagtctgcagatgaagctgatggtggctggtgctgttttctcttttattctcatcgtttgggttgttgcttgtggaggtttcaaatgctcatcatgatgtttcgcttcgtttgtatctgttttaacacttaaattgcatgctcatgtttgtacatggaagaacttataataacatatcatcatatcatcatcatctcccacatgctgtgatgctatatatataaaaaaaatgtttttgtt

SEQ ID NO: 103932 - protein, 240 aa, Arabidopsis thaliana; identical to SEQ ID NO: 21608
  peptide (1)..(240): Ceres Seq. ID no. 13613920
  misc_feature (146)..(234): Pfam Name: Synaptobrevin Pfam Description: Synaptobrevin
  misc_feature (1)..(240): Homolog of NCBI NO: 15232475 NR Description: synaptobrevin -related protein [Arabidopsis
  misc_feature (122)..(239): Homolog of NCBI NO: 27805753 NR Description: Vesicle-associated membrane protein 725
  misc_feature (122)..(239): Homolog of NCBI NO: 30685375 NR Description: synaptobrevin -related [Arabidopsis thaliana] putative synaptobrevin [Arabidopsis thaliana]
  misc_feature (1)..(93): Homolog of NCBI NO: 27805753 NR Description: Vesicle-associated membrane protein 725
  misc_feature (1)..(93): Homolog of NCBI NO: 30685375 NR Description: synaptobrevin -related [Arabidopsis thaliana] putative synaptobrevin [Arabidopsis thaliana]
  misc_feature (122)..(239): Homolog of NCBI NO: 15220315 NR Description: synaptobrevin 7B -related [Arabidopsis thaliana]
  misc_feature (1)..(93): Homolog of NCBI NO: 15220315 NR Description: synaptobrevin 7B -related [Arabidopsis thaliana]
  misc_feature (104)..(238): Homolog of NCBI NO: 29150380 NR Description: synaptobrevin-like protein [Oryza sativa
  misc_feature (1)..(93): Homolog of NCBI NO: 29150380 NR Description: synaptobrevin-like protein [Oryza sativa
  misc_feature (122)..(238): Homolog of NCBI NO: 15220943 NR Description: synaptobrevin 7B -related, 3' partial

SEQ ID NO: 103933 - DNA, 956 bp, Arabidopsis thaliana
  misc_feature (1)..(956): Ceres Seq. ID no. 13613921
  misc_feature: MA Experiment ID: 108501 Result: Down-regulated in Transcription
  misc_feature: MA Experiment 108501 PARAMETER Experiment Name: At_ap2_floral_buds_cDNA_P Parameter: Plant Line Value: ap2 (Ler.)
  misc_feature: MA Experiment 108501 PARAMETER Experiment Name: At_ap2_floral_buds_cDNA_P Parameter: Tissue Value: Closed Flower
  misc_feature: MA Experiment ID: 20000113 Result: Down-regulated in Transcription
  misc_feature: MA Experiment 20000113 PARAMETER Experiment Name: At_42deg_Heat_cDNA_P Parameter: Temperature (deg C) Value: 42 vs. 22
  misc_feature: MA Experiment 20000113 PARAMETER Experiment Name: At_42deg_Heat_cDNA_P Parameter: Timepoint (hr) Value: 8
  misc_feature: MA Experiment 20000113 PARAMETER Experiment Name: At_42deg_Heat_cDNA_P Parameter: Tissue Value: Aerial
  misc_feature: MA Experiment ID: 20000234 Result: Up-regulated in Transcription
  misc_feature: MA Experiment 20000234 PARAMETER Experiment Name: At_Siliques_P Parameter: Age (day) Value: 21
  misc_feature: MA Experiment 20000234 PARAMETER Experiment Name: At_Siliques_P Parameter: Organism Value: A. thaliana
  misc_feature: MA Experiment 20000234 PARAMETER Experiment Name: At_Siliques_P Parameter: Plant Line Value: WS
  misc_feature: MA Experiment 20000234 PARAMETER Experiment Name: At_Siliques_P Parameter: Tissue Value: Less Than 5mm Siliques vs. Whole Plant
  misc_feature: MA Experiment ID: 20000235 Result: Up-regulated in Transcription
  misc_feature: MA Experiment 20000235 PARAMETER Experiment Name: At_Siliques_P Parameter: Age (day) Value: 21
  misc_feature: MA Experiment 20000235 PARAMETER Experiment Name: At_Siliques_P Parameter: Organism Value: A. thaliana
  misc_feature: MA Experiment 20000235 PARAMETER Experiment Name: At_Siliques_P Parameter: Plant Line Value: WS
  misc_feature: MA Experiment 20000235 PARAMETER Experiment Name: At_Siliques_P Parameter: Tissue Value: 5-10mm Siliques vs. Whole Plant
  misc_feature: MA Experiment ID: 20000264 Result: Up-regulated in Transcription
  misc_feature: MA Experiment 20000264 PARAMETER Experiment Name: At_Open_Flower_P Parameter: Age (day) Value: 21
  misc_feature: MA Experiment 20000264 PARAMETER Experiment Name: At_Open_Flower_P Parameter: Plant Line Value: WS
  misc_feature: MA Experiment 20000264 PARAMETER Experiment Name: At_Open_Flower_P Parameter: Tissue Value: Open Flower vs. Whole Plant
  misc_feature: MA Experiment ID: 20000265 Result: Up-regulated in Transcription
  misc_feature: MA Experiment 20000265 PARAMETER Experiment Name: At_Open_Flower_P Parameter: Age (day) Value: 21
  misc_feature: MA Experiment 20000265 PARAMETER Experiment Name: At_Open_Flower_P Parameter: Plant Line Value: WS
  misc_feature: MA Experiment 20000265 PARAMETER Experiment Name: At_Open_Flower_P Parameter: Tissue Value: Closed Flower vs. Whole Plant
  misc_feature: MA Experiment ID: 20000286 Result: Up-regulated in Transcription
  misc_feature: MA Experiment 20000286 PARAMETER Experiment Name: At_Open_Flower_P Parameter: Age (day) Value: 21
  misc_feature: MA Experiment 20000286 PARAMETER Experiment Name: At_Open_Flower_P Parameter: Plant Line Value: WS
  misc_feature: MA Experiment 20000286 PARAMETER Experiment Name: At_Open_Flower_P Parameter: Tissue Value: Half Open vs. Whole Plant
  misc_feature: MA Experiment ID: 20000794 Result: Up-regulated in Transcription
  misc_feature: MA Experiment 20000794 PARAMETER Experiment Name: At_Petals_P Parameter: Age (day) Value: 23-25 days
  misc_feature: MA Experiment 20000794 PARAMETER Experiment Name: At_Petals_P Parameter: Plant Line Value: WS
  misc_feature: MA Experiment 20000794 PARAMETER Experiment Name: At_Petals_P Parameter: Tissue Value: Petals vs. Whole plant
aacaaaaagattaaacaaagagagaagaatatggcgagagggaagatccagatcaagaggatagagaaccagacaaacagacaagtgacgtattcaaagagaagaaatggtttattcaagaaagcacatgagctcacggttttgtgtgatgctagggtttcgattatcatgttctctagctccaacaagcttcatgagtatatcagccctaacaccacaacgaaggagatcgtagatctgtaccaaactatttctgatgtcgatgtttgggccactcaatatgagcgaatgcaagaaaccaagaggaaactgttggagacaaatagaaatctccggactcagatcaagcagaggctaggtgagtgtttggacgagcttgacattcaggagctgcgtcgtcttgaggatgaaatggaaaacactttcaaactcgttcgcgagcgcaagttcaaatctcttgggaatcagatcgagaccaccaagaaaaagaacaaaagtcaacaagacatacaaaagaatctcatacatgagctggaactaagagctgaagatcctcactatggactagtagacaatggaggagattacgactcagttcttggataccaaatcgaagggtcacgtgcttacgctcttcgtttccaccagaaccatcaccactattaccccaaccatggccttcatgcaccctctgcctctgacatcattaccttccatcttcttgaataattaaaggctaaaaggtttgctggtgccatcattgtctatctaattatttagtaactacttaaaacataaggcatggtgttgctaaaaccttaaactgtcatgtttcttagttatgtattttaaagcctaaagaaatatggattgtgtgatcagtagtgcttaggcttattgtgtgtggaatgttttcaagacttttatcatgtatcgtattattatattgaccactc

SEQ ID NO: 103934 - protein, 242 aa, Arabidopsis thaliana
  peptide (1)..(242): Ceres Seq. ID no. 13613922
  misc_feature (81)..(180): Pfam Name: K-box region Pfam Description: K-box region
  misc_feature (11)..(242): Homolog of NCBI NO: 15232493 NR Description: floral homeotic protein APETALA3 (AP3) thaliana] >gi|543815|sp|P35632|AP3_ARATH Floral homeotic protein
  misc_feature (11)..(242): Homolog of NCBI NO: 5805230 NR Description: floral homeotic protein AP3 [Arabidopsis thaliana]
  misc_feature (11)..(242): Homolog of NCBI NO: 5805210 NR Description: floral homeotic protein AP3 [Arabidopsis >gi|5805220|gb|AAD51892.1| floral homeotic protein AP3
  misc_feature (11)..(242): Homolog of NCBI NO: 1384044 NR Description: APETALA3 [Arabidopsis thaliana]
  misc_feature (11)..(242): Homolog of NCBI NO: 5805226 NR Description: floral homeotic protein AP3 [Arabidopsis thaliana]
  misc_feature (11)..(242): Homolog of NCBI NO: 5805234 NR Description: floral homeotic protein AP3 [Arabidopsis thaliana]
  misc_feature (11)..(242): Homolog of NCBI NO: 5805228 NR Description: floral homeotic protein AP3 [Arabidopsis thaliana]
  misc_feature (11)..(242): Homolog of NCBI NO: 5805238 NR Description: floral homeotic protein AP3 [Arabidopsis thaliana]
  misc_feature (11)..(242): Homolog of NCBI NO: 21592970 NR Description: floral homeotic protein APETALA3 (AP3)
  misc_feature (11)..(242): Homolog of NCBI NO: 5805240 NR Description: floral homeotic protein AP3 [Arabidopsis thaliana]
NKKIKQREKNMARGKIQIKRIENQTNRQVTYSKRRNGLFKKAHELTVLCDARVSIIMFSSSNKLHEYISPNTTTKEIVDLYQTISDVDVWATQYERMQETKRKLLETNRNLRTQIKQRLGECLDELDIQELRRLEDEMENTFKLVRERKFKSLGNQIETTKKKNKSQQDIQKNLIHELELRAEDPHYGLVDNGGDYDSVLGYQIEGSRAYALRFHQNHHHYYPNHGLHAPSASDIITFHLLE

SEQ ID NO: 103935 - protein, 232 aa, Arabidopsis thaliana; identical to SEQ ID NO: 41609
  peptide (1)..(232): Ceres Seq. ID no. 13613923
  misc_feature (71)..(170): Pfam Name: K-box region Pfam Description: K-box region
  misc_feature (1)..(232): Homolog of NCBI NO: 15232493 NR Description: floral homeotic protein APETALA3 (AP3) thaliana] >gi|543815|sp|P35632|AP3_ARATH Floral homeotic protein
  misc_feature (1)..(232): Homolog of NCBI NO: 5805230 NR Description: floral homeotic protein AP3 [Arabidopsis thaliana]
  misc_feature (1)..(232): Homolog of NCBI NO: 5805210 NR Description: floral homeotic protein AP3 [Arabidopsis >gi|5805220|gb|AAD51892.1| floral homeotic protein AP3
  misc_feature (1)..(232): Homolog of NCBI NO: 1384044 NR Description: APETALA3 [Arabidopsis thaliana]
  misc_feature (1)..(232): Homolog of NCBI NO: 5805234 NR Description: floral homeotic protein AP3 [Arabidopsis thaliana]
  misc_feature (1)..(232): Homolog of NCBI NO: 5805226 NR Description: floral homeotic protein AP3 [Arabidopsis thaliana]
  misc_feature (1)..(232): Homolog of NCBI NO: 5805228 NR Description: floral homeotic protein AP3 [Arabidopsis thaliana]
  misc_feature (1)..(232): Homolog of NCBI NO: 5805238 NR Description: floral homeotic protein AP3 [Arabidopsis thaliana]
  misc_feature (1)..(232): Homolog of NCBI NO: 21592970 NR Description: floral homeotic protein APETALA3 (AP3)
  misc_feature (1)..(232): Homolog of NCBI NO: 5805240 NR Description: floral homeotic protein AP3 [Arabidopsis thaliana]

SEQ ID NO: 103936 - protein, 186 aa, Arabidopsis thaliana; identical to SEQ ID NO: 41610
  peptide (1)..(186): Ceres Seq. ID no. 13613924
  misc_feature (25)..(124): Pfam Name: K-box region Pfam Description: K-box region
  misc_feature (1)..(186): Homolog of NCBI NO: 15232493 NR Description: floral homeotic protein APETALA3 (AP3) thaliana] >gi|543815|sp|P35632|AP3_ARATH Floral homeotic protein
  misc_feature (1)..(186): Homolog of NCBI NO: 5805230 NR Description: floral homeotic protein AP3 [Arabidopsis thaliana]
  misc_feature (1)..(186): Homolog of NCBI NO: 5805210 NR Description: floral homeotic protein AP3 [Arabidopsis >gi|5805220|gb|AAD51892.1| floral homeotic protein AP3
  misc_feature (1)..(186): Homolog of NCBI NO: 1384044 NR Description: APETALA3 [Arabidopsis thaliana]
  misc_feature (1)..(186): Homolog of NCBI NO: 5805226 NR Description: floral homeotic protein AP3 [Arabidopsis thaliana]
  misc_feature (1)..(186): Homolog of NCBI NO: 5805234 NR Description: floral homeotic protein AP3 [Arabidopsis thaliana]
  misc_feature (1)..(186): Homolog of NCBI NO: 5805228 NR Description: floral homeotic protein AP3 [Arabidopsis thaliana]
  misc_feature (1)..(186): Homolog of NCBI NO: 5805238 NR Description: floral homeotic protein AP3 [Arabidopsis thaliana]
  misc_feature (1)..(186): Homolog of NCBI NO: 21592970 NR Description: floral homeotic protein APETALA3 (AP3)
  misc_feature (1)..(186): Homolog of NCBI NO: 5805240 NR Description: floral homeotic protein AP3 [Arabidopsis thaliana]

SEQ ID NO: 103937 - DNA, 1809 bp, Arabidopsis thaliana
  misc_feature (1)..(1809): Ceres Seq. ID no. 13613929
  misc_feature: MA Experiment ID: 108463 Result: Up-regulated in Transcription
  misc_feature: MA Experiment 108463 PARAMETER Experiment Name: At_Germinating_Seeds_cDNA_P Parameter: Age (day) Value: 3 vs. 0
  misc_feature: MA Experiment 108463 PARAMETER Experiment Name: At_Germinating_Seeds_cDNA_P Parameter: Tissue Value: Germinating Seeds
  misc_feature: MA Experiment ID: 108488 Result: Down-regulated in Transcription
  misc_feature: MA Experiment ID: 108489 Result: Up-regulated in Transcription
  misc_feature: MA Experiment ID: 108561 Result: Down-regulated in Transcription
  misc_feature: MA Experiment 108561 PARAMETER Experiment Name: At_100uM_ABA_cDNA_P Parameter: Timepoint (hr) Value: 6
  misc_feature: MA Experiment 108561 PARAMETER Experiment Name: At_100uM_ABA_cDNA_P Parameter: Tissue Value: Aerial
  misc_feature: MA Experiment 108561 PARAMETER Experiment Name: At_100uM_ABA_cDNA_P Parameter: Treatment Value: 100uM ABA vs. No Treatment
  misc_feature: MA Experiment ID: 108574 Result: Up-regulated in Transcription
  misc_feature: MA Experiment 108574 PARAMETER Experiment Name: At_Wounding__cDNA_P Parameter: Timepoint (hr) Value: 1
  misc_feature: MA Experiment 108574 PARAMETER Experiment Name: At_Wounding__cDNA_P Parameter: Tissue Value: Aerial
  misc_feature: MA Experiment 108574 PARAMETER Experiment Name: At_Wounding__cDNA_P Parameter: Treatment Value: Wounding vs. No Wounding
  misc_feature: MA Experiment ID: 108577 Result: Down-regulated in Transcription
  misc_feature: MA Experiment 108577 PARAMETER Experiment Name: At_42deg_Heat_cDNA_P Parameter: Temperature (deg C) Value: 42 vs. 22
  misc_feature: MA Experiment 108577 PARAMETER Experiment Name: At_42deg_Heat_cDNA_P Parameter: Timepoint (hr) Value: 6
  misc_feature: MA Experiment 108577 PARAMETER Experiment Name: At_42deg_Heat_cDNA_P Parameter: Tissue Value: Aerial
  misc_feature: MA Experiment ID: 108579 Result: Up-regulated in Transcription
  misc_feature: MA Experiment 108579 PARAMETER Experiment Name: At_4deg_Cold_cDNA_P Parameter: Temperature (deg C) Value: 4 vs. 22
  misc_feature: MA Experiment 108579 PARAMETER Experiment Name: At_4deg_Cold_cDNA_P Parameter: Timepoint (hr) Value: 6
  misc_feature: MA Experiment 108579 PARAMETER Experiment Name: At_4deg_Cold_cDNA_P Parameter: Tissue Value: Aerial
  misc_feature: MA Experiment ID: 108585 Result: Up-regulated in Transcription
  misc_feature: MA Experiment 108585 PARAMETER Experiment Name: At_5mM_NaNP_cDNA_P Parameter: Timepoint (hr) Value: 6
  misc_feature: MA Experiment 108585 PARAMETER Experiment Name: At_5mM_NaNP_cDNA_P Parameter: Tissue Value: Aerial
  misc_feature: MA Experiment 108585 PARAMETER Experiment Name: At_5mM_NaNP_cDNA_P Parameter: Treatment Value: null
  misc_feature: MA Experiment ID: 108594 Result: Up-regulated in Transcription
  misc_feature: MA Experiment 108594 PARAMETER Experiment Name: At_Ler-rhl_Root_cDNA_P Parameter: Plant Line Value: null
  misc_feature: MA Experiment ID: 108595 Result: Up-regulated in Transcription
  misc_feature: MA Experiment 108595 PARAMETER Experiment Name: At_Ler-pi_Ovule_cDNA_P Parameter: Plant Line Value: null
  misc_feature: MA Experiment ID: 108667 Result: Up-regulated in Transcription
  misc_feature: MA Experiment 108667 PARAMETER Experiment Name: At_2mM_SA_cDNA_P Parameter: Plant Line Value: WS
  misc_feature: MA Experiment 108667 PARAMETER Experiment Name: At_2mM_SA_cDNA_P Parameter: Timepoint (hr) Value: 1
  misc_feature: MA Experiment 108667 PARAMETER Experiment Name: At_2mM_SA_cDNA_P Parameter: Treatment Value: 2mM SA vs. No Treatment
  misc_feature: MA Experiment ID: 20000144 Result: Down-regulated in Transcription
  misc_feature: MA Experiment 20000144 PARAMETER Experiment Name: At_42deg_Heat_cDNA_P Parameter: Temperature (deg C) Value: 42 vs. 22
  misc_feature: MA Experiment 20000144 PARAMETER Experiment Name: At_42deg_Heat_cDNA_P Parameter: Timepoint (hr) Value: 1
  misc_feature: MA Experiment 20000144 PARAMETER Experiment Name: At_42deg_Heat_cDNA_P Parameter: Tissue Value: Aerial
  misc_feature: MA Experiment ID: 20000171 Result: Down-regulated in Transcription
  misc_feature: MA Experiment 20000171 PARAMETER Experiment Name: At_42deg_Heat_P Parameter: Age (day) Value: 14
  misc_feature: MA Experiment 20000171 PARAMETER Experiment Name: At_42deg_Heat_P Parameter: Organism Value: A. thaliana
  misc_feature: MA Experiment 20000171 PARAMETER Experiment Name: At_42deg_Heat_P Parameter: Plant Line Value: WS
  misc_feature: MA Experiment 20000171 PARAMETER Experiment Name: At_42deg_Heat_P Parameter: Temperature (deg C) Value: 42 vs. 22
  misc_feature: MA Experiment 20000171 PARAMETER Experiment Name: At_42deg_Heat_P Parameter: Timepoint (hr) Value: 1
  misc_feature: MA Experiment 20000171 PARAMETER Experiment Name: At_42deg_Heat_P Parameter: Tissue Value: Aerial
  misc_feature: MA Experiment ID: 20000180 Result: Down-regulated in Transcription
  misc_feature: MA Experiment 20000180 PARAMETER Experiment Name: At_Germinating_Seeds_P Parameter: Age (hr) Value: 24 vs. 0
  misc_feature: MA Experiment 20000180 PARAMETER Experiment Name: At_Germinating_Seeds_P Parameter: Tissue Value: Germinating Seeds
  misc_feature: MA Experiment ID: 20000182 Result: Up-regulated in Transcription
  misc_feature: MA Experiment 20000182 PARAMETER Experiment Name: At_2mM_SA_P Parameter: Age (day) Value: 14
  misc_feature: MA Experiment 20000182 PARAMETER Experiment Name: At_2mM_SA_P Parameter: Organism Value: A. thaliana
  misc_feature: MA Experiment 20000182 PARAMETER Experiment Name: At_2mM_SA_P Parameter: Plant Line Value: WS
  misc_feature: MA Experiment 20000182 PARAMETER Experiment Name: At_2mM_SA_P Parameter: Timepoint (hr) Value: 6
  misc_feature: MA Experiment 20000182 PARAMETER Experiment Name: At_2mM_SA_P Parameter: Tissue Value: Aerial
  misc_feature: MA Experiment 20000182 PARAMETER Experiment Name: At_2mM_SA_P Parameter: Treatment Value: 2mM SA vs. No Treatment
  misc_feature: MA Experiment ID: 20000184 Result: Down-regulated in Transcription
  misc_feature: MA Experiment 20000184 PARAMETER Experiment Name: At_Shoots__P Parameter: Age (day) Value: 7
  misc_feature: MA Experiment 20000184 PARAMETER Experiment Name: At_Shoots__P Parameter: Tissue Value: Shoots vs. Whole Plant
  misc_feature: MA Experiment ID: 20000185 Result: Down-regulated in Transcription
  misc_feature: MA Experiment 20000185 PARAMETER Experiment Name: At_Roots__P Parameter: Age (day) Value: 7 vs. 21
  misc_feature: MA Experiment 20000185 PARAMETER Experiment Name: At_Roots__P Parameter: Organism Value: A. thaliana
  misc_feature: MA Experiment 20000185 PARAMETER Experiment Name: At_Roots__P Parameter: Tissue Value: Roots vs. Whole Plant
  misc_feature: MA Experiment ID: 20000234 Result: Down-regulated in Transcription
  misc_feature: MA Experiment 20000234 PARAMETER Experiment Name: At_Siliques_P Parameter: Age (day) Value: 21
  misc_feature: MA Experiment 20000234 PARAMETER Experiment Name: At_Siliques_P Parameter: Organism Value: A. thaliana
  misc_feature: MA Experiment 20000234 PARAMETER Experiment Name: At_Siliques_P Parameter: Plant Line Value: WS
  misc_feature: MA Experiment 20000234 PARAMETER Experiment Name: At_Siliques_P Parameter: Tissue Value: Less Than 5mm Siliques vs. Whole Plant
  misc_feature: MA Experiment ID: 20000264 Result: Down-regulated in Transcription
  misc_feature: MA Experiment 20000264 PARAMETER Experiment Name: At_Open_Flower_P Parameter: Age (day) Value: 21
  misc_feature: MA Experiment 20000264 PARAMETER Experiment Name: At_Open_Flower_P Parameter: Plant Line Value: WS
  misc_feature: MA Experiment 20000264 PARAMETER Experiment Name: At_Open_Flower_P Parameter: Tissue Value: Open Flower vs. Whole Plant
  misc_feature: MA Experiment ID: 20000265 Result: Down-regulated in Transcription
  misc_feature: MA Experiment 20000265 PARAMETER Experiment Name: At_Open_Flower_P Parameter: Age (day) Value: 21
  misc_feature: MA Experiment 20000265 PARAMETER Experiment Name: At_Open_Flower_P Parameter: Plant Line Value: WS
  misc_feature: MA Experiment 20000265 PARAMETER Experiment Name: At_Open_Flower_P Parameter: Tissue Value: Closed Flower vs. Whole Plant
  misc_feature: MA Experiment ID: 20000267 Result: Up-regulated in Transcription
  misc_feature: MA Experiment 20000267 PARAMETER Experiment Name: At_Drought_P Parameter: Age (day) Value: 7
  misc_feature: MA Experiment 20000267 PARAMETER Experiment Name: At_Drought_P Parameter: Organism Value: A. thaliana
  misc_feature: MA Experiment 20000267 PARAMETER Experiment Name: At_Drought_P Parameter: Plant Line Value: WS
  misc_feature: MA Experiment 20000267 PARAMETER Experiment Name: At_Drought_P Parameter: Timepoint (hr) Value: 6
  misc_feature: MA Experiment 20000267 PARAMETER Experiment Name: At_Drought_P Parameter: Tissue Value: Whole Plant
  misc_feature: MA Experiment 20000267 PARAMETER Experiment Name: At_Drought_P Parameter: Treatment Value: Drought vs. No Drought
  misc_feature: MA Experiment ID: 20000286 Result: Down-regulated in Transcription
  misc_feature: MA Experiment 20000286 PARAMETER Experiment Name: At_Open_Flower_P Parameter: Age (day) Value: 21
  misc_feature: MA Experiment 20000286 PARAMETER Experiment Name: At_Open_Flower_P Parameter: Plant Line Value: WS
  misc_feature: MA Experiment 20000286 PARAMETER Experiment Name: At_Open_Flower_P Parameter: Tissue Value: Half Open vs. Whole Plant
  misc_feature: MA Experiment ID: 20000288 Result: Down-regulated in Transcription
  misc_feature: MA Experiment 20000288 PARAMETER Experiment Name: At_Drought_P Parameter: Age (day) Value: 7
  misc_feature: MA Experiment 20000288 PARAMETER Experiment Name: At_Drought_P Parameter: Organism Value: A. thaliana
  misc_feature: MA Experiment 20000288 PARAMETER Experiment Name: At_Drought_P Parameter: Plant Line Value: WS
  misc_feature: MA Experiment 20000288 PARAMETER Experiment Name: At_Drought_P Parameter: Timepoint (hr) Value: 1
  misc_feature: MA Experiment 20000288 PARAMETER Experiment Name: At_Drought_P Parameter: Tissue Value: Whole Plant
  misc_feature: MA Experiment 20000288 PARAMETER Experiment Name: At_Drought_P Parameter: Treatment Value: Drought vs. No Drought
  misc_feature: MA Experiment ID: 20000439 Result: Down-regulated in Transcription
  misc_feature: MA Experiment 20000439 PARAMETER Experiment Name: At_Roots__P Parameter: Age (day) Value: 14 vs. 21
  misc_feature: MA Experiment 20000439 PARAMETER Experiment Name: At_Roots__P Parameter: Organism Value: A. thaliana
  misc_feature: MA Experiment 20000439 PARAMETER Experiment Name: At_Roots__P Parameter: Tissue Value: Roots vs. Whole Plant
  misc_feature: MA Experiment ID: 20000441 Result: Up-regulated in Transcription
  misc_feature: MA Experiment 20000441 PARAMETER Experiment Name: At_1uM_BR-BRZ__P Parameter: Tissue Value: Shoot Apices
  misc_feature: MA Experiment 20000441 PARAMETER Experiment Name: At_1uM_BR-BRZ__P Parameter: Treatment Value: 1uM BR vs. No Treatment
  misc_feature: MA Experiment ID: 20000443 Result: Up-regulated in Transcription
  misc_feature: MA Experiment 20000443 PARAMETER Experiment Name: At_1uM_BR-BRZ__P Parameter: Tissue Value: Shoot Apices
  misc_feature: MA Experiment 20000443 PARAMETER Experiment Name: At_1uM_BR-BRZ__P Parameter: Treatment Value: 1uM BRZ vs. No Treatment
  misc_feature: MA Experiment ID: 20000452 Result: Up-regulated in Transcription
  misc_feature: MA Experiment 20000452 PARAMETER Experiment Name: At_CS6879_Shoots-Roots_P Parameter: Age (day) Value: 14
  misc_feature: MA Experiment 20000452 PARAMETER Experiment Name: At_CS6879_Shoots-Roots_P Parameter: Organism Value: A. thaliana
  misc_feature: MA Experiment 20000452 PARAMETER Experiment Name: At_CS6879_Shoots-Roots_P Parameter: Plant Line Value: CS6879 vs. WS
  misc_feature: MA Experiment 20000452 PARAMETER Experiment Name: At_CS6879_Shoots-Roots_P Parameter: Tissue Value: Shoots
  misc_feature: MA Experiment ID: 20000495 Result: Down-regulated in Transcription
  misc_feature: MA Experiment 20000495 PARAMETER Experiment Name: At_Guard_Cells_P Parameter: Harvest Date Value: 8/2/2002
  misc_feature: MA Experiment 20000495 PARAMETER Experiment Name: At_Guard_Cells_P Parameter: Organism Value: A. thaliana
  misc_feature: MA Experiment 20000495 PARAMETER Experiment Name: At_Guard_Cells_P Parameter: Tissue Value: Guard Cells vs. Leaves
  misc_feature: MA Experiment ID: 20000506 Result: Down-regulated in Transcription
  misc_feature: MA Experiment 20000506 PARAMETER Experiment Name: At_Wounding_P Parameter: Organism Value: A. thaliana
  misc_feature: MA Experiment 20000506 PARAMETER Experiment Name: At_Wounding_P Parameter: Plant Line Value: WS
  misc_feature: MA Experiment 20000506 PARAMETER Experiment Name: At_Wounding_P Parameter: Timepoint (hr) Value: 6
  misc_feature: MA Experiment 20000506 PARAMETER Experiment Name: At_Wounding_P Parameter: Tissue Value: Aerial
  misc_feature: MA Experiment 20000506 PARAMETER Experiment Name: At_Wounding_P Parameter: Treatment Value: Wounding vs. No Wounding
  misc_feature: MA Experiment ID: 20000527 Result: Up-regulated in Transcription
  misc_feature: MA Experiment 20000527 PARAMETER Experiment Name: At_10percent_PEG_P Parameter: Age (day) Value: 20
  misc_feature: MA Experiment 20000527 PARAMETER Experiment Name: At_10percent_PEG_P Parameter: Organism Value: A. thaliana
  misc_feature: MA Experiment 20000527 PARAMETER Experiment Name: At_10percent_PEG_P Parameter: Plant Line Value: WS
  misc_feature: MA Experiment 20000527 PARAMETER Experiment Name: At_10percent_PEG_P Parameter: Timepoint (day) Value: 20
  misc_feature: MA Experiment 20000527 PARAMETER Experiment Name: At_10percent_PEG_P Parameter: Tissue Value: Whole Plant
  misc_feature: MA Experiment 20000527 PARAMETER Experiment Name: At_10percent_PEG_P Parameter: Treatment Value: 10percent PEG vs. No Treatment
  misc_feature: MA Experiment ID: 20000573 Result: Down-regulated in Transcription
  misc_feature: MA Experiment 20000573 PARAMETER Experiment Name: At_100uM_ABA_Mutants__P Parameter: Organism Value: A. thaliana
  misc_feature: MA Experiment 20000573 PARAMETER Experiment Name: At_100uM_ABA_Mutants__P Parameter: Plant Line Value: CS22 vs. Ler wt
  misc_feature: MA Experiment 20000573 PARAMETER Experiment Name: At_100uM_ABA_Mutants__P Parameter: Timepoint (hr) Value: N/A
  misc_feature: MA Experiment 20000573 PARAMETER Experiment Name: At_100uM_ABA_Mutants__P Parameter: Tissue Value: Whole Plant
  misc_feature: MA Experiment 20000573 PARAMETER Experiment Name: At_100uM_ABA_Mutants__P Parameter: Treatment Value: None
  misc_feature: MA Experiment ID: 20000574 Result: Down-regulated in Transcription
  misc_feature: MA Experiment 20000574 PARAMETER Experiment Name: At_100uM_ABA_Mutants__P Parameter: Organism Value: A. thaliana
  misc_feature: MA Experiment 20000574 PARAMETER Experiment Name: At_100uM_ABA_Mutants__P Parameter: Plant Line Value: CS23 vs. Ler wt
  misc_feature: MA Experiment 20000574 PARAMETER Experiment Name: At_100uM_ABA_Mutants__P Parameter: Timepoint (hr) Value: N/A
  misc_feature: MA Experiment 20000574 PARAMETER Experiment Name: At_100uM_ABA_Mutants__P Parameter: Tissue Value: Whole Plant
  misc_feature: MA Experiment 20000574 PARAMETER Experiment Name: At_100uM_ABA_Mutants__P Parameter: Treatment Value: None
  misc_feature: MA Experiment ID: 20000578 Result: Down-regulated in Transcription
  misc_feature: MA Experiment 20000578 PARAMETER Experiment Name: At_CS3726__P Parameter: Organism Value: A. thaliana
  misc_feature: MA Experiment 20000578 PARAMETER Experiment Name: At_CS3726__P Parameter: Plant Line Value: CS3726
  misc_feature: MA Experiment 20000578 PARAMETER Experiment Name: At_CS3726__P Parameter: Tissue Value: Whole Plant
  misc_feature: MA Experiment ID: 20000709 Result: Up-regulated in Transcription
  misc_feature: MA Experiment 20000709 PARAMETER Experiment Name: At_15mM_NH4NO3_L-to-H_P Parameter: Age (hr) Value: 14
  misc_feature: MA Experiment 20000709 PARAMETER Experiment Name: At_15mM_NH4NO3_L-to-H_P Parameter: Organism Value: A. thaliana
  misc_feature: MA Experiment 20000709 PARAMETER Experiment Name: At_15mM_NH4NO3_L-to-H_P Parameter: Plant Line Value: WS
  misc_feature: MA Experiment 20000709 PARAMETER Experiment Name: At_15mM_NH4NO3_L-to-H_P Parameter: Timepoint (hr) Value: 4
  misc_feature: MA Experiment 20000709 PARAMETER Experiment Name: At_15mM_NH4NO3_L-to-H_P Parameter: Tissue Value: Aerial
  misc_feature: MA Experiment 20000709 PARAMETER Experiment Name: At_15mM_NH4NO3_L-to-H_P Parameter: Treatment Value: 15mM NH4NO3 vs. 30mM Mannitol
  misc_feature: MA Experiment ID: 20000794 Result: Down-regulated in Transcription
  misc_feature: MA Experiment 20000794 PARAMETER Experiment Name: At_Petals_P Parameter: Age (day) Value: 23-25 days
  misc_feature: MA Experiment 20000794 PARAMETER Experiment Name: At_Petals_P Parameter: Plant Line Value: WS
  misc_feature: MA Experiment 20000794 PARAMETER Experiment Name: At_Petals_P Parameter: Tissue Value: Petals vs. Whole plant
  misc_feature: MA Experiment ID: 20001247 Result: Up-regulated in Transcription
  misc_feature: MA Experiment 20001247 PARAMETER Experiment Name: At_Far-red-induction_P Parameter: Age (day) Value: 7
  misc_feature: MA Experiment 20001247 PARAMETER Experiment Name: At_Far-red-induction_P Parameter: Light Value: Far-red vs. White
  misc_feature: MA Experiment 20001247 PARAMETER Experiment Name: At_Far-red-induction_P Parameter: Organism Value: A. thaliana
  misc_feature: MA Experiment 20001247 PARAMETER Experiment Name: At_Far-red-induction_P Parameter: Plant Line Value: Columbia
  misc_feature: MA Experiment 20001247 PARAMETER Experiment Name: At_Far-red-induction_P Parameter: Timepoint (hr) Value: 1
  misc_feature: MA Experiment 20001247 PARAMETER Experiment Name: At_Far-red-induction_P Parameter: Tissue Value: Whole Plant
  misc_feature: MA Experiment ID: 20001556 Result: Up-regulated in Transcription
  misc_feature: MA Experiment 20001556 PARAMETER Experiment Name: At_Drought_Soil_Dry_P Parameter: Age (day) Value: 26
  misc_feature: MA Experiment 20001556 PARAMETER Experiment Name: At_Drought_Soil_Dry_P Parameter: Organism Value: A. thaliana
  misc_feature: MA Experiment 20001556 PARAMETER Experiment Name: At_Drought_Soil_Dry_P Parameter: Plant Line Value: WS
  misc_feature: MA Experiment 20001556 PARAMETER Experiment Name: At_Drought_Soil_Dry_P Parameter: Post Timepoint (hr) Value: None
  misc_feature: MA Experiment 20001556 PARAMETER Experiment Name: At_Drought_Soil_Dry_P Parameter: Post-Treatment Value: None
  misc_feature: MA Experiment 20001556 PARAMETER Experiment Name: At_Drought_Soil_Dry_P Parameter: Timepoint (day) Value: 12
  misc_feature: MA Experiment 20001556 PARAMETER Experiment Name: At_Drought_Soil_Dry_P Parameter: Treatment Value: Drought vs. No Drought
  misc_feature: MA Experiment ID: 20001557 Result: Up-regulated in Transcription
  misc_feature: MA Experiment 20001557 PARAMETER Experiment Name: At_Drought_Soil_Dry_P Parameter: Age (day) Value: 27
  misc_feature: MA Experiment 20001557 PARAMETER Experiment Name: At_Drought_Soil_Dry_P Parameter: Organism Value: A. thaliana
  misc_feature: MA Experiment 20001557 PARAMETER Experiment Name: At_Drought_Soil_Dry_P Parameter: Plant Line Value: WS
  misc_feature: MA Experiment 20001557 PARAMETER Experiment Name: At_Drought_Soil_Dry_P Parameter: Post Timepoint (hr) Value: 3
  misc_feature: MA Experiment 20001557 PARAMETER Experiment Name: At_Drought_Soil_Dry_P Parameter: Post-Treatment Value: Re-Water vs. No Drought
  misc_feature: MA Experiment 20001557 PARAMETER Experiment Name: At_Drought_Soil_Dry_P Parameter: Timepoint (day) Value: 13
  misc_feature: MA Experiment 20001557 PARAMETER Experiment Name: At_Drought_Soil_Dry_P Parameter: Treatment Value: Drought vs. No Drought
  misc_feature: MA Experiment ID: 20001558 Result: Up-regulated in Transcription
  misc_feature: MA Experiment 20001558 PARAMETER Experiment Name: At_Drought_Soil_Dry_P Parameter: Age (day) Value: 27
  misc_feature: MA Experiment 20001558 PARAMETER Experiment Name: At_Drought_Soil_Dry_P Parameter: Organism Value: A. thaliana
  misc_feature: MA Experiment 20001558 PARAMETER Experiment Name: At_Drought_Soil_Dry_P Parameter: Plant Line Value: WS
  misc_feature: MA Experiment 20001558 PARAMETER Experiment Name: At_Drought_Soil_Dry_P Parameter: Post Timepoint (hr) Value: 6
  misc_feature: MA Experiment 20001558 PARAMETER Experiment Name: At_Drought_Soil_Dry_P Parameter: Post-Treatment Value: Re-Water vs. No Drought
  misc_feature: MA Experiment 20001558 PARAMETER Experiment Name: At_Drought_Soil_Dry_P Parameter: Timepoint (day) Value: 13
  misc_feature: MA Experiment 20001558 PARAMETER Experiment Name: At_Drought_Soil_Dry_P Parameter: Treatment Value: Drought vs. No Drought
  misc_feature: MA Experiment ID: 20001760 Result: Down-regulated in Transcription
  misc_feature: MA Experiment 20001760 PARAMETER Experiment Name: At_50mM_NH4NO3_L-to-H_P Parameter: Timepoint (hr) Value: 2
  misc_feature: MA Experiment 20001760 PARAMETER Experiment Name: At_50mM_NH4NO3_L-to-H_P Parameter: Tissue Value: Siliques
  misc_feature: MA Experiment 20001760 PARAMETER Experiment Name: At_50mM_NH4NO3_L-to-H_P Parameter: Treatment Value: 50mM NH4NO3 vs 100mM Mannitol
  misc_feature: MA Experiment ID: 20001761 Result: Down-regulated in Transcription
  misc_feature: MA Experiment 20001761 PARAMETER Experiment Name: At_50mM_NH4NO3_L-to-H_P Parameter: Timepoint (hr) Value: 4
  misc_feature: MA Experiment 20001761 PARAMETER Experiment Name: At_50mM_NH4NO3_L-to-H_P Parameter: Tissue Value: Siliques
  misc_feature: MA Experiment 20001761 PARAMETER Experiment Name: At_50mM_NH4NO3_L-to-H_P Parameter: Treatment Value: 50mM NH4NO3 vs 100mM Mannitol
  misc_feature: MA Experiment ID: 20001773 Result: Down-regulated in Transcription
  misc_feature: MA Experiment 20001773 PARAMETER Experiment Name: At_Far-red-enriched-adult_P Parameter: Age (day) Value: 30
  misc_feature: MA Experiment 20001773 PARAMETER Experiment Name: At_Far-red-enriched-adult_P Parameter: Light Value: Far-red enriched vs. White
  misc_feature: MA Experiment 20001773 PARAMETER Experiment Name: At_Far-red-enriched-adult_P Parameter: Organism Value: A. thaliana
  misc_feature: MA Experiment 20001773 PARAMETER Experiment Name: At_Far-red-enriched-adult_P Parameter: Plant Line Value: Columbia
  misc_feature: MA Experiment 20001773 PARAMETER Experiment Name: At_Far-red-enriched-adult_P Parameter: Timepoint (hr) Value: 48
  misc_feature: MA Experiment 20001773 PARAMETER Experiment Name: At_Far-red-enriched-adult_P Parameter: Tissue Value: Aerial
  misc_feature: MA Experiment ID: 20001774 Result: Down-regulated in Transcription
  misc_feature: MA Experiment 20001774 PARAMETER Experiment Name: At_Far-red-enriched-adult_P Parameter: Age (day) Value: 31
  misc_feature: MA Experiment 20001774 PARAMETER Experiment Name: At_Far-red-enriched-adult_P Parameter: Light Value: Far-red enriched vs. White
  misc_feature: MA Experiment 20001774 PARAMETER Experiment Name: At_Far-red-enriched-adult_P Parameter: Organism Value: A. thaliana
  misc_feature: MA Experiment 20001774 PARAMETER Experiment Name: At_Far-red-enriched-adult_P Parameter: Plant Line Value: Columbia
  misc_feature: MA Experiment 20001774 PARAMETER Experiment Name: At_Far-red-enriched-adult_P Parameter: Timepoint (hr) Value: 72
  misc_feature: MA Experiment 20001774 PARAMETER Experiment Name: At_Far-red-enriched-adult_P Parameter: Tissue Value: Aerial
atacctacaagacgacgagtgttcccatttccttggtctatttcaagacatggactcttctccttctactttcggattagaaggttttaatagcaacgacaataatactaatcaaaagaaacgcccaagaaaagacgacgaaggcggtggtggtggcggcggaggaacagaagttctaggagctgttaatggtaataataaggctgcttttggagatatactcgcgacgcttctgttgttagacgaggaagctaaacagcaacaagaacagtgggattttgaatttattaaagagaagtctttacttgaagctaatcataagaagaaagtgaaaacaatggatggttattacaatcaaatgcaagatcattactctgcagctggtgaaaccgatggttcgcgttcaaaacgcgcacggaaaaccgcggttgcggctgtggtttccgcggtagcttccggggcggacacaaccggtttagctgctccggttccgaccgcggatatcgctagcggttccgggtcaggaccgagtcataggaggttatgggttaaagaacgaaccacggactggtgggacagagtaagccggcctgattttccagaagacgagtttcggcgagagttccgtatgagcaaatcgacgtttaacctaatatgcgaggagctagatacgacggtgacgaagaaaaacacgatgttaagagacgcgattccagctccaaaacgcgtaggcgtttgcgtttggcgtttggcgacaggagctccgcttcgccacgtgtcggagcgtttcggtctgggaatctcaacttgccacaaactagtcatcgaagtctgccgcgcgatctacgacgttctcatgcccaagtatctcctctggccgtcggattcagagataaactcaacgaaagccaaattcgaatcggtccacaaaataccaaacgtcgtcggatcaatctacaccacacatattccgatcatcgctccgaaagtccacgtggcggcgtattttaacaagagacacacggagaggaatcagaagacgtcgtactcgataacagtacaaggagtggtcaacgccgacgggatcttcaccgacgtttgtatcggaaacccaggatctctcaccgacgatcagatcctggagaaatcttcgctttcacggcaaagagcggcgcgtgggatgttacgtgacagctggatagttggaaactctgggtttccgttgactgattatcttcttgtaccgtacacgagacagaatctgacgtggacgcagcacgcgtttaacgagagtatcggagagattcaggggattgcgacggctgcgtttgagaggctcaaaggacggtgggcttgtttgcagaaacggacggaggtgaagcttcaggatctgccgtacgtgcttggagcttgttgtgtgttgcataacatttgtgagatgaggaaggaggagatgttgccggagttgaagtttgaggtttttgatgatgtggcggtgccggagaataatatccgatctgctagtgcggttaatacgagggatcatatctctcacaatctcttgcatcgtggacttgccgggacaagaactctataggctctgtttttcaccttttcttattttgaaactgattttttattgcaaattctttttccaaattaggaataaaaacattttagggattggttggatacagaaagaatagttgaattgagagtagaagtggctgatgatattgtttgtgttacttattagcattgtgtaatctttagttcatgtattttctatacaaattgaatctgaaacct

SEQ ID NO: 103938 - protein, 531 aa, Arabidopsis thaliana
  peptide (1)..(531): Ceres Seq. ID no. 13613930
  misc_feature (1)..(531): Homolog of NCBI NO: 30688449 NR Description: expressed protein [Arabidopsis thaliana] unknown protein [Arabidopsis thaliana]
  misc_feature (17)..(531): Homolog of NCBI NO: 7452044 NR Description: hypothetical protein F27B13.20 - Arabidopsis >gi|4914402|emb|CAB43653.1| hypothetical protein [Arabidopsis >gi|7269877|emb|CAB79736.1| hypothetical protein [Arabidopsis
  misc_feature (17)..(531): Homolog of NCBI NO: 21592524 NR Description: unknown [Arabidopsis thaliana]
  misc_feature (29)..(531): Homolog of NCBI NO: 15239835 NR Description: expressed protein [Arabidopsis thaliana]
  misc_feature (4)..(528): Homolog of NCBI NO: 21902022 NR Description: B1097D05.23 [Oryza sativa (japonica
  misc_feature (128)..(524): Homolog of NCBI NO: 34906342 NR Description: unnamed protein product [Oryza sativa (japonica group)] >gi|9558493|dbj|BAB03412.1| unnamed protein product
  misc_feature (134)..(520): Homolog of NCBI NO: 15233248 NR Description: expressed protein [Arabidopsis thaliana]
  misc_feature (190)..(477): Homolog of NCBI NO: 18412695 NR Description: expressed protein [Arabidopsis thaliana] unknown protein [Arabidopsis thaliana]
  misc_feature (189)..(477): Homolog of NCBI NO: 34908114 NR Description: P0031D11.14 [Oryza sativa (japonica
  misc_feature (210)..(514): Homolog of NCBI NO: 31196431 NR Description: ENSANGP00000014572 [Anopheles gambiae]
YLQDDECSHFLGLFQDMDSSPSTFGLEGFNSNDNNTNQKKRPRKDDEGGGGGGGGTEVLGAVNGNNKAAFGDILATLLLLDEEAKQQQEQWDFEFIKEKSLLEANHKKKVKTMDGYYNQMQDHYSAAGETDGSRSKRARKTAVAAVVSAVASGADTTGLAAPVPTADIASGSGSGPSHRRLWVKERTTDWWDRVSRPDFPEDEFRREFRMSKSTFNLICEELDTTVTKKNTMLRDAIPAPKRVGVCVWRLATGAPLRHVSERFGLGISTCHKLVIEVCRAIYDVLMPKYLLWPSDSEINSTKAKFESVHKIPNVVGSIYTTHIPIIAPKVHVAAYFNKRHTERNQKTSYSITVQGVVNADGIFTDVCIGNPGSLTDDQILEKSSLSRQRAARGMLRDSWIVGNSGFPLTDYLLVPYTRQNLTWTQHAFNESIGEIQGIATAAFERLKGRWACLQKRTEVKLQDLPYVLGACCVLHNICEMRKEEMLPELKFEVFDDVAVPENNIRSASAVNTRDHISHNLLHRGLAGTRTL

SEQ ID NO: 103939 - protein, 515 aa, Arabidopsis thaliana; identical to SEQ ID NO: 36464
  peptide (1)..(515): Ceres Seq. ID no. 13613931
  misc_feature (1)..(515): Homolog of NCBI NO: 30688449 NR Description: expressed protein [Arabidopsis thaliana] unknown protein [Arabidopsis thaliana]
  misc_feature (1)..(515): Homolog of NCBI NO: 7452044 NR Description: hypothetical protein F27B13.20 - Arabidopsis >gi|4914402|emb|CAB43653.1| hypothetical protein [Arabidopsis >gi|7269877|emb|CAB79736.1| hypothetical protein [Arabidopsis
  misc_feature (1)..(515): Homolog of NCBI NO: 21592524 NR Description: unknown [Arabidopsis thaliana]
  misc_feature (13)..(515): Homolog of NCBI NO: 15239835 NR Description: expressed protein [Arabidopsis thaliana]
  misc_feature (1)..(512): Homolog of NCBI NO: 21902022 NR Description: B1097D05.23 [Oryza sativa (japonica
  misc_feature (112)..(508): Homolog of NCBI NO: 34906342 NR Description: unnamed protein product [Oryza sativa (japonica group)] >gi|9558493|dbj|BAB03412.1| unnamed protein product
  misc_feature (118)..(504): Homolog of NCBI NO: 15233248 NR Description: expressed protein [Arabidopsis thaliana]
  misc_feature (174)..(461): Homolog of NCBI NO: 18412695 NR Description: expressed protein [Arabidopsis thaliana] unknown protein [Arabidopsis thaliana]
  misc_feature (173)..(461): Homolog of NCBI NO: 34908114 NR Description: P0031D11.14 [Oryza sativa (japonica
  misc_feature (194)..(498): Homolog of NCBI NO: 31196431 NR Description: ENSANGP00000014572 [Anopheles gambiae]

SEQ ID NO: 103940 - protein, 419 aa, Arabidopsis thaliana; identical to SEQ ID NO: 36465
  peptide (1)..(419): Ceres Seq. ID no. 13613932
  misc_feature (1)..(419): Homolog of NCBI NO: 30688449 NR Description: expressed protein [Arabidopsis thaliana] unknown protein [Arabidopsis thaliana]
  misc_feature (1)..(419): Homolog of NCBI NO: 7452044 NR Description: hypothetical protein F27B13.20 - Arabidopsis >gi|4914402|emb|CAB43653.1| hypothetical protein [Arabidopsis >gi|7269877|emb|CAB79736.1| hypothetical protein [Arabidopsis
  misc_feature (1)..(419): Homolog of NCBI NO: 21592524 NR Description: unknown [Arabidopsis thaliana]
  misc_feature (1)..(419): Homolog of NCBI NO: 15239835 NR Description: expressed protein [Arabidopsis thaliana]
  misc_feature (1)..(416): Homolog of NCBI NO: 21902022 NR Description: B1097D05.23 [Oryza sativa (japonica
  misc_feature (16)..(412): Homolog of NCBI NO: 34906342 NR Description: unnamed protein product [Oryza sativa (japonica group)] >gi|9558493|dbj|BAB03412.1| unnamed protein product
  misc_feature (22)..(408): Homolog of NCBI NO: 15233248 NR Description: expressed protein [Arabidopsis thaliana]
  misc_feature (78)..(365): Homolog of NCBI NO: 18412695 NR Description: expressed protein [Arabidopsis thaliana] unknown protein [Arabidopsis thaliana]
  misc_feature (77)..(365): Homolog of NCBI NO: 34908114 NR Description: P0031D11.14 [Oryza sativa (japonica
  misc_feature (98)..(402): Homolog of NCBI NO: 31196431 NR Description: ENSANGP00000014572 [Anopheles gambiae]

SEQ ID NO: 103941 - DNA, 1102 bp, Arabidopsis thaliana
  misc_feature (1)..(1102): Ceres Seq. ID no. 13613933
  misc_feature: MA Experiment ID: 108434 Result: Up-regulated in Transcription
  misc_feature: MA Experiment 108434 PARAMETER Experiment Name: At_Root_Tips_cDNA_P Parameter: Tissue Value: Root Tips
  misc_feature: MA Experiment ID: 108435 Result: Up-regulated in Transcription
  misc_feature: MA Experiment 108435 PARAMETER Experiment Name: At_stm_Mutants_cDNA_P Parameter: Plant Line Value: wt Landsburg vs stm
  misc_feature: MA Experiment 108435 PARAMETER Experiment Name: At_stm_Mutants_cDNA_P Parameter: Tissue Value: Shoot Apical Meristem Region
  misc_feature: MA Experiment ID: 108462 Result: Down-regulated in Transcription
  misc_feature: MA Experiment 108462 PARAMETER Experiment Name: At_Germinating_Seeds_cDNA_P Parameter: Age (day) Value: 2 vs. 0
  misc_feature: MA Experiment 108462 PARAMETER Experiment Name: At_Germinating_Seeds_cDNA_P Parameter: Tissue Value: Germinating Seeds
  misc_feature: MA Experiment ID: 108463 Result: Down-regulated in Transcription
  misc_feature: MA Experiment 108463 PARAMETER Experiment Name: At_Germinating_Seeds_cDNA_P Parameter: Age (day) Value: 3 vs. 0
  misc_feature: MA Experiment 108463 PARAMETER Experiment Name: At_Germinating_Seeds_cDNA_P Parameter: Tissue Value: Germinating Seeds
  misc_feature: MA Experiment ID: 108464 Result: Down-regulated in Transcription
  misc_feature: MA Experiment 108464 PARAMETER Experiment Name: At_Germinating_Seeds_cDNA_P Parameter: Age (day) Value: 4 vs. 0
  misc_feature: MA Experiment 108464 PARAMETER Experiment Name: At_Germinating_Seeds_cDNA_P Parameter: Tissue Value: Germinating Seeds
  misc_feature: MA Experiment ID: 108573 Result: Up-regulated in Transcription
  misc_feature: MA Experiment 108573 PARAMETER Experiment Name: At_Drought_cDNA_P Parameter: Timepoint (hr) Value: 6
  misc_feature: MA Experiment 108573 PARAMETER Experiment Name: At_Drought_cDNA_P Parameter: Tissue Value: Aerial
  misc_feature: MA Experiment 108573 PARAMETER Experiment Name: At_Drought_cDNA_P Parameter: Treatment Value: Drought vs. No Drought
  misc_feature: MA Experiment ID: 20000224 Result: Down-regulated in Transcription
cacttgaggaaacacagtaaaaacctaaaaagagaatgaaactcgcaggtctgaaatcgatcgagaacgctcacgaagattccgtttgggcagcgacgtgggttccggcgacggaagatcgaccggcgttgcttctgactggatctcttgacgagacggtgaagttatggcgaccggacgagctggatcttgtgcggactaatactggacactctttgggagtagcagctttggctgcgcatccttctgggattattgcagcatcttcttcgattgatagctttgtccgtgtgtttgatgttgatactaatgctacgattgctgttttggaagctcctccttctgaggtttggggaatgcaatttgaacctaagggtacgatccttgctgttgcaggtggaagtagtgcctcagtcaagctttgggacactgcaagctggagattaatctcaactctatcaatcccacgcccagatgcaccaaaaccttccgataaaaccagcagcaagaaattcgttctctcggtggcttggtctcctaatgggaaacgacttgcttgtggttcaatggatggtacgatctgtgtttttgatgttgaccgctcaaagctacttcaccagctagaaggtcacaatatgcctgtaaggtcccttgtgttctcccctgtagacccgagagtcctcttctctggatcagatgatgggcatgtgaacatgcacgatgcagaagggaaaacgctgttggggtccatgtcagggcacacgagttgggtgctgagcgttgatgctagcccagacggtggagccatagcaaccggctcaagcgatagaactgtgaggctatgggatcttaaaatgagagctgcgattcagacaatgagcaaccacaatgaccaggtttggtctgtggcctttagaccaccaggtggaaccggtgtccgggctggtcgacttgctagtgtctctgatgacaagagtgtatcgctctatgattactcatgaacaattcggttttttgacttttttcttttatgcattctccaagacgcatctagttgtaacaatataatctgcaacaggttgattttgaccggagtctttag

SEQ ID NO: 103942 - protein, 321 aa, Arabidopsis thaliana
  peptide (1)..(321): Ceres Seq. ID no. 13613934
  misc_feature (1)..(321): Homolog of NCBI NO: 15233721 NR Description: transducin / WD-40 repeat protein family
  misc_feature (10)..(319): Homolog of NCBI NO: 38541742 NR Description: Unknown (protein for MGC:77675) [Danio rerio]
  misc_feature (10)..(319): Homolog of NCBI NO: 37590940 NR Description: Unknown (protein for MGC:75826) [Silurana
  misc_feature (10)..(319): Homolog of NCBI NO: 13376840 NR Description: recombination protein REC14 [Homo sapiens] unnamed protein product [Homo sapiens] meiotic recombination protein REC14 [Homo sapiens]
  misc_feature (10)..(319): Homolog of NCBI NO: 13277350 NR Description: meiotic recombination protein REC14 [Mus >gi|11139244|gb|AAG31640.1|AF309554_1 meiotic recombination REC14 [Mus musculus] >gi|12850275|dbj|BAB28657.1| unnamed protein
  misc_feature (10)..(319): Homolog of NCBI NO: 12849020 NR Description: unnamed protein product [Mus musculus]
  misc_feature (10)..(319): Homolog of NCBI NO: 33150742 NR Description: G protein beta subunit-like protein [Homo sapiens]
  misc_feature (10)..(287): Homolog of NCBI NO: 26345856 NR Description: unnamed protein product [Mus musculus]
  misc_feature (33)..(319): Homolog of NCBI NO: 19335618 NR Description: unknown protein [Aedes aegypti]
  misc_feature (33)..(319): Homolog of NCBI NO: 13173173 NR Description: unknown protein i8 [Aedes aegypti]
MKLAGLKSIENAHEDSVWAATWVPATEDRPALLLTGSLDETVKLWRPDELDLVRTNTGHSLGVAALAAHPSGIIAASSSIDSFVRVFDVDTNATIAVLEAPPSEVWGMQFEPKGTILAVAGGSSASVKLWDTASWRLISTLSIPRPDAPKPSDKTSSKKFVLSVAWSPNGKRLACGSMDGTICVFDVDRSKLLHQLEGHNMPVRSLVFSPVDPRVLFSGSDDGHVNMHDAEGKTLLGSMSGHTSWVLSVDASPDGGAIATGSSDRTVRLWDLKMRAAIQTMSNHNDQVWSVAFRPPGGTGVRAGRLASVSDDKSVSLYDYS

SEQ ID NO: 103943 - protein, 214 aa, Arabidopsis thaliana
  peptide (1)..(214): Ceres Seq. ID no. 13613935
  misc_feature (1)..(214): Homolog of NCBI NO: 15233721 NR Description: transducin / WD-40 repeat protein family
  misc_feature (1)..(212): Homolog of NCBI NO: 38541742 NR Description: Unknown (protein for MGC:77675) [Danio rerio]
  misc_feature (1)..(212): Homolog of NCBI NO: 37590940 NR Description: Unknown (protein for MGC:75826) [Silurana
  misc_feature (1)..(212): Homolog of NCBI NO: 13376840 NR Description: recombination protein REC14 [Homo sapiens] unnamed protein product [Homo sapiens] meiotic recombination protein REC14 [Homo sapiens]
  misc_feature (1)..(212): Homolog of NCBI NO: 13277350 NR Description: meiotic recombination protein REC14 [Mus >gi|11139244|gb|AAG31640.1|AF309554_1 meiotic recombination REC14 [Mus musculus] >gi|12850275|dbj|BAB28657.1| unnamed protein
  misc_feature (1)..(212): Homolog of NCBI NO: 12849020 NR Description: unnamed protein product [Mus musculus]
  misc_feature (1)..(212): Homolog of NCBI NO: 33150742 NR Description: G protein beta subunit-like protein [Homo sapiens]
  misc_feature (1)..(180): Homolog of NCBI NO: 26345856 NR Description: unnamed protein product [Mus musculus]
  misc_feature (1)..(212): Homolog of NCBI NO: 19335618 NR Description: unknown protein [Aedes aegypti]
  misc_feature (1)..(212): Homolog of NCBI NO: 13173173 NR Description: unknown protein i8 [Aedes aegypti]
MQFEPKGTILAVAGGSSASVKLWDTASWRLISTLSIPRPDAPKPSDKTSSKKFVLSVAWSPNGKRLACGSMDGTICVFDVDRSKLLHQLEGHNMPVRSLVFSPVDPRVLFSGSDDGHVNMHDAEGKTLLGSMSGHTSWVLSVDASPDGGAIATGSSDRTVRLWDLKMRAAIQTMSNHNDQVWSVAFRPPGGTGVRAGRLASVSDDKSVSLYDYS

SEQ ID NO: 103944 - DNA, 1322 bp, Arabidopsis thaliana
  misc_feature (1)..(1322): Ceres Seq. ID no. 13613943
  misc_feature: MA Experiment ID: 108461 Result: Up-regulated in Transcription
  misc_feature: MA Experiment 108461 PARAMETER Experiment Name: At_Germinating_Seeds_cDNA_P Parameter: Age (day) Value: 1 vs. 0
  misc_feature: MA Experiment 108461 PARAMETER Experiment Name: At_Germinating_Seeds_cDNA_P Parameter: Tissue Value: Germinating Seeds
  misc_feature: MA Experiment ID: 108463 Result: Down-regulated in Transcription
  misc_feature: MA Experiment 108463 PARAMETER Experiment Name: At_Germinating_Seeds_cDNA_P Parameter: Age (day) Value: 3 vs. 0
  misc_feature: MA Experiment 108463 PARAMETER Experiment Name: At_Germinating_Seeds_cDNA_P Parameter: Tissue Value: Germinating Seeds
  misc_feature: MA Experiment ID: 108573 Result: Up-regulated in Transcription
  misc_feature: MA Experiment 108573 PARAMETER Experiment Name: At_Drought_cDNA_P Parameter: Timepoint (hr) Value: 6
  misc_feature: MA Experiment 108573 PARAMETER Experiment Name: At_Drought_cDNA_P Parameter: Tissue Value: Aerial
  misc_feature: MA Experiment 108573 PARAMETER Experiment Name: At_Drought_cDNA_P Parameter: Treatment Value: Drought vs. No Drought
  misc_feature: MA Experiment ID: 108595 Result: Down-regulated in Transcription
  misc_feature: MA Experiment 108595 PARAMETER Experiment Name: At_Ler-pi_Ovule_cDNA_P Parameter: Plant Line Value: null
  misc_feature: MA Experiment ID: 108609 Result: Down-regulated in Transcription
  misc_feature: MA Experiment 108609 PARAMETER Experiment Name: At_100uM_ABA_cDNA_P Parameter: Timepoint (hr) Value: 24
  misc_feature: MA Experiment 108609 PARAMETER Experiment Name: At_100uM_ABA_cDNA_P Parameter: Tissue Value: Aerial
  misc_feature: MA Experiment 108609 PARAMETER Experiment Name: At_100uM_ABA_cDNA_P Parameter: Treatment Value: 100uM ABA vs. No Treatment
  misc_feature: MA Experiment ID: 108668 Result: Up-regulated in Transcription
  misc_feature: MA Experiment 108668 PARAMETER Experiment Name: At_2mM_SA_cDNA_P Parameter: Plant Line Value: WS
  misc_feature: MA Experiment 108668 PARAMETER Experiment Name: At_2mM_SA_cDNA_P Parameter: Timepoint (hr) Value: 6
  misc_feature: MA Experiment 108668 PARAMETER Experiment Name: At_2mM_SA_cDNA_P Parameter: Treatment Value: 2mM SA vs. No Treatment
  misc_feature: MA Experiment ID: 20000112 Result: Down-regulated in Transcription
  misc_feature: MA Experiment 20000112 PARAMETER Experiment Name: At_42deg_Heat_cDNA_P Parameter: Temperature (deg C) Value: 42 vs. 22
  misc_feature: MA Experiment 20000112 PARAMETER Experiment Name: At_42deg_Heat_cDNA_P Parameter: Timepoint (hr) Value: 2
  misc_feature: MA Experiment 20000112 PARAMETER Experiment Name: At_42deg_Heat_cDNA_P Parameter: Tissue Value: Aerial
  misc_feature: MA Experiment ID: 20000173 Result: Down-regulated in Transcription
  misc_feature: MA Experiment 20000173 PARAMETER Experiment Name: At_42deg_Heat_P Parameter: Age (day) Value: 14
  misc_feature: MA Experiment 20000173 PARAMETER Experiment Name: At_42deg_Heat_P Parameter: Organism Value: A. thaliana
  misc_feature: MA Experiment 20000173 PARAMETER Experiment Name: At_42deg_Heat_P Parameter: Plant Line Value: WS
  misc_feature: MA Experiment 20000173 PARAMETER Experiment Name: At_42deg_Heat_P Parameter: Temperature (deg C) Value: 42 vs. 22
  misc_feature: MA Experiment 20000173 PARAMETER Experiment Name: At_42deg_Heat_P Parameter: Timepoint (hr) Value: 6
  misc_feature: MA Experiment 20000173 PARAMETER Experiment Name: At_42deg_Heat_P Parameter: Tissue Value: Aerial
  misc_feature: MA Experiment ID: 20000180 Result: Up-regulated in Transcription
  misc_feature: MA Experiment 20000180 PARAMETER Experiment Name: At_Germinating_Seeds_P Parameter: Age (hr) Value: 24 vs. 0
  misc_feature: MA Experiment 20000180 PARAMETER Experiment Name: At_Germinating_Seeds_P Parameter: Tissue Value: Germinating Seeds
  misc_feature: MA Experiment ID: 20000182 Result: Up-regulated in Transcription
  misc_feature: MA Experiment 20000182 PARAMETER Experiment Name: At_2mM_SA_P Parameter: Age (day) Value: 14
  misc_feature: MA Experiment 20000182 PARAMETER Experiment Name: At_2mM_SA_P Parameter: Organism Value: A. thaliana
  misc_feature: MA Experiment 20000182 PARAMETER Experiment Name: At_2mM_SA_P Parameter: Plant Line Value: WS
  misc_feature: MA Experiment 20000182 PARAMETER Experiment Name: At_2mM_SA_P Parameter: Timepoint (hr) Value: 6
  misc_feature: MA Experiment 20000182 PARAMETER Experiment Name: At_2mM_SA_P Parameter: Tissue Value: Aerial
  misc_feature: MA Experiment 20000182 PARAMETER Experiment Name: At_2mM_SA_P Parameter: Treatment Value: 2mM SA vs. No Treatment
  misc_feature: MA Experiment ID: 20000184 Result: Up-regulated in Transcription
  misc_feature: MA Experiment 20000184 PARAMETER Experiment Name: At_Shoots__P Parameter: Age (day) Value: 7
  misc_feature: MA Experiment 20000184 PARAMETER Experiment Name: At_Shoots__P Parameter: Tissue Value: Shoots vs. Whole Plant
  misc_feature: MA Experiment ID: 20000185 Result: Up-regulated in Transcription
  misc_feature: MA Experiment 20000185 PARAMETER Experiment Name: At_Roots__P Parameter: Age (day) Value: 7 vs. 21
  misc_feature: MA Experiment 20000185 PARAMETER Experiment Name: At_Roots__P Parameter: Organism Value: A. thaliana
  misc_feature: MA Experiment 20000185 PARAMETER Experiment Name: At_Roots__P Parameter: Tissue Value: Roots vs. Whole Plant
  misc_feature: MA Experiment ID: 20000224 Result: Up-regulated in Transcription
  misc_feature: MA Experiment ID: 20000227 Result: Down-regulated in Transcription
  misc_feature: MA Experiment 20000227 PARAMETER Experiment Name: At_Root-Tips-vs-Tops_P Parameter: Tissue Value: Root Tips vs. Root Tops
  misc_feature: MA Experiment ID: 20000264 Result: Up-regulated in Transcription
  misc_feature: MA Experiment 20000264 PARAMETER Experiment Name: At_Open_Flower_P Parameter: Age (day) Value: 21
  misc_feature: MA Experiment 20000264 PARAMETER Experiment Name: At_Open_Flower_P Parameter: Plant Line Value: WS
  misc_feature: MA Experiment 20000264 PARAMETER Experiment Name: At_Open_Flower_P Parameter: Tissue Value: Open Flower vs. Whole Plant
  misc_feature: MA Experiment ID: 20000265 Result: Up-regulated in Transcription
  misc_feature: MA Experiment 20000265 PARAMETER Experiment Name: At_Open_Flower_P Parameter: Age (day) Value: 21
  misc_feature: MA Experiment 20000265 PARAMETER Experiment Name: At_Open_Flower_P Parameter: Plant Line Value: WS
  misc_feature: MA Experiment 20000265 PARAMETER Experiment Name: At_Open_Flower_P Parameter: Tissue Value: Closed Flower vs. Whole Plant
  misc_feature: MA Experiment ID: 20000286 Result: Up-regulated in Transcription
  misc_feature: MA Experiment 20000286 PARAMETER Experiment Name: At_Open_Flower_P Parameter: Age (day) Value: 21
  misc_feature: MA Experiment 20000286 PARAMETER Experiment Name: At_Open_Flower_P Parameter: Plant Line Value: WS
  misc_feature: MA Experiment 20000286 PARAMETER Experiment Name: At_Open_Flower_P Parameter: Tissue Value: Half Open vs. Whole Plant
  misc_feature: MA Experiment ID: 20000437 Result: Down-regulated in Transcription
  misc_feature: MA Experiment 20000437 PARAMETER Experiment Name: At_Drought_P Parameter: Age (day) Value: 8
  misc_feature: MA Experiment 20000437 PARAMETER Experiment Name: At_Drought_P Parameter: Organism Value: A. thaliana
  misc_feature: MA Experiment 20000437 PARAMETER Experiment Name: At_Drought_P Parameter: Plant Line Value: WS
  misc_feature: MA Experiment 20000437 PARAMETER Experiment Name: At_Drought_P Parameter: Timepoint (hr) Value: 24
  misc_feature: MA Experiment 20000437 PARAMETER Experiment Name: At_Drought_P Parameter: Tissue Value: Whole Plant
  misc_feature: MA Experiment 20000437 PARAMETER Experiment Name: At_Drought_P Parameter: Treatment Value: Drought vs. No Drought
  misc_feature: MA Experiment ID: 20000438 Result: Up-regulated in Transcription
  misc_feature: MA Experiment 20000438 PARAMETER Experiment Name: At_Shoots__P Parameter: Age (day) Value: 14
  misc_feature: MA Experiment 20000438 PARAMETER Experiment Name: At_Shoots__P Parameter: Tissue Value: Shoots vs. Whole Plant
  misc_feature: MA Experiment ID: 20000439 Result: Up-regulated in Transcription
  misc_feature: MA Experiment 20000439 PARAMETER Experiment Name: At_Roots__P Parameter: Age (day) Value: 14 vs. 21
  misc_feature: MA Experiment 20000439 PARAMETER Experiment Name: At_Roots__P Parameter: Organism Value: A. thaliana
  misc_feature: MA Experiment 20000439 PARAMETER Experiment Name: At_Roots__P Parameter: Tissue Value: Roots vs. Whole Plant
  misc_feature: MA Experiment ID: 20000451 Result: Up-regulated in Transcription
  misc_feature: MA Experiment 20000451 PARAMETER Experiment Name: At_CS6879_Shoots-Roots_P Parameter: Age (day) Value: 14
  misc_feature: MA Experiment 20000451 PARAMETER Experiment Name: At_CS6879_Shoots-Roots_P Parameter: Organism Value: A. thaliana
  misc_feature: MA Experiment 20000451 PARAMETER Experiment Name: At_CS6879_Shoots-Roots_P Parameter: Plant Line Value: CS6879 vs. WS
  misc_feature: MA Experiment 20000451 PARAMETER Experiment Name: At_CS6879_Shoots-Roots_P Parameter: Tissue Value: Roots
  misc_feature: MA Experiment ID: 20000453 Result: Down-regulated in Transcription
  misc_feature: MA Experiment 20000453 PARAMETER Experiment Name: At_100uM_ABA_P Parameter: Age (day) Value: 15
  misc_feature: MA Experiment 20000453 PARAMETER Experiment Name: At_100uM_ABA_P Parameter: Organism Value: A. thaliana
  misc_feature: MA Experiment 20000453 PARAMETER Experiment Name: At_100uM_ABA_P Parameter: Plant Line Value: WS
  misc_feature: MA Experiment 20000453 PARAMETER Experiment Name: At_100uM_ABA_P Parameter: Timepoint (hr) Value: 24
  misc_feature: MA Experiment 20000453 PARAMETER Experiment Name: At_100uM_ABA_P Parameter: Tissue Value: Aerial
  misc_feature: MA Experiment 20000453 PARAMETER Experiment Name: At_100uM_ABA_P Parameter: Treatment Value: 100uM ABA vs. No Treatment
  misc_feature: MA Experiment ID: 20000794 Result: Up-regulated in Transcription
  misc_feature: MA Experiment 20000794 PARAMETER Experiment Name: At_Petals_P Parameter: Age (day) Value: 23-25 days
  misc_feature: MA Experiment 20000794 PARAMETER Experiment Name: At_Petals_P Parameter: Plant Line Value: WS
  misc_feature: MA Experiment 20000794 PARAMETER Experiment Name: At_Petals_P Parameter: Tissue Value: Petals vs. Whole plant
  misc_feature: MA Experiment ID: 20001910 Result: Up-regulated in Transcription
  misc_feature: MA Experiment 20001910 PARAMETER Experiment Name: At_Drought_Reproduction_P Parameter: Age (day) Value: 37
  misc_feature: MA Experiment 20001910 PARAMETER Experiment Name: At_Drought_Reproduction_P Parameter: Organism Value: A. thaliana
  misc_feature: MA Experiment 20001910 PARAMETER Experiment Name: At_Drought_Reproduction_P Parameter: Plant Line Value: WS
  misc_feature: MA Experiment 20001910 PARAMETER Experiment Name: At_Drought_Reproduction_P Parameter: Timepoint (day) Value: 7
  misc_feature: MA Experiment 20001910 PARAMETER Experiment Name: At_Drought_Reproduction_P Parameter: Tissue Value: Flowers
  misc_feature: MA Experiment 20001910 PARAMETER Experiment Name: At_Drought_Reproduction_P Parameter: Treatment Value: Drought vs. No Drought
  misc_feature: MA Experiment ID: 20001911 Result: Up-regulated in Transcription
  misc_feature: MA Experiment 20001911 PARAMETER Experiment Name: At_Drought_Reproduction_P Parameter: Age (day) Value: 40
  misc_feature: MA Experiment 20001911 PARAMETER Experiment Name: At_Drought_Reproduction_P Parameter: Organism Value: A. thaliana
  misc_feature: MA Experiment 20001911 PARAMETER Experiment Name: At_Drought_Reproduction_P Parameter: Plant Line Value: WS
  misc_feature: MA Experiment 20001911 PARAMETER Experiment Name: At_Drought_Reproduction_P Parameter: Timepoint (day) Value: 10
  misc_feature: MA Experiment 20001911 PARAMETER Experiment Name: At_Drought_Reproduction_P Parameter: Tissue Value: Flowers
  misc_feature: MA Experiment 20001911 PARAMETER Experiment Name: At_Drought_Reproduction_P Parameter: Treatment Value: Drought vs. No Drought
aagcaaaatcccctctaaccatcagacttacaaatctagtccatataatacaataagcccacttttcttcttctctcatcaagctttttcttctctcctcatttttcgtataattcgatttgcgaaaaatggtcgagggagagtccaaggcattgtggattattttggccaccgtgtttgcagtcgcggcggtggcaccagcggtgcatggacagcaaacgccgtgttacttcgtgtttggagactctgtcttcgacaacggtaacaacaatgccttgaacaccaaggccaaggtcaactatttaccttatggtatagattactttcaaggtccaaccggtcggtttagcaacggtcggaatattccagacgttatcgctgaactagcgggtttcaataacccaattccaccatttgccggagcatcacaggcacaagctaacatcggactcaactatgcttccggtgccggcggtatccgcgaagaaaccagcgaaaatatgggtgagagaatcagtttgagacagcaagtaaacaaccacttttccgctatcataaccgcggcggtgccactgagtcggttaaggcaatgtctatacacaatcaacatcggaagcaacgattacctcaacaactacttcttgtcgcctcctactctagctcgtcgtctatttaatcctgaccagtacgctcgatctctcataagcctctaccgtatctatctgacgcaattgtacgtactaggagcgaggaatgtagcgttgttcggtatcggtaagatcggatgtacaccacggattgttgctaccctcggtggcggcactggctgcgcagaagaagtgaaccaagccgtgatcatcttcaacactaaactcaaagccctagtcacagatttcaacaacaaaccgggagctatgttcacttatgttgatctcttctctggaaatgctgaagatttcgccgctctagggattacggttggtgataggagttgctgtacggttaatccgggtgaagaactttgtgcggcgaacggaccggtttgtccagacagaaacaaattcatattctgggataacgtgcatactacggaagtgataaatactgtggtggctaacgcagcgtttaacggacctatagctagtccgttcaacatatcccagttagtgaattaaaattagggctctattccattgttaaaatggcatagtccctttatttaaaacttggtttcgtctagattgaaaccatatatcagacacatatgtaataatgatggaataatatatcagatagactgaataatgaataaaacggattga

SEQ ID NO: 103945 - protein, 348 aa, Arabidopsis thaliana; identical to SEQ ID NO: 35198
  peptide (1)..(348): Ceres Seq. ID no. 13613944
  misc_feature (34)..(332): Pfam Name: GDSL-like Lipase/Acylhydrolase Pfam Description: GDSL-like Lipase/Acylhydrolase
  misc_feature (1)..(348): Homolog of NCBI NO: 15234641 NR Description: GDSL-motif lipase/hydrolase protein [Arabidopsis
  misc_feature (1)..(348): Homolog of NCBI NO: 21554289 NR Description: putative GDSL-motif lipase/hydrolase [Arabidopsis
  misc_feature (1)..(346): Homolog of NCBI NO: 15224705 NR Description: GDSL-motif lipase/hydrolase protein [Arabidopsis
  misc_feature (6)..(346): Homolog of NCBI NO: 15224697 NR Description: GDSL-motif lipase hydrolase protein [Arabidopsis
  misc_feature (13)..(347): Homolog of NCBI NO: 15224707 NR Description: GDSL-motif lipase/hydrolase protein [Arabidopsis
  misc_feature (10)..(346): Homolog of NCBI NO: 21592417 NR Description: lipase/hydrolase, putative [Arabidopsis thaliana]
  misc_feature (10)..(346): Homolog of NCBI NO: 15220514 NR Description: GDSL-motif lipase/hydrolase protein [Arabidopsis
  misc_feature (12)..(339): Homolog of NCBI NO: 34909504 NR Description: putative GDSL-motif lipase/hydrolase-like protein
  misc_feature (8)..(346): Homolog of NCBI NO: 21594055 NR Description: lipase/hydrolase, putative [Arabidopsis thaliana]
  misc_feature (8)..(346): Homolog of NCBI NO: 15220512 NR Description: GDSL-motif lipase/hydrolase protein [Arabidopsis

SEQ ID NO: 103946 - protein, 224 aa, Arabidopsis thaliana; identical to SEQ ID NO: 35199
  peptide (1)..(224): Ceres Seq. ID no. 13613945
  misc_feature (1)..(208): Pfam Name: GDSL-like Lipase/Acylhydrolase Pfam Description: GDSL-like Lipase/Acylhydrolase
  misc_feature (1)..(224): Homolog of NCBI NO: 15234641 NR Description: GDSL-motif lipase/hydrolase protein [Arabidopsis
  misc_feature (1)..(224): Homolog of NCBI NO: 21554289 NR Description: putative GDSL-motif lipase/hydrolase [Arabidopsis
  misc_feature (1)..(222): Homolog of NCBI NO: 15224705 NR Description: GDSL-motif lipase/hydrolase protein [Arabidopsis
  misc_feature (1)..(222): Homolog of NCBI NO: 15224697 NR Description: GDSL-motif lipase hydrolase protein [Arabidopsis
  misc_feature (1)..(223): Homolog of NCBI NO: 15224707 NR Description: GDSL-motif lipase/hydrolase protein [Arabidopsis
  misc_feature (1)..(222): Homolog of NCBI NO: 21592417 NR Description: lipase/hydrolase, putative [Arabidopsis thaliana]
  misc_feature (1)..(222): Homolog of NCBI NO: 15220514 NR Description: GDSL-motif lipase/hydrolase protein [Arabidopsis
  misc_feature (1)..(215): Homolog of NCBI NO: 34909504 NR Description: putative GDSL-motif lipase/hydrolase-like protein
  misc_feature (1)..(222): Homolog of NCBI NO: 21594055 NR Description: lipase/hydrolase, putative [Arabidopsis thaliana]
  misc_feature (1)..(222): Homolog of NCBI NO: 15220512 NR Description: GDSL-motif lipase/hydrolase protein [Arabidopsis

SEQ ID NO: 103947 - DNA, 1145 bp, Arabidopsis thaliana
  misc_feature (1)..(1145): Ceres Seq. ID no. 13613946
  misc_feature: MA Experiment ID: 20000169 Result: Up-regulated in Transcription
  misc_feature: MA Experiment 20000169 PARAMETER Experiment Name: At_100uM_ABA_P Parameter: Age (day) Value: 14
  misc_feature: MA Experiment 20000169 PARAMETER Experiment Name: At_100uM_ABA_P Parameter: Organism Value: A. thaliana
  misc_feature: MA Experiment 20000169 PARAMETER Experiment Name: At_100uM_ABA_P Parameter: Plant Line Value: WS
  misc_feature: MA Experiment 20000169 PARAMETER Experiment Name: At_100uM_ABA_P Parameter: Timepoint (hr) Value: 6
  misc_feature: MA Experiment 20000169 PARAMETER Experiment Name: At_100uM_ABA_P Parameter: Tissue Value: Aerial
  misc_feature: MA Experiment 20000169 PARAMETER Experiment Name: At_100uM_ABA_P Parameter: Treatment Value: 100uM ABA vs. No Treatment
  misc_feature: MA Experiment ID: 20000179 Result: Up-regulated in Transcription
  misc_feature: MA Experiment 20000179 PARAMETER Experiment Name: At_Germinating_Seeds_P Parameter: Age (hr) Value: 6 vs. 0
  misc_feature: MA Experiment 20000179 PARAMETER Experiment Name: At_Germinating_Seeds_P Parameter: Tissue Value: Germinating Seeds
  misc_feature: MA Experiment ID: 20000180 Result: Up-regulated in Transcription
  misc_feature: MA Experiment 20000180 PARAMETER Experiment Name: At_Germinating_Seeds_P Parameter: Age (hr) Value: 24 vs. 0
  misc_feature: MA Experiment 20000180 PARAMETER Experiment Name: At_Germinating_Seeds_P Parameter: Tissue Value: Germinating Seeds
  misc_feature: MA Experiment ID: 20000184 Result: Down-regulated in Transcription
  misc_feature: MA Experiment 20000184 PARAMETER Experiment Name: At_Shoots__P Parameter: Age (day) Value: 7
  misc_feature: MA Experiment 20000184 PARAMETER Experiment Name: At_Shoots__P Parameter: Tissue Value: Shoots vs. Whole Plant
  misc_feature: MA Experiment ID: 20000185 Result: Down-regulated in Transcription
  misc_feature: MA Experiment 20000185 PARAMETER Experiment Name: At_Roots__P Parameter: Age (day) Value: 7 vs. 21
  misc_feature: MA Experiment 20000185 PARAMETER Experiment Name: At_Roots__P Parameter: Organism Value: A. thaliana
  misc_feature: MA Experiment 20000185 PARAMETER Experiment Name: At_Roots__P Parameter: Tissue Value: Roots vs. Whole Plant
  misc_feature: MA Experiment ID: 20000234 Result: Down-regulated in Transcription
  misc_feature: MA Experiment 20000234 PARAMETER Experiment Name: At_Siliques_P Parameter: Age (day) Value: 21
  misc_feature: MA Experiment 20000234 PARAMETER Experiment Name: At_Siliques_P Parameter: Organism Value: A. thaliana
  misc_feature: MA Experiment 20000234 PARAMETER Experiment Name: At_Siliques_P Parameter: Plant Line Value: WS
  misc_feature: MA Experiment 20000234 PARAMETER Experiment Name: At_Siliques_P Parameter: Tissue Value: Less Than 5mm Siliques vs. Whole Plant
  misc_feature: MA Experiment ID: 20000235 Result: Down-regulated in Transcription
  misc_feature: MA Experiment 20000235 PARAMETER Experiment Name: At_Siliques_P Parameter: Age (day) Value: 21
  misc_feature: MA Experiment 20000235 PARAMETER Experiment Name: At_Siliques_P Parameter: Organism Value: A. thaliana
  misc_feature: MA Experiment 20000235 PARAMETER Experiment Name: At_Siliques_P Parameter: Plant Line Value: WS
  misc_feature: MA Experiment 20000235 PARAMETER Experiment Name: At_Siliques_P Parameter: Tissue Value: 5-10mm Siliques vs. Whole Plant
  misc_feature: MA Experiment ID: 20000264 Result: Up-regulated in Transcription
  misc_feature: MA Experiment 20000264 PARAMETER Experiment Name: At_Open_Flower_P Parameter: Age (day) Value: 21
  misc_feature: MA Experiment 20000264 PARAMETER Experiment Name: At_Open_Flower_P Parameter: Plant Line Value: WS
  misc_feature: MA Experiment 20000264 PARAMETER Experiment Name: At_Open_Flower_P Parameter: Tissue Value: Open Flower vs. Whole Plant
  misc_feature: MA Experiment ID: 20000265 Result: Down-regulated in Transcription
  misc_feature: MA Experiment 20000265 PARAMETER Experiment Name: At_Open_Flower_P Parameter: Age (day) Value: 21
  misc_feature: MA Experiment 20000265 PARAMETER Experiment Name: At_Open_Flower_P Parameter: Plant Line Value: WS
  misc_feature: MA Experiment 20000265 PARAMETER Experiment Name: At_Open_Flower_P Parameter: Tissue Value: Closed Flower vs. Whole Plant
  misc_feature: MA Experiment ID: 20000268 Result: Down-regulated in Transcription
  misc_feature: MA Experiment 20000268 PARAMETER Experiment Name: At_100mM_NaCl__P Parameter: Age (day) Value: 14
  misc_feature: MA Experiment 20000268 PARAMETER Experiment Name: At_100mM_NaCl__P Parameter: Organism Value: A. thaliana
  misc_feature: MA Experiment 20000268 PARAMETER Experiment Name: At_100mM_NaCl__P Parameter: Plant Line Value: WS
  misc_feature: MA Experiment 20000268 PARAMETER Experiment Name: At_100mM_NaCl__P Parameter: Timepoint (hr) Value: 6
  misc_feature: MA Experiment 20000268 PARAMETER Experiment Name: At_100mM_NaCl__P Parameter: Tissue Value: Whole Plant
  misc_feature: MA Experiment 20000268 PARAMETER Experiment Name: At_100mM_NaCl__P Parameter: Treatment Value: 100mM NaCl vs. No Treatment
  misc_feature: MA Experiment ID: 20000286 Result: Down-regulated in Transcription
  misc_feature: MA Experiment 20000286 PARAMETER Experiment Name: At_Open_Flower_P Parameter: Age (day) Value: 21
  misc_feature: MA Experiment 20000286 PARAMETER Experiment Name: At_Open_Flower_P Parameter: Plant Line Value: WS
  misc_feature: MA Experiment 20000286 PARAMETER Experiment Name: At_Open_Flower_P Parameter: Tissue Value: Half Open vs. Whole Plant
  misc_feature: MA Experiment ID: 20000436 Result: Down-regulated in Transcription
  misc_feature: MA Experiment 20000436 PARAMETER Experiment Name: At_Drought_P Parameter: Age (day) Value: 7
  misc_feature: MA Experiment 20000436 PARAMETER Experiment Name: At_Drought_P Parameter: Organism Value: A. thaliana
  misc_feature: MA Experiment 20000436 PARAMETER Experiment Name: At_Drought_P Parameter: Plant Line Value: WS
  misc_feature: MA Experiment 20000436 PARAMETER Experiment Name: At_Drought_P Parameter: Timepoint (hr) Value: 12
  misc_feature: MA Experiment 20000436 PARAMETER Experiment Name: At_Drought_P Parameter: Tissue Value: Whole Plant
  misc_feature: MA Experiment 20000436 PARAMETER Experiment Name: At_Drought_P Parameter: Treatment Value: Drought vs. No Drought
  misc_feature: MA Experiment ID: 20000437 Result: Down-regulated in Transcription
  misc_feature: MA Experiment 20000437 PARAMETER Experiment Name: At_Drought_P Parameter: Age (day) Value: 8
  misc_feature: MA Experiment 20000437 PARAMETER Experiment Name: At_Drought_P Parameter: Organism Value: A. thaliana
  misc_feature: MA Experiment 20000437 PARAMETER Experiment Name: At_Drought_P Parameter: Plant Line Value: WS
  misc_feature: MA Experiment 20000437 PARAMETER Experiment Name: At_Drought_P Parameter: Timepoint (hr) Value: 24
  misc_feature: MA Experiment 20000437 PARAMETER Experiment Name: At_Drought_P Parameter: Tissue Value: Whole Plant
  misc_feature: MA Experiment 20000437 PARAMETER Experiment Name: At_Drought_P Parameter: Treatment Value: Drought vs. No Drought
  misc_feature: MA Experiment ID: 20000438 Result: Down-regulated in Transcription
  misc_feature: MA Experiment 20000438 PARAMETER Experiment Name: At_Shoots__P Parameter: Age (day) Value: 14
  misc_feature: MA Experiment 20000438 PARAMETER Experiment Name: At_Shoots__P Parameter: Tissue Value: Shoots vs. Whole Plant
  misc_feature: MA Experiment ID: 20000441 Result: Up-regulated in Transcription
  misc_feature: MA Experiment 20000441 PARAMETER Experiment Name: At_1uM_BR-BRZ__P Parameter: Tissue Value: Shoot Apices
  misc_feature: MA Experiment 20000441 PARAMETER Experiment Name: At_1uM_BR-BRZ__P Parameter: Treatment Value: 1uM BR vs. No Treatment
  misc_feature: MA Experiment ID: 20000443 Result: Up-regulated in Transcription
  misc_feature: MA Experiment 20000443 PARAMETER Experiment Name: At_1uM_BR-BRZ__P Parameter: Tissue Value: Shoot Apices
  misc_feature: MA Experiment 20000443 PARAMETER Experiment Name: At_1uM_BR-BRZ__P Parameter: Treatment Value: 1uM BRZ vs. No Treatment
  misc_feature: MA Experiment ID: 20000453 Result: Up-regulated in Transcription
  misc_feature: MA Experiment 20000453 PARAMETER Experiment Name: At_100uM_ABA_P Parameter: Age (day) Value: 15
  misc_feature: MA Experiment 20000453 PARAMETER Experiment Name: At_100uM_ABA_P Parameter: Organism Value: A. thaliana
  misc_feature: MA Experiment 20000453 PARAMETER Experiment Name: At_100uM_ABA_P Parameter: Plant Line Value: WS
  misc_feature: MA Experiment 20000453 PARAMETER Experiment Name: At_100uM_ABA_P Parameter: Timepoint (hr) Value: 24
  misc_feature: MA Experiment 20000453 PARAMETER Experiment Name: At_100uM_ABA_P Parameter: Tissue Value: Aerial
  misc_feature: MA Experiment 20000453 PARAMETER Experiment Name: At_100uM_ABA_P Parameter: Treatment Value: 100uM ABA vs. No Treatment
  misc_feature: MA Experiment ID: 20000495 Result: Down-regulated in Transcription
  misc_feature: MA Experiment 20000495 PARAMETER Experiment Name: At_Guard_Cells_P Parameter: Harvest Date Value: 8/2/2002
  misc_feature: MA Experiment 20000495 PARAMETER Experiment Name: At_Guard_Cells_P Parameter: Organism Value: A. thaliana
  misc_feature: MA Experiment 20000495 PARAMETER Experiment Name: At_Guard_Cells_P Parameter: Tissue Value: Guard Cells vs. Leaves
  misc_feature: MA Experiment ID: 20000573 Result: Up-regulated in Transcription
  misc_feature: MA Experiment 20000573 PARAMETER Experiment Name: At_100uM_ABA_Mutants__P Parameter: Organism Value: A. thaliana
  misc_feature: MA Experiment 20000573 PARAMETER Experiment Name: At_100uM_ABA_Mutants__P Parameter: Plant Line Value: CS22 vs. Ler wt
  misc_feature: MA Experiment 20000573 PARAMETER Experiment Name: At_100uM_ABA_Mutants__P Parameter: Timepoint (hr) Value: N/A
  misc_feature: MA Experiment 20000573 PARAMETER Experiment Name: At_100uM_ABA_Mutants__P Parameter: Tissue Value: Whole Plant
  misc_feature: MA Experiment 20000573 PARAMETER Experiment Name: At_100uM_ABA_Mutants__P Parameter: Treatment Value: None
  misc_feature: MA Experiment ID: 20000574 Result: Up-regulated in Transcription
  misc_feature: MA Experiment 20000574 PARAMETER Experiment Name: At_100uM_ABA_Mutants__P Parameter: Organism Value: A. thaliana
  misc_feature: MA Experiment 20000574 PARAMETER Experiment Name: At_100uM_ABA_Mutants__P Parameter: Plant Line Value: CS23 vs. Ler wt
  misc_feature: MA Experiment 20000574 PARAMETER Experiment Name: At_100uM_ABA_Mutants__P Parameter: Timepoint (hr) Value: N/A
  misc_feature: MA Experiment 20000574 PARAMETER Experiment Name: At_100uM_ABA_Mutants__P Parameter: Tissue Value: Whole Plant
  misc_feature: MA Experiment 20000574 PARAMETER Experiment Name: At_100uM_ABA_Mutants__P Parameter: Treatment Value: None
  misc_feature: MA Experiment ID: 20000794 Result: Up-regulated in Transcription
  misc_feature: MA Experiment 20000794 PARAMETER Experiment Name: At_Petals_P Parameter: Age (day) Value: 23-25 days
  misc_feature: MA Experiment 20000794 PARAMETER Experiment Name: At_Petals_P Parameter: Plant Line Value: WS
  misc_feature: MA Experiment 20000794 PARAMETER Experiment Name: At_Petals_P Parameter: Tissue Value: Petals vs. Whole plant
  misc_feature: MA Experiment ID: 20001248 Result: Up-regulated in Transcription
  misc_feature: MA Experiment 20001248 PARAMETER Experiment Name: At_Far-red-induction_P Parameter: Age (day) Value: 7
  misc_feature: MA Experiment 20001248 PARAMETER Experiment Name: At_Far-red-induction_P Parameter: Light Value: Far-red vs. White
  misc_feature: MA Experiment 20001248 PARAMETER Experiment Name: At_Far-red-induction_P Parameter: Organism Value: A. thaliana
  misc_feature: MA Experiment 20001248 PARAMETER Experiment Name: At_Far-red-induction_P Parameter: Plant Line Value: Columbia
  misc_feature: MA Experiment 20001248 PARAMETER Experiment Name: At_Far-red-induction_P Parameter: Timepoint (hr) Value: 4
  misc_feature: MA Experiment 20001248 PARAMETER Experiment Name: At_Far-red-induction_P Parameter: Tissue Value: Whole Plant
  misc_feature: MA Experiment ID: 20001450 Result: Up-regulated in Transcription
  misc_feature: MA Experiment 20001450 PARAMETER Experiment Name: At_Far-red-induction_P Parameter: Age (day) Value: 7
  misc_feature: MA Experiment 20001450 PARAMETER Experiment Name: At_Far-red-induction_P Parameter: Light Value: Far-red vs. White
  misc_feature: MA Experiment 20001450 PARAMETER Experiment Name: At_Far-red-induction_P Parameter: Organism Value: A. thaliana
  misc_feature: MA Experiment 20001450 PARAMETER Experiment Name: At_Far-red-induction_P Parameter: Plant Line Value: Columbia
  misc_feature: MA Experiment 20001450 PARAMETER Experiment Name: At_Far-red-induction_P Parameter: Timepoint (hr) Value: 8
  misc_feature: MA Experiment 20001450 PARAMETER Experiment Name: At_Far-red-induction_P Parameter: Tissue Value: Whole Plant
  misc_feature: MA Experiment ID: 20001451 Result: Up-regulated in Transcription
  misc_feature: MA Experiment 20001451 PARAMETER Experiment Name: At_Far-red-induction_P Parameter: Age (day) Value: 7
  misc_feature: MA Experiment 20001451 PARAMETER Experiment Name: At_Far-red-induction_P Parameter: Light Value: Far-red vs. White
  misc_feature: MA Experiment 20001451 PARAMETER Experiment Name: At_Far-red-induction_P Parameter: Organism Value: A. thaliana
  misc_feature: MA Experiment 20001451 PARAMETER Experiment Name: At_Far-red-induction_P Parameter: Plant Line Value: Columbia
  misc_feature: MA Experiment 20001451 PARAMETER Experiment Name: At_Far-red-induction_P Parameter: Timepoint (hr) Value: 24
  misc_feature: MA Experiment 20001451 PARAMETER Experiment Name: At_Far-red-induction_P Parameter: Tissue Value: Whole Plant
  misc_feature: MA Experiment ID: 20001554 Result: Down-regulated in Transcription
  misc_feature: MA Experiment 20001554 PARAMETER Experiment Name: At_Drought_Soil_Dry_P Parameter: Age (day) Value: 21
  misc_feature: MA Experiment 20001554 PARAMETER Experiment Name: At_Drought_Soil_Dry_P Parameter: Organism Value: A. thaliana
  misc_feature: MA Experiment 20001554 PARAMETER Experiment Name: At_Drought_Soil_Dry_P Parameter: Plant Line Value: WS
  misc_feature: MA Experiment 20001554 PARAMETER Experiment Name: At_Drought_Soil_Dry_P Parameter: Post Timepoint (hr) Value: None
  misc_feature: MA Experiment 20001554 PARAMETER Experiment Name: At_Drought_Soil_Dry_P Parameter: Post-Treatment Value: None
  misc_feature: MA Experiment 20001554 PARAMETER Experiment Name: At_Drought_Soil_Dry_P Parameter: Timepoint (day) Value: 7
  misc_feature: MA Experiment 20001554 PARAMETER Experiment Name: At_Drought_Soil_Dry_P Parameter: Treatment Value: Drought vs. No Drought
  misc_feature: MA Experiment ID: 20001555 Result: Down-regulated in Transcription
  misc_feature: MA Experiment 20001555 PARAMETER Experiment Name: At_Drought_Soil_Dry_P Parameter: Age (day) Value: 24
  misc_feature: MA Experiment 20001555 PARAMETER Experiment Name: At_Drought_Soil_Dry_P Parameter: Organism Value: A. thaliana
  misc_feature: MA Experiment 20001555 PARAMETER Experiment Name: At_Drought_Soil_Dry_P Parameter: Plant Line Value: WS
  misc_feature: MA Experiment 20001555 PARAMETER Experiment Name: At_Drought_Soil_Dry_P Parameter: Post Timepoint (hr) Value: None
  misc_feature: MA Experiment 20001555 PARAMETER Experiment Name: At_Drought_Soil_Dry_P Parameter: Post-Treatment Value: None
  misc_feature: MA Experiment 20001555 PARAMETER Experiment Name: At_Drought_Soil_Dry_P Parameter: Timepoint (day) Value: 10
  misc_feature: MA Experiment 20001555 PARAMETER Experiment Name: At_Drought_Soil_Dry_P Parameter: Treatment Value: Drought vs. No Drought
  misc_feature: MA Experiment ID: 20001556 Result: Down-regulated in Transcription
  misc_feature: MA Experiment 20001556 PARAMETER Experiment Name: At_Drought_Soil_Dry_P Parameter: Age (day) Value: 26
  misc_feature: MA Experiment 20001556 PARAMETER Experiment Name: At_Drought_Soil_Dry_P Parameter: Organism Value: A. thaliana
  misc_feature: MA Experiment 20001556 PARAMETER Experiment Name: At_Drought_Soil_Dry_P Parameter: Plant Line Value: WS
  misc_feature: MA Experiment 20001556 PARAMETER Experiment Name: At_Drought_Soil_Dry_P Parameter: Post Timepoint (hr) Value: None
  misc_feature: MA Experiment 20001556 PARAMETER Experiment Name: At_Drought_Soil_Dry_P Parameter: Post-Treatment Value: None
  misc_feature: MA Experiment 20001556 PARAMETER Experiment Name: At_Drought_Soil_Dry_P Parameter: Timepoint (day) Value: 12
  misc_feature: MA Experiment 20001556 PARAMETER Experiment Name: At_Drought_Soil_Dry_P Parameter: Treatment Value: Drought vs. No Drought
  misc_feature: MA Experiment ID: 20001557 Result: Down-regulated in Transcription
  misc_feature: MA Experiment 20001557 PARAMETER Experiment Name: At_Drought_Soil_Dry_P Parameter: Age (day) Value: 27
  misc_feature: MA Experiment 20001557 PARAMETER Experiment Name: At_Drought_Soil_Dry_P Parameter: Organism Value: A. thaliana
  misc_feature: MA Experiment 20001557 PARAMETER Experiment Name: At_Drought_Soil_Dry_P Parameter: Plant Line Value: WS
  misc_feature: MA Experiment 20001557 PARAMETER Experiment Name: At_Drought_Soil_Dry_P Parameter: Post Timepoint (hr) Value: 3
  misc_feature: MA Experiment 20001557 PARAMETER Experiment Name: At_Drought_Soil_Dry_P Parameter: Post-Treatment Value: Re-Water vs. No Drought
  misc_feature: MA Experiment 20001557 PARAMETER Experiment Name: At_Drought_Soil_Dry_P Parameter: Timepoint (day) Value: 13
  misc_feature: MA Experiment 20001557 PARAMETER Experiment Name: At_Drought_Soil_Dry_P Parameter: Treatment Value: Drought vs. No Drought
  misc_feature: MA Experiment ID: 20001559 Result: Down-regulated in Transcription
  misc_feature: MA Experiment 20001559 PARAMETER Experiment Name: At_Drought_Soil_Dry_P Parameter: Age (day) Value: 28
  misc_feature: MA Experiment 20001559 PARAMETER Experiment Name: At_Drought_Soil_Dry_P Parameter: Organism Value: A. thaliana
  misc_feature: MA Experiment 20001559 PARAMETER Experiment Name: At_Drought_Soil_Dry_P Parameter: Plant Line Value: WS
  misc_feature: MA Experiment 20001559 PARAMETER Experiment Name: At_Drought_Soil_Dry_P Parameter: Post Timepoint (hr) Value: 29
  misc_feature: MA Experiment 20001559 PARAMETER Experiment Name: At_Drought_Soil_Dry_P Parameter: Post-Treatment Value: Re-Water vs. No Drought
  misc_feature: MA Experiment 20001559 PARAMETER Experiment Name: At_Drought_Soil_Dry_P Parameter: Timepoint (day) Value: 14
  misc_feature: MA Experiment 20001559 PARAMETER Experiment Name: At_Drought_Soil_Dry_P Parameter: Treatment Value: Drought vs. No Drought
  misc_feature: MA Experiment ID: 20001904 Result: Down-regulated in Transcription
  misc_feature: MA Experiment 20001904 PARAMETER Experiment Name: At_Drought_Reproduction_P Parameter: Age (day) Value: 37
  misc_feature: MA Experiment 20001904 PARAMETER Experiment Name: At_Drought_Reproduction_P Parameter: Organism Value: A. thaliana
  misc_feature: MA Experiment 20001904 PARAMETER Experiment Name: At_Drought_Reproduction_P Parameter: Plant Line Value: WS
  misc_feature: MA Experiment 20001904 PARAMETER Experiment Name: At_Drought_Reproduction_P Parameter: Timepoint (day) Value: 7
  misc_feature: MA Experiment 20001904 PARAMETER Experiment Name: At_Drought_Reproduction_P Parameter: Tissue Value: Rosettes
  misc_feature: MA Experiment 20001904 PARAMETER Experiment Name: At_Drought_Reproduction_P Parameter: Treatment Value: Drought vs. No Drought
  misc_feature: MA Experiment ID: 20001905 Result: Down-regulated in Transcription
  misc_feature: MA Experiment 20001905 PARAMETER Experiment Name: At_Drought_Reproduction_P Parameter: Age (day) Value: 40
  misc_feature: MA Experiment 20001905 PARAMETER Experiment Name: At_Drought_Reproduction_P Parameter: Organism Value: A. thaliana
  misc_feature: MA Experiment 20001905 PARAMETER Experiment Name: At_Drought_Reproduction_P Parameter: Plant Line Value: WS
  misc_feature: MA Experiment 20001905 PARAMETER Experiment Name: At_Drought_Reproduction_P Parameter: Timepoint (day) Value: 10
  misc_feature: MA Experiment 20001905 PARAMETER Experiment Name: At_Drought_Reproduction_P Parameter: Tissue Value: Rosettes
  misc_feature: MA Experiment 20001905 PARAMETER Experiment Name: At_Drought_Reproduction_P Parameter: Treatment Value: Drought vs. No Drought
  misc_feature: MA Experiment ID: 20001906 Result: Down-regulated in Transcription
  misc_feature: MA Experiment 20001906 PARAMETER Experiment Name: At_Drought_Reproduction_P Parameter: Age (day) Value: 35
  misc_feature: MA Experiment 20001906 PARAMETER Experiment Name: At_Drought_Reproduction_P Parameter: Organism Value: A. thaliana
  misc_feature: MA Experiment 20001906 PARAMETER Experiment Name: At_Drought_Reproduction_P Parameter: Plant Line Value: WS
  misc_feature: MA Experiment 20001906 PARAMETER Experiment Name: At_Drought_Reproduction_P Parameter: Timepoint (day) Value: 5
  misc_feature: MA Experiment 20001906 PARAMETER Experiment Name: At_Drought_Reproduction_P Parameter: Tissue Value: Siliques
  misc_feature: MA Experiment 20001906 PARAMETER Experiment Name: At_Drought_Reproduction_P Parameter: Treatment Value: Drought vs. No Drought
  misc_feature: MA Experiment ID: 20001907 Result: Down-regulated in Transcription
  misc_feature: MA Experiment 20001907 PARAMETER Experiment Name: At_Drought_Reproduction_P Parameter: Age (day) Value: 37
  misc_feature: MA Experiment 20001907 PARAMETER Experiment Name: At_Drought_Reproduction_P Parameter: Organism Value: A. thaliana
  misc_feature: MA Experiment 20001907 PARAMETER Experiment Name: At_Drought_Reproduction_P Parameter: Plant Line Value: WS
  misc_feature: MA Experiment 20001907 PARAMETER Experiment Name: At_Drought_Reproduction_P Parameter: Timepoint (day) Value: 7
  misc_feature: MA Experiment 20001907 PARAMETER Experiment Name: At_Drought_Reproduction_P Parameter: Tissue Value: Siliques
  misc_feature: MA Experiment 20001907 PARAMETER Experiment Name: At_Drought_Reproduction_P Parameter: Treatment Value: Drought vs. No Drought
  misc_feature: MA Experiment ID: 20001908 Result: Down-regulated in Transcription
  misc_feature: MA Experiment 20001908 PARAMETER Experiment Name: At_Drought_Reproduction_P Parameter: Age (day) Value: 40
  misc_feature: MA Experiment 20001908 PARAMETER Experiment Name: At_Drought_Reproduction_P Parameter: Organism Value: A. thaliana
  misc_feature: MA Experiment 20001908 PARAMETER Experiment Name: At_Drought_Reproduction_P Parameter: Plant Line Value: WS
  misc_feature: MA Experiment 20001908 PARAMETER Experiment Name: At_Drought_Reproduction_P Parameter: Timepoint (day) Value: 10
  misc_feature: MA Experiment 20001908 PARAMETER Experiment Name: At_Drought_Reproduction_P Parameter: Tissue Value: Siliques
  misc_feature: MA Experiment 20001908 PARAMETER Experiment Name: At_Drought_Reproduction_P Parameter: Treatment Value: Drought vs. No Drought
  misc_feature: MA Experiment ID: 20001910 Result: Down-regulated in Transcription
  misc_feature: MA Experiment 20001910 PARAMETER Experiment Name: At_Drought_Reproduction_P Parameter: Age (day) Value: 37
  misc_feature: MA Experiment 20001910 PARAMETER Experiment Name: At_Drought_Reproduction_P Parameter: Organism Value: A. thaliana
  misc_feature: MA Experiment 20001910 PARAMETER Experiment Name: At_Drought_Reproduction_P Parameter: Plant Line Value: WS
  misc_feature: MA Experiment 20001910 PARAMETER Experiment Name: At_Drought_Reproduction_P Parameter: Timepoint (day) Value: 7
  misc_feature: MA Experiment 20001910 PARAMETER Experiment Name: At_Drought_Reproduction_P Parameter: Tissue Value: Flowers
  misc_feature: MA Experiment 20001910 PARAMETER Experiment Name: At_Drought_Reproduction_P Parameter: Treatment Value: Drought vs. No Drought
  misc_feature: MA Experiment ID: 20001911 Result: Down-regulated in Transcription
  misc_feature: MA Experiment 20001911 PARAMETER Experiment Name: At_Drought_Reproduction_P Parameter: Age (day) Value: 40
  misc_feature: MA Experiment 20001911 PARAMETER Experiment Name: At_Drought_Reproduction_P Parameter: Organism Value: A. thaliana
  misc_feature: MA Experiment 20001911 PARAMETER Experiment Name: At_Drought_Reproduction_P Parameter: Plant Line Value: WS
  misc_feature: MA Experiment 20001911 PARAMETER Experiment Name: At_Drought_Reproduction_P Parameter: Timepoint (day) Value: 10
  misc_feature: MA Experiment 20001911 PARAMETER Experiment Name: At_Drought_Reproduction_P Parameter: Tissue Value: Flowers
  misc_feature: MA Experiment 20001911 PARAMETER Experiment Name: At_Drought_Reproduction_P Parameter: Treatment Value: Drought vs. No Drought
atatctctcccccttcttctctcttcctcacattcctcaccaaaccctctccaaaacacacccacacgtacgcacacacacaaagacaatgtctcctttcaaaatattcttcttcacgactcttctcgtggcggcgttttcagtgtcggctgctgatttcaacactgacgtcaacgtagcttggggaaatggccgtgggaagatactcaacaacggccagcttcttactctctccttagacaaatcctctggttccggttttcaatccaaaacagagtatttgtttggaaagattgatatgcagattaagcttgttcctggtaactctgcaggaacagtcacaactttttacctaaaatccgaaggatccacttgggatgagattgattttgagttcttgggtaatatgagtggagatccttatactttacacactaatgtttacactcaaggtaaaggtgacaaagagcaacaattccatctctggttcgacccaaccgccaatttccacacttactcaatcctctggaaccctcaaagaatcatattgaccgtcgatgacacacccattagagagtttaaaaactatgagtctctcggtgtcttgtttccaaagaacaagccgatgaggatgtacgcgagtttatggaacgcagacgattgggcaacaagaggcggtcttgttaaaactgattggtctaaagctccattcatggcttcttacagaaacattaagattgactcgaaaccaaactccaattggtacactcaagaaatggattcaacaagccaagctagactcaaatgggttcagaagaattacatgatctacaattattgtactgaccataggaggtttccacagggagctcctaaggaatgcacaacaagctcatagaatctcaaattatattctatttatttatctacacttcctctctttcttttatgtgaaaattgtgaatgctctgtttatagcttgtctattatgtccgagaatttctttttctgtttttgattcttttcgttgtatatctttgtccaataaaggaaatgatgtgtctttactcttatagatatgtataaaaagatgtccctgttttatttgttaaaaaaaattgtttatgataatgatagttctttct

SEQ ID NO: 103948 - protein, 298 aa, Arabidopsis thaliana
  peptide (1)..(298): Ceres Seq. ID no. 13613947
  misc_feature (53)..(234): Pfam Name: Glycosyl hydrolases family 16 Pfam Description: Glycosyl hydrolases family 16
  misc_feature (30)..(298): Homolog of NCBI NO: 15234678 NR Description: xyloglucan endotransglycosylase (meri5B)
  misc_feature (30)..(298): Homolog of NCBI NO: 21553999 NR Description: xyloglucan endo-1,4-beta-D-glucanase precursor
  misc_feature (38)..(253): Homolog of NCBI NO: 15242781 NR Description: xyloglucan endotransglycosylase (TCH4)
  misc_feature (232)..(294): Homolog of NCBI NO: 15242781 NR Description: xyloglucan endotransglycosylase (TCH4)
  misc_feature (38)..(294): Homolog of NCBI NO: 29500891 NR Description: putative xyloglucan endotransglycosylase [Cucumis >gi|29500899|emb|CAD87533.1| putative xyloglucan
  misc_feature (31)..(243): Homolog of NCBI NO: 29500893 NR Description: putative xyloglucan endotransglycosylase [Cucumis >gi|29500901|emb|CAD87534.1| putative xyloglucan
  misc_feature (254)..(294): Homolog of NCBI NO: 29500893 NR Description: putative xyloglucan endotransglycosylase [Cucumis >gi|29500901|emb|CAD87534.1| putative xyloglucan
YLSPFFSLPHIPHQTLSKTHPHVRTHTKTMSPFKIFFFTTLLVAAFSVSAADFNTDVNVAWGNGRGKILNNGQLLTLSLDKSSGSGFQSKTEYLFGKIDMQIKLVPGNSAGTVTTFYLKSEGSTWDEIDFEFLGNMSGDPYTLHTNVYTQGKGDKEQQFHLWFDPTANFHTYSILWNPQRIILTVDDTPIREFKNYESLGVLFPKNKPMRMYASLWNADDWATRGGLVKTDWSKAPFMASYRNIKIDSKPNSNWYTQEMDSTSQARLKWVQKNYMIYNYCTDHRRFPQGAPKECTTSS

SEQ ID NO: 103949 - protein, 269 aa, Arabidopsis thaliana; identical to SEQ ID NO: 21034
  peptide (1)..(269): Ceres Seq. ID no. 13613948
  misc_feature (24)..(205): Pfam Name: Glycosyl hydrolases family 16 Pfam Description: Glycosyl hydrolases family 16
  misc_feature (1)..(269): Homolog of NCBI NO: 15234678 NR Description: xyloglucan endotransglycosylase (meri5B)
  misc_feature (1)..(269): Homolog of NCBI NO: 21553999 NR Description: xyloglucan endo-1,4-beta-D-glucanase precursor
  misc_feature (9)..(224): Homolog of NCBI NO: 15242781 NR Description: xyloglucan endotransglycosylase (TCH4)
  misc_feature (203)..(265): Homolog of NCBI NO: 15242781 NR Description: xyloglucan endotransglycosylase (TCH4)
  misc_feature (9)..(265): Homolog of NCBI NO: 29500891 NR Description: putative xyloglucan endotransglycosylase [Cucumis >gi|29500899|emb|CAD87533.1| putative xyloglucan
  misc_feature (2)..(214): Homolog of NCBI NO: 29500893 NR Description: putative xyloglucan endotransglycosylase [Cucumis >gi|29500901|emb|CAD87534.1| putative xyloglucan
  misc_feature (225)..(265): Homolog of NCBI NO: 29500893 NR Description: putative xyloglucan endotransglycosylase [Cucumis >gi|29500901|emb|CAD87534.1| putative xyloglucan

SEQ ID NO: 103950 - protein, 199 aa, Arabidopsis thaliana; identical to SEQ ID NO: 21035
  peptide (1)..(199): Ceres Seq. ID no. 13613949
  misc_feature (1)..(135): Pfam Name: Glycosyl hydrolases family 16 Pfam Description: Glycosyl hydrolases family 16
  misc_feature (1)..(199): Homolog of NCBI NO: 15234678 NR Description: xyloglucan endotransglycosylase (meri5B)
  misc_feature (1)..(199): Homolog of NCBI NO: 21553999 NR Description: xyloglucan endo-1,4-beta-D-glucanase precursor
  misc_feature (1)..(154): Homolog of NCBI NO: 15242781 NR Description: xyloglucan endotransglycosylase (TCH4)
  misc_feature (133)..(195): Homolog of NCBI NO: 15242781 NR Description: xyloglucan endotransglycosylase (TCH4)
  misc_feature (1)..(195): Homolog of NCBI NO: 29500891 NR Description: putative xyloglucan endotransglycosylase [Cucumis >gi|29500899|emb|CAD87533.1| putative xyloglucan
  misc_feature (1)..(144): Homolog of NCBI NO: 29500893 NR Description: putative xyloglucan endotransglycosylase [Cucumis >gi|29500901|emb|CAD87534.1| putative xyloglucan
  misc_feature (155)..(195): Homolog of NCBI NO: 29500893 NR Description: putative xyloglucan endotransglycosylase [Cucumis >gi|29500901|emb|CAD87534.1| putative xyloglucan

SEQ ID NO: 103951 - DNA, 1124 bp, Arabidopsis thaliana
  misc_feature (1)..(1124): Ceres Seq. ID no. 13613954
  misc_feature: MA Experiment ID: 108434 Result: Down-regulated in Transcription
  misc_feature: MA Experiment 108434 PARAMETER Experiment Name: At_Root_Tips_cDNA_P Parameter: Tissue Value: Root Tips
  misc_feature: MA Experiment ID: 108608 Result: Up-regulated in Transcription
  misc_feature: MA Experiment 108608 PARAMETER Experiment Name: At_100uM_ABA_cDNA_P Parameter: Timepoint (hr) Value: 1
  misc_feature: MA Experiment 108608 PARAMETER Experiment Name: At_100uM_ABA_cDNA_P Parameter: Tissue Value: Aerial
  misc_feature: MA Experiment 108608 PARAMETER Experiment Name: At_100uM_ABA_cDNA_P Parameter: Treatment Value: 100uM ABA vs. No Treatment
  misc_feature: MA Experiment ID: 108668 Result: Up-regulated in Transcription
  misc_feature: MA Experiment 108668 PARAMETER Experiment Name: At_2mM_SA_cDNA_P Parameter: Plant Line Value: WS
  misc_feature: MA Experiment 108668 PARAMETER Experiment Name: At_2mM_SA_cDNA_P Parameter: Timepoint (hr) Value: 6
  misc_feature: MA Experiment 108668 PARAMETER Experiment Name: At_2mM_SA_cDNA_P Parameter: Treatment Value: 2mM SA vs. No Treatment
  misc_feature: MA Experiment ID: 20000113 Result: Up-regulated in Transcription
  misc_feature: MA Experiment 20000113 PARAMETER Experiment Name: At_42deg_Heat_cDNA_P Parameter: Temperature (deg C) Value: 42 vs. 22
  misc_feature: MA Experiment 20000113 PARAMETER Experiment Name: At_42deg_Heat_cDNA_P Parameter: Timepoint (hr) Value: 8
  misc_feature: MA Experiment 20000113 PARAMETER Experiment Name: At_42deg_Heat_cDNA_P Parameter: Tissue Value: Aerial
  misc_feature: MA Experiment ID: 20000173 Result: Up-regulated in Transcription
  misc_feature: MA Experiment 20000173 PARAMETER Experiment Name: At_42deg_Heat_P Parameter: Age (day) Value: 14
  misc_feature: MA Experiment 20000173 PARAMETER Experiment Name: At_42deg_Heat_P Parameter: Organism Value: A. thaliana
  misc_feature: MA Experiment 20000173 PARAMETER Experiment Name: At_42deg_Heat_P Parameter: Plant Line Value: WS
  misc_feature: MA Experiment 20000173 PARAMETER Experiment Name: At_42deg_Heat_P Parameter: Temperature (deg C) Value: 42 vs. 22
  misc_feature: MA Experiment 20000173 PARAMETER Experiment Name: At_42deg_Heat_P Parameter: Timepoint (hr) Value: 6
  misc_feature: MA Experiment 20000173 PARAMETER Experiment Name: At_42deg_Heat_P Parameter: Tissue Value: Aerial
  misc_feature: MA Experiment ID: 20000460 Result: Up-regulated in Transcription
  misc_feature: MA Experiment 20000460 PARAMETER Experiment Name: At_10percent_PEG_P Parameter: Age (day) Value: 12
  misc_feature: MA Experiment 20000460 PARAMETER Experiment Name: At_10percent_PEG_P Parameter: Organism Value: A. thaliana
  misc_feature: MA Experiment 20000460 PARAMETER Experiment Name: At_10percent_PEG_P Parameter: Plant Line Value: WS
  misc_feature: MA Experiment 20000460 PARAMETER Experiment Name: At_10percent_PEG_P Parameter: Timepoint (day) Value: 12
  misc_feature: MA Experiment 20000460 PARAMETER Experiment Name: At_10percent_PEG_P Parameter: Tissue Value: Whole Plant
  misc_feature: MA Experiment 20000460 PARAMETER Experiment Name: At_10percent_PEG_P Parameter: Treatment Value: 10percent PEG vs. No Treatment
aatcacacaaatcccttttttggtttctccaaatcttcaaatcttcttcaatcatcaccatggtacgttttagtaacagtcttgtaggaatactcaacttcttcgtcttccttctctcggttcccatactctcaaccggaatctggctcagccttaaagccacgacgcaatgcgagagattcctcgacaaacccatgatcgctctcggtgttttcctcatgataatcgcaatcgctggagtcgttggatcttgttgcagagtgacgtggcttctctggtcctatctctttgtgatgttcttcttaatcctcatcgtcctctgtttcaccatctttgccttcgttgtcactagtaaaggctccggcgaaactatccaaggaaaagcttataaggagtataggctcgaggcttactctgattggttgcagaggcgtgtgaacaacgctaagcattggaacagcattagaagctgtctttatgagagcaagttctgttataacttggagttagtcactgctaatcacactgtttctgatttctacaaagaagatctcactgcttttgagtctggttgctgcaagccctctaatgactgtgacttcacctacataacttcaacaacttggaataaaacatcaggaacacataaaaactcagattgccaactttgggacaacgaaaagcataagctttgctacaattgcaaagcctgcaaggccggttttctcgacaacctcaaggccgcatggaaaagagttgctattgtcaacatcattttccttgtactcctcgttgtcgtctacgctatgggatgttgcgctttccgaaacaacaaagaagatagatatggccgttccaatggtttcaacaattcttgatttgcgccggttcaagctagactttgatttttcattaatacatcatattacatttatgattagaacaaaacagctttcaaaatttaagaaacagtagaatggaagaatattgaattagtatagttgttgatgtgtttggatttcttctgttgatttgtgtttggacaacagaggattcttcagatctttattacagattgttgtgtttgaagaatcttctatatgaatcttcacttctgacttctg

SEQ ID NO: 103952 - protein, 291 aa, Arabidopsis thaliana
  peptide (1)..(291): Ceres Seq. ID no. 13613955
  misc_feature (23)..(263): Pfam Name: Tetraspanin family Pfam Description: Tetraspanin family
  misc_feature (20)..(291): Homolog of NCBI NO: 15234743 NR Description: senescence-associated protein family [Arabidopsis
  misc_feature (20)..(291): Homolog of NCBI NO: 21537169 NR Description: senescence-associated protein-like protein
  misc_feature (20)..(288): Homolog of NCBI NO: 20197174 NR Description: hypothetical protein [Arabidopsis thaliana]
  misc_feature (20)..(279): Homolog of NCBI NO: 15234374 NR Description: senescence-associated protein, putative
  misc_feature (18)..(287): Homolog of NCBI NO: 3551954 NR Description: senescence-associated protein 5 [Hemerocallis
  misc_feature (22)..(287): Homolog of NCBI NO: 29367553 NR Description: senescence-associated protein-like protein [Oryza
  misc_feature (98)..(288): Homolog of NCBI NO: 30682205 NR Description: senescence-associated protein family [Arabidopsis
  misc_feature (21)..(278): Homolog of NCBI NO: 15238641 NR Description: senescence-associated protein family [Arabidopsis
  misc_feature (21)..(278): Homolog of NCBI NO: 15231187 NR Description: senescence-associated protein family [Arabidopsis
  misc_feature (20)..(278): Homolog of NCBI NO: 9294106 NR Description: senescence-associated protein-like [Arabidopsis
SHKSLFWFLQIFKSSSIITMVRFSNSLVGILNFFVFLLSVPILSTGIWLSLKATTQCERFLDKPMIALGVFLMIIAIAGVVGSCCRVTWLLWSYLFVMFFLILIVLCFTIFAFVVTSKGSGETIQGKAYKEYRLEAYSDWLQRRVNNAKHWNSIRSCLYESKFCYNLELVTANHTVSDFYKEDLTAFESGCCKPSNDCDFTYITSTTWNKTSGTHKNSDCQLWDNEKHKLCYNCKACKAGFLDNLKAAWKRVAIVNIIFLVLLVVVYAMGCCAFRNNKEDRYGRSNGFNNS

SEQ ID NO: 103953 - protein, 272 aa, Arabidopsis thaliana
  peptide (1)..(272): Ceres Seq. ID no. 13613956
  misc_feature (4)..(244): Pfam Name: Tetraspanin family Pfam Description: Tetraspanin family
  misc_feature (1)..(272): Homolog of NCBI NO: 15234743 NR Description: senescence-associated protein family [Arabidopsis
  misc_feature (1)..(272): Homolog of NCBI NO: 21537169 NR Description: senescence-associated protein-like protein
  misc_feature (1)..(269): Homolog of NCBI NO: 20197174 NR Description: hypothetical protein [Arabidopsis thaliana]
  misc_feature (1)..(260): Homolog of NCBI NO: 15234374 NR Description: senescence-associated protein, putative
  misc_feature (1)..(268): Homolog of NCBI NO: 3551954 NR Description: senescence-associated protein 5 [Hemerocallis
  misc_feature (3)..(268): Homolog of NCBI NO: 29367553 NR Description: senescence-associated protein-like protein [Oryza
  misc_feature (79)..(269): Homolog of NCBI NO: 30682205 NR Description: senescence-associated protein family [Arabidopsis
  misc_feature (2)..(259): Homolog of NCBI NO: 15238641 NR Description: senescence-associated protein family [Arabidopsis
  misc_feature (2)..(259): Homolog of NCBI NO: 15231187 NR Description: senescence-associated protein family [Arabidopsis
  misc_feature (1)..(259): Homolog of NCBI NO: 9294106 NR Description: senescence-associated protein-like [Arabidopsis
MVRFSNSLVGILNFFVFLLSVPILSTGIWLSLKATTQCERFLDKPMIALGVFLMIIAIAGVVGSCCRVTWLLWSYLFVMFFLILIVLCFTIFAFVVTSKGSGETIQGKAYKEYRLEAYSDWLQRRVNNAKHWNSIRSCLYESKFCYNLELVTANHTVSDFYKEDLTAFESGCCKPSNDCDFTYITSTTWNKTSGTHKNSDCQLWDNEKHKLCYNCKACKAGFLDNLKAAWKRVAIVNIIFLVLLVVVYAMGCCAFRNNKEDRYGRSNGFNNS

SEQ ID NO: 103954 - protein, 227 aa, Arabidopsis thaliana
  peptide (1)..(227): Ceres Seq. ID no. 13613957
  misc_feature (1)..(199): Pfam Name: Tetraspanin family Pfam Description: Tetraspanin family
  misc_feature (1)..(227): Homolog of NCBI NO: 15234743 NR Description: senescence-associated protein family [Arabidopsis
  misc_feature (1)..(227): Homolog of NCBI NO: 21537169 NR Description: senescence-associated protein-like protein
  misc_feature (1)..(224): Homolog of NCBI NO: 20197174 NR Description: hypothetical protein [Arabidopsis thaliana]
  misc_feature (1)..(215): Homolog of NCBI NO: 15234374 NR Description: senescence-associated protein, putative
  misc_feature (1)..(223): Homolog of NCBI NO: 3551954 NR Description: senescence-associated protein 5 [Hemerocallis
  misc_feature (1)..(223): Homolog of NCBI NO: 29367553 NR Description: senescence-associated protein-like protein [Oryza
  misc_feature (34)..(224): Homolog of NCBI NO: 30682205 NR Description: senescence-associated protein family [Arabidopsis
  misc_feature (1)..(214): Homolog of NCBI NO: 15238641 NR Description: senescence-associated protein family [Arabidopsis
  misc_feature (1)..(214): Homolog of NCBI NO: 15231187 NR Description: senescence-associated protein family [Arabidopsis
  misc_feature (1)..(214): Homolog of NCBI NO: 9294106 NR Description: senescence-associated protein-like [Arabidopsis
MIALGVFLMIIAIAGVVGSCCRVTWLLWSYLFVMFFLILIVLCFTIFAFVVTSKGSGETIQGKAYKEYRLEAYSDWLQRRVNNAKHWNSIRSCLYESKFCYNLELVTANHTVSDFYKEDLTAFESGCCKPSNDCDFTYITSTTWNKTSGTHKNSDCQLWDNEKHKLCYNCKACKAGFLDNLKAAWKRVAIVNIIFLVLLVVVYAMGCCAFRNNKEDRYGRSNGFNNS

SEQ ID NO: 103955 - DNA, 1497 bp, Arabidopsis thaliana
  misc_feature (1)..(1497): Ceres Seq. ID no. 13613958
  misc_feature: MA Experiment ID: 108433 Result: Down-regulated in Transcription
  misc_feature: MA Experiment 108433 PARAMETER Experiment Name: At_rhl_Mutant2_cDNA_P Parameter: Age (day) Value: 7
  misc_feature: MA Experiment 108433 PARAMETER Experiment Name: At_rhl_Mutant2_cDNA_P Parameter: Organism Value: A. thaliana
  misc_feature: MA Experiment 108433 PARAMETER Experiment Name: At_rhl_Mutant2_cDNA_P Parameter: Plant Line Value: rhl Mutant vs. wt landsburg
  misc_feature: MA Experiment 108433 PARAMETER Experiment Name: At_rhl_Mutant2_cDNA_P Parameter: Tissue Value: Roots
  misc_feature: MA Experiment ID: 108463 Result: Up-regulated in Transcription
  misc_feature: MA Experiment 108463 PARAMETER Experiment Name: At_Germinating_Seeds_cDNA_P Parameter: Age (day) Value: 3 vs. 0
  misc_feature: MA Experiment 108463 PARAMETER Experiment Name: At_Germinating_Seeds_cDNA_P Parameter: Tissue Value: Germinating Seeds
  misc_feature: MA Experiment ID: 108473 Result: Down-regulated in Transcription
  misc_feature: MA Experiment 108473 PARAMETER Experiment Name: At_Drought_Flowers_cDNA_P Parameter: Timepoint (hr) Value: 7 d
  misc_feature: MA Experiment 108473 PARAMETER Experiment Name: At_Drought_Flowers_cDNA_P Parameter: Tissue Value: Flower
  misc_feature: MA Experiment 108473 PARAMETER Experiment Name: At_Drought_Flowers_cDNA_P Parameter: Treatment Value: Drought vs. No Drought
  misc_feature: MA Experiment ID: 108573 Result: Up-regulated in Transcription
  misc_feature: MA Experiment 108573 PARAMETER Experiment Name: At_Drought_cDNA_P Parameter: Timepoint (hr) Value: 6
  misc_feature: MA Experiment 108573 PARAMETER Experiment Name: At_Drought_cDNA_P Parameter: Tissue Value: Aerial
  misc_feature: MA Experiment 108573 PARAMETER Experiment Name: At_Drought_cDNA_P Parameter: Treatment Value: Drought vs. No Drought
  misc_feature: MA Experiment ID: 108577 Result: Down-regulated in Transcription
  misc_feature: MA Experiment 108577 PARAMETER Experiment Name: At_42deg_Heat_cDNA_P Parameter: Temperature (deg C) Value: 42 vs. 22
  misc_feature: MA Experiment 108577 PARAMETER Experiment Name: At_42deg_Heat_cDNA_P Parameter: Timepoint (hr) Value: 6
  misc_feature: MA Experiment 108577 PARAMETER Experiment Name: At_42deg_Heat_cDNA_P Parameter: Tissue Value: Aerial
  misc_feature: MA Experiment ID: 108579 Result: Up-regulated in Transcription
  misc_feature: MA Experiment 108579 PARAMETER Experiment Name: At_4deg_Cold_cDNA_P Parameter: Temperature (deg C) Value: 4 vs. 22
  misc_feature: MA Experiment 108579 PARAMETER Experiment Name: At_4deg_Cold_cDNA_P Parameter: Timepoint (hr) Value: 6
  misc_feature: MA Experiment 108579 PARAMETER Experiment Name: At_4deg_Cold_cDNA_P Parameter: Tissue Value: Aerial
  misc_feature: MA Experiment ID: 20000087 Result: Down-regulated in Transcription
  misc_feature: MA Experiment 20000087 PARAMETER Experiment Name: At_100uM_ABA_Mutants_cDNA_P Parameter: Plant Line Value: WS
  misc_feature: MA Experiment 20000087 PARAMETER Experiment Name: At_100uM_ABA_Mutants_cDNA_P Parameter: Timepoint (hr) Value: 6
  misc_feature: MA Experiment 20000087 PARAMETER Experiment Name: At_100uM_ABA_Mutants_cDNA_P Parameter: Tissue Value: Aerial
  misc_feature: MA Experiment 20000087 PARAMETER Experiment Name: At_100uM_ABA_Mutants_cDNA_P Parameter: Treatment Value: 100uM ABA vs. No Treatment
  misc_feature: MA Experiment ID: 20000089 Result: Down-regulated in Transcription
  misc_feature: MA Experiment ID: 20000090 Result: Down-regulated in Transcription
  misc_feature: MA Experiment ID: 20000224 Result: Down-regulated in Transcription
  misc_feature: MA Experiment ID: 20000438 Result: Down-regulated in Transcription
  misc_feature: MA Experiment 20000438 PARAMETER Experiment Name: At_Shoots__P Parameter: Age (day) Value: 14
  misc_feature: MA Experiment 20000438 PARAMETER Experiment Name: At_Shoots__P Parameter: Tissue Value: Shoots vs. Whole Plant
  misc_feature: MA Experiment ID: 20000439 Result: Down-regulated in Transcription
  misc_feature: MA Experiment 20000439 PARAMETER Experiment Name: At_Roots__P Parameter: Age (day) Value: 14 vs. 21
  misc_feature: MA Experiment 20000439 PARAMETER Experiment Name: At_Roots__P Parameter: Organism Value: A. thaliana
  misc_feature: MA Experiment 20000439 PARAMETER Experiment Name: At_Roots__P Parameter: Tissue Value: Roots vs. Whole Plant
  misc_feature: MA Experiment ID: 20000573 Result: Down-regulated in Transcription
  misc_feature: MA Experiment 20000573 PARAMETER Experiment Name: At_100uM_ABA_Mutants__P Parameter: Organism Value: A. thaliana
  misc_feature: MA Experiment 20000573 PARAMETER Experiment Name: At_100uM_ABA_Mutants__P Parameter: Plant Line Value: CS22 vs. Ler wt
  misc_feature: MA Experiment 20000573 PARAMETER Experiment Name: At_100uM_ABA_Mutants__P Parameter: Timepoint (hr) Value: N/A
  misc_feature: MA Experiment 20000573 PARAMETER Experiment Name: At_100uM_ABA_Mutants__P Parameter: Tissue Value: Whole Plant
  misc_feature: MA Experiment 20000573 PARAMETER Experiment Name: At_100uM_ABA_Mutants__P Parameter: Treatment Value: None
  misc_feature: MA Experiment ID: 20000574 Result: Down-regulated in Transcription
  misc_feature: MA Experiment 20000574 PARAMETER Experiment Name: At_100uM_ABA_Mutants__P Parameter: Organism Value: A. thaliana
  misc_feature: MA Experiment 20000574 PARAMETER Experiment Name: At_100uM_ABA_Mutants__P Parameter: Plant Line Value: CS23 vs. Ler wt
  misc_feature: MA Experiment 20000574 PARAMETER Experiment Name: At_100uM_ABA_Mutants__P Parameter: Timepoint (hr) Value: N/A
  misc_feature: MA Experiment 20000574 PARAMETER Experiment Name: At_100uM_ABA_Mutants__P Parameter: Tissue Value: Whole Plant
  misc_feature: MA Experiment 20000574 PARAMETER Experiment Name: At_100uM_ABA_Mutants__P Parameter: Treatment Value: None
  misc_feature: MA Experiment ID: 20001247 Result: Up-regulated in Transcription
  misc_feature: MA Experiment 20001247 PARAMETER Experiment Name: At_Far-red-induction_P Parameter: Age (day) Value: 7
  misc_feature: MA Experiment 20001247 PARAMETER Experiment Name: At_Far-red-induction_P Parameter: Light Value: Far-red vs. White
  misc_feature: MA Experiment 20001247 PARAMETER Experiment Name: At_Far-red-induction_P Parameter: Organism Value: A. thaliana
  misc_feature: MA Experiment 20001247 PARAMETER Experiment Name: At_Far-red-induction_P Parameter: Plant Line Value: Columbia
  misc_feature: MA Experiment 20001247 PARAMETER Experiment Name: At_Far-red-induction_P Parameter: Timepoint (hr) Value: 1
  misc_feature: MA Experiment 20001247 PARAMETER Experiment Name: At_Far-red-induction_P Parameter: Tissue Value: Whole Plant
cttagcagatgcttttgggaaaaaaaatatataccaaaataaaagatctgcatctgtcttcttcttcttcttcatttcctctaaatttaattacccattttttccgataaatttttgttgaggaagaatttttgttgtaaagagagtttaattaaattatgccttcaatagaagatgagctgtttccgtcaacgccgggtaaattcaaaattgaccggtcaaaccgtcagctccaccgttgtttcgcttctacgagcaccatgtttctttgggctctcttcctcatcgctctcaccgcttcttacttgagtttccaaagcttcgtcgattccggtagccgttatctaaccgcttcttggggcggcatccagtgggagaaacaggttcgtacctccgctcagatccatcgctccggcggtatctccgtccttgttaccggcgctaccggattcgtcggtagccacgtgtcacttgccttgaggaaacgcggcgatggtgttgttggacttgataatttcaacaattactacgatccgtcgttgaaacgtgctcgtagatctctgttgtcgtcgagagggatcttcgtcgttgaaggagatctaaacgacgcgaagctgttagcaaagcttttcgatgtggttgctttcactcacgtgatgcatctcgctgctcaagctggtgttagatacgctttggagaatcctcaatcgtatgttcatagcaacatcgccggacttgtgaatcttctcgagatttgcaaagcggcgaatcctcagccggcgatagtttgggcttcatcgagctccgtttatggactcaacgagaaagttccattctctgaatctgaccggacggatcaaccggcgagtctctacgccgcaacgaaaaaagccggcgaagaaatcacccacacttataaccatatttacggtcttgccattaccggtttaagattcttcacggtttacggaccatggggtagaccggatatggcttacttctccttcaccagaaacatcctacaaggtaaaccgatcacaatctaccggggcaaaaaccgggtcgatttagcccgggatttcacatacatcgacgatatagtgaaaggatgtttaggatctctggattcatcgggtaaaagtaccgggtcgggtggtaaaaaacgtggagcagcaccgtaccggatatttaacctgggaaacacatctccggttacagtaccgattctggtggatatattggagaagcatttaaaggtgaaagcgaagaggaacttcgtggagatgccaggaaacggcgacgtaccgttcacacatgccaatattagctcagcccgaaatgaattcgggtataaaccgacaaccgatttggaaaccgggttgaagaagttcgttagatggtatctttcttattacggatacaatactaaagccaagcttgtacattaaccgtgactattattattatttttaatgaaattatttttttctttctccc

SEQ ID NO: 103956 - protein, 429 aa, Arabidopsis thaliana; identical to SEQ ID NO: 43032
  peptide (1)..(429): Ceres Seq. ID no. 13613959
  misc_feature (90)..(419): Pfam Name: NAD dependent epimerase/dehydratase family Pfam Description: NAD dependent epimerase/dehydratase family
  misc_feature (1)..(429): Homolog of NCBI NO: 15234745 NR Description: nucleotide sugar epimerase family [Arabidopsis
  misc_feature (1)..(419): Homolog of NCBI NO: 15217591 NR Description: nucleotide sugar epimerase family [Arabidopsis
  misc_feature (1)..(425): Homolog of NCBI NO: 15236712 NR Description: nucleotide sugar epimerase family [Arabidopsis
  misc_feature (1)..(425): Homolog of NCBI NO: 15225451 NR Description: nucleotide sugar epimerase family [Arabidopsis
  misc_feature (18)..(419): Homolog of NCBI NO: 21536982 NR Description: nucleotide sugar epimerase, putative [Arabidopsis
  misc_feature (6)..(419): Homolog of NCBI NO: 15234486 NR Description: nucleotide sugar epimerase family [Arabidopsis
  misc_feature (6)..(419): Homolog of NCBI NO: 15293119 NR Description: putative nucleotide sugar epimerase [Arabidopsis
  misc_feature (44)..(426): Homolog of NCBI NO: 15229524 NR Description: NAD-dependent epimerase/dehydratase family
  misc_feature (44)..(426): Homolog of NCBI NO: 24417280 NR Description: unknown [Arabidopsis thaliana]
  misc_feature (47)..(427): Homolog of NCBI NO: 29647497 NR Description: OJ1191_A10.21 [Oryza sativa (japonica

SEQ ID NO: 103957 - protein, 395 aa, Arabidopsis thaliana; identical to SEQ ID NO: 43033
  peptide (1)..(395): Ceres Seq. ID no. 13613960
  misc_feature (56)..(385): Pfam Name: NAD dependent epimerase/dehydratase family Pfam Description: NAD dependent epimerase/dehydratase family
  misc_feature (1)..(395): Homolog of NCBI NO: 15234745 NR Description: nucleotide sugar epimerase family [Arabidopsis
  misc_feature (1)..(385): Homolog of NCBI NO: 15217591 NR Description: nucleotide sugar epimerase family [Arabidopsis
  misc_feature (1)..(391): Homolog of NCBI NO: 15236712 NR Description: nucleotide sugar epimerase family [Arabidopsis
  misc_feature (1)..(391): Homolog of NCBI NO: 15225451 NR Description: nucleotide sugar epimerase family [Arabidopsis
  misc_feature (1)..(385): Homolog of NCBI NO: 21536982 NR Description: nucleotide sugar epimerase, putative [Arabidopsis
  misc_feature (1)..(385): Homolog of NCBI NO: 15234486 NR Description: nucleotide sugar epimerase family [Arabidopsis
  misc_feature (1)..(385): Homolog of NCBI NO: 15293119 NR Description: putative nucleotide sugar epimerase [Arabidopsis
  misc_feature (10)..(392): Homolog of NCBI NO: 15229524 NR Description: NAD-dependent epimerase/dehydratase family
  misc_feature (10)..(392): Homolog of NCBI NO: 24417280 NR Description: unknown [Arabidopsis thaliana]
  misc_feature (13)..(393): Homolog of NCBI NO: 29647497 NR Description: OJ1191_A10.21 [Oryza sativa (japonica

SEQ ID NO: 103958 - protein, 263 aa, Arabidopsis thaliana; identical to SEQ ID NO: 43034
  peptide (1)..(263): Ceres Seq. ID no. 13613961
  misc_feature (1)..(253): Pfam Name: NAD dependent epimerase/dehydratase family Pfam Description: NAD dependent epimerase/dehydratase family
  misc_feature (1)..(263): Homolog of NCBI NO: 15234745 NR Description: nucleotide sugar epimerase family [Arabidopsis
  misc_feature (1)..(253): Homolog of NCBI NO: 15217591 NR Description: nucleotide sugar epimerase family [Arabidopsis
  misc_feature (1)..(259): Homolog of NCBI NO: 15236712 NR Description: nucleotide sugar epimerase family [Arabidopsis
  misc_feature (1)..(259): Homolog of NCBI NO: 15225451 NR Description: nucleotide sugar epimerase family [Arabidopsis
  misc_feature (1)..(253): Homolog of NCBI NO: 21536982 NR Description: nucleotide sugar epimerase, putative [Arabidopsis
  misc_feature (1)..(253): Homolog of NCBI NO: 15234486 NR Description: nucleotide sugar epimerase family [Arabidopsis
  misc_feature (1)..(253): Homolog of NCBI NO: 15293119 NR Description: putative nucleotide sugar epimerase [Arabidopsis
  misc_feature (1)..(260): Homolog of NCBI NO: 15229524 NR Description: NAD-dependent epimerase/dehydratase family
  misc_feature (1)..(260): Homolog of NCBI NO: 24417280 NR Description: unknown [Arabidopsis thaliana]
  misc_feature (1)..(261): Homolog of NCBI NO: 29647497 NR Description: OJ1191_A10.21 [Oryza sativa (japonica

SEQ ID NO: 103959 - DNA, 1303 bp, Arabidopsis thaliana
  misc_feature (1)..(1303): Ceres Seq. ID no. 13613962
  misc_feature: MA Experiment ID: 108434 Result: Down-regulated in Transcription
  misc_feature: MA Experiment 108434 PARAMETER Experiment Name: At_Root_Tips_cDNA_P Parameter: Tissue Value: Root Tips
  misc_feature: MA Experiment ID: 108461 Result: Down-regulated in Transcription
  misc_feature: MA Experiment 108461 PARAMETER Experiment Name: At_Germinating_Seeds_cDNA_P Parameter: Age (day) Value: 1 vs. 0
  misc_feature: MA Experiment 108461 PARAMETER Experiment Name: At_Germinating_Seeds_cDNA_P Parameter: Tissue Value: Germinating Seeds
  misc_feature: MA Experiment ID: 108462 Result: Down-regulated in Transcription
  misc_feature: MA Experiment 108462 PARAMETER Experiment Name: At_Germinating_Seeds_cDNA_P Parameter: Age (day) Value: 2 vs. 0
  misc_feature: MA Experiment 108462 PARAMETER Experiment Name: At_Germinating_Seeds_cDNA_P Parameter: Tissue Value: Germinating Seeds
  misc_feature: MA Experiment ID: 108488 Result: Down-regulated in Transcription
  misc_feature: MA Experiment ID: 108501 Result: Down-regulated in Transcription
  misc_feature: MA Experiment 108501 PARAMETER Experiment Name: At_ap2_floral_buds_cDNA_P Parameter: Plant Line Value: ap2 (Ler.)
  misc_feature: MA Experiment 108501 PARAMETER Experiment Name: At_ap2_floral_buds_cDNA_P Parameter: Tissue Value: Closed Flower
  misc_feature: MA Experiment ID: 108561 Result: Up-regulated in Transcription
  misc_feature: MA Experiment 108561 PARAMETER Experiment Name: At_100uM_ABA_cDNA_P Parameter: Timepoint (hr) Value: 6
  misc_feature: MA Experiment 108561 PARAMETER Experiment Name: At_100uM_ABA_cDNA_P Parameter: Tissue Value: Aerial
  misc_feature: MA Experiment 108561 PARAMETER Experiment Name: At_100uM_ABA_cDNA_P Parameter: Treatment Value: 100uM ABA vs. No Treatment
  misc_feature: MA Experiment ID: 108572 Result: Up-regulated in Transcription
  misc_feature: MA Experiment 108572 PARAMETER Experiment Name: At_Drought_cDNA_P Parameter: Timepoint (hr) Value: 1
  misc_feature: MA Experiment 108572 PARAMETER Experiment Name: At_Drought_cDNA_P Parameter: Tissue Value: Aerial
  misc_feature: MA Experiment 108572 PARAMETER Experiment Name: At_Drought_cDNA_P Parameter: Treatment Value: Drought vs. No Drought
  misc_feature: MA Experiment ID: 108573 Result: Up-regulated in Transcription
  misc_feature: MA Experiment 108573 PARAMETER Experiment Name: At_Drought_cDNA_P Parameter: Timepoint (hr) Value: 6
  misc_feature: MA Experiment 108573 PARAMETER Experiment Name: At_Drought_cDNA_P Parameter: Tissue Value: Aerial
  misc_feature: MA Experiment 108573 PARAMETER Experiment Name: At_Drought_cDNA_P Parameter: Treatment Value: Drought vs. No Drought
  misc_feature: MA Experiment ID: 108574 Result: Up-regulated in Transcription
  misc_feature: MA Experiment 108574 PARAMETER Experiment Name: At_Wounding__cDNA_P Parameter: Timepoint (hr) Value: 1
  misc_feature: MA Experiment 108574 PARAMETER Experiment Name: At_Wounding__cDNA_P Parameter: Tissue Value: Aerial
  misc_feature: MA Experiment 108574 PARAMETER Experiment Name: At_Wounding__cDNA_P Parameter: Treatment Value: Wounding vs. No Wounding
  misc_feature: MA Experiment ID: 108605 Result: Up-regulated in Transcription
  misc_feature: MA Experiment 108605 PARAMETER Experiment Name: At_100uM_ABA_cDNA_P Parameter: Timepoint (hr) Value: 6
  misc_feature: MA Experiment 108605 PARAMETER Experiment Name: At_100uM_ABA_cDNA_P Parameter: Tissue Value: Aerial
  misc_feature: MA Experiment 108605 PARAMETER Experiment Name: At_100uM_ABA_cDNA_P Parameter: Treatment Value: 100uM ABA vs. No Treatment
  misc_feature: MA Experiment ID: 108607 Result: Up-regulated in Transcription
  misc_feature: MA Experiment 108607 PARAMETER Experiment Name: At_100uM_ABA_cDNA_P Parameter: Timepoint (hr) Value: 4
  misc_feature: MA Experiment 108607 PARAMETER Experiment Name: At_100uM_ABA_cDNA_P Parameter: Tissue Value: Aerial
  misc_feature: MA Experiment 108607 PARAMETER Experiment Name: At_100uM_ABA_cDNA_P Parameter: Treatment Value: 100uM ABA vs. No Treatment
  misc_feature: MA Experiment ID: 108608 Result: Up-regulated in Transcription
  misc_feature: MA Experiment 108608 PARAMETER Experiment Name: At_100uM_ABA_cDNA_P Parameter: Timepoint (hr) Value: 1
  misc_feature: MA Experiment 108608 PARAMETER Experiment Name: At_100uM_ABA_cDNA_P Parameter: Tissue Value: Aerial
  misc_feature: MA Experiment 108608 PARAMETER Experiment Name: At_100uM_ABA_cDNA_P Parameter: Treatment Value: 100uM ABA vs. No Treatment
  misc_feature: MA Experiment ID: 20000069 Result: Up-regulated in Transcription
  misc_feature: MA Experiment 20000069 PARAMETER Experiment Name: At_100uM_ABA_Mutants_cDNA_P Parameter: Plant Line Value: CS23
  misc_feature: MA Experiment 20000069 PARAMETER Experiment Name: At_100uM_ABA_Mutants_cDNA_P Parameter: Timepoint (hr) Value: 6
  misc_feature: MA Experiment 20000069 PARAMETER Experiment Name: At_100uM_ABA_Mutants_cDNA_P Parameter: Tissue Value: Aerial
  misc_feature: MA Experiment 20000069 PARAMETER Experiment Name: At_100uM_ABA_Mutants_cDNA_P Parameter: Treatment Value: 100uM ABA vs. No Treatment
  misc_feature: MA Experiment ID: 20000070 Result: Up-regulated in Transcription
  misc_feature: MA Experiment 20000070 PARAMETER Experiment Name: At_100uM_ABA_Mutants_cDNA_P Parameter: Plant Line Value: CS24
  misc_feature: MA Experiment 20000070 PARAMETER Experiment Name: At_100uM_ABA_Mutants_cDNA_P Parameter: Timepoint (hr) Value: 6
  misc_feature: MA Experiment 20000070 PARAMETER Experiment Name: At_100uM_ABA_Mutants_cDNA_P Parameter: Tissue Value: Aerial
  misc_feature: MA Experiment 20000070 PARAMETER Experiment Name: At_100uM_ABA_Mutants_cDNA_P Parameter: Treatment Value: 100uM ABA vs. No Treatment
  misc_feature: MA Experiment ID: 20000071 Result: Up-regulated in Transcription
  misc_feature: MA Experiment 20000071 PARAMETER Experiment Name: At_100uM_ABA_Mutants_cDNA_P Parameter: Plant Line Value: CS8104
  misc_feature: MA Experiment 20000071 PARAMETER Experiment Name: At_100uM_ABA_Mutants_cDNA_P Parameter: Timepoint (hr) Value: 6
  misc_feature: MA Experiment 20000071 PARAMETER Experiment Name: At_100uM_ABA_Mutants_cDNA_P Parameter: Tissue Value: Aerial
  misc_feature: MA Experiment 20000071 PARAMETER Experiment Name: At_100uM_ABA_Mutants_cDNA_P Parameter: Treatment Value: 100uM ABA vs. No Treatment
  misc_feature: MA Experiment ID: 20000072 Result: Up-regulated in Transcription
  misc_feature: MA Experiment 20000072 PARAMETER Experiment Name: At_100uM_ABA_Mutants_cDNA_P Parameter: Plant Line Value: CS8105
  misc_feature: MA Experiment 20000072 PARAMETER Experiment Name: At_100uM_ABA_Mutants_cDNA_P Parameter: Timepoint (hr) Value: 6
  misc_feature: MA Experiment 20000072 PARAMETER Experiment Name: At_100uM_ABA_Mutants_cDNA_P Parameter: Tissue Value: Aerial
  misc_feature: MA Experiment 20000072 PARAMETER Experiment Name: At_100uM_ABA_Mutants_cDNA_P Parameter: Treatment Value: 100uM ABA vs. No Treatment
  misc_feature: MA Experiment ID: 20000086 Result: Up-regulated in Transcription
  misc_feature: MA Experiment 20000086 PARAMETER Experiment Name: At_100uM_ABA_Mutants_cDNA_P Parameter: Plant Line Value: CS22
  misc_feature: MA Experiment 20000086 PARAMETER Experiment Name: At_100uM_ABA_Mutants_cDNA_P Parameter: Timepoint (hr) Value: 6
  misc_feature: MA Experiment 20000086 PARAMETER Experiment Name: At_100uM_ABA_Mutants_cDNA_P Parameter: Tissue Value: Aerial
  misc_feature: MA Experiment 20000086 PARAMETER Experiment Name: At_100uM_ABA_Mutants_cDNA_P Parameter: Treatment Value: 100uM ABA vs. No Treatment
  misc_feature: MA Experiment ID: 20000087 Result: Up-regulated in Transcription
  misc_feature: MA Experiment 20000087 PARAMETER Experiment Name: At_100uM_ABA_Mutants_cDNA_P Parameter: Plant Line Value: WS
  misc_feature: MA Experiment 20000087 PARAMETER Experiment Name: At_100uM_ABA_Mutants_cDNA_P Parameter: Timepoint (hr) Value: 6
  misc_feature: MA Experiment 20000087 PARAMETER Experiment Name: At_100uM_ABA_Mutants_cDNA_P Parameter: Tissue Value: Aerial
  misc_feature: MA Experiment 20000087 PARAMETER Experiment Name: At_100uM_ABA_Mutants_cDNA_P Parameter: Treatment Value: 100uM ABA vs. No Treatment
  misc_feature: MA Experiment ID: 20000088 Result: Up-regulated in Transcription
  misc_feature: MA Experiment 20000088 PARAMETER Experiment Name: At_100uM_ABA_Mutants_cDNA_P Parameter: Plant Line Value: Landsberg
  misc_feature: MA Experiment 20000088 PARAMETER Experiment Name: At_100uM_ABA_Mutants_cDNA_P Parameter: Timepoint (hr) Value: 6
  misc_feature: MA Experiment 20000088 PARAMETER Experiment Name: At_100uM_ABA_Mutants_cDNA_P Parameter: Tissue Value: Aerial
  misc_feature: MA Experiment 20000088 PARAMETER Experiment Name: At_100uM_ABA_Mutants_cDNA_P Parameter: Treatment Value: 100uM ABA vs. No Treatment
  misc_feature: MA Experiment ID: 20000117 Result: Up-regulated in Transcription
  misc_feature: MA Experiment 20000117 PARAMETER Experiment Name: At_100uM_ABA_Mutants_cDNA_P Parameter: Plant Line Value: Columbia
  misc_feature: MA Experiment 20000117 PARAMETER Experiment Name: At_100uM_ABA_Mutants_cDNA_P Parameter: Timepoint (hr) Value: 6
  misc_feature: MA Experiment 20000117 PARAMETER Experiment Name: At_100uM_ABA_Mutants_cDNA_P Parameter: Tissue Value: Aerial
  misc_feature: MA Experiment 20000117 PARAMETER Experiment Name: At_100uM_ABA_Mutants_cDNA_P Parameter: Treatment Value: 100uM ABA vs. No Treatment
  misc_feature: MA Experiment ID: 20000166 Result: Up-regulated in Transcription
  misc_feature: MA Experiment 20000166 PARAMETER Experiment Name: At_100uM_ABA_P Parameter: Age (day) Value: 14
  misc_feature: MA Experiment 20000166 PARAMETER Experiment Name: At_100uM_ABA_P Parameter: Organism Value: A. thaliana
  misc_feature: MA Experiment 20000166 PARAMETER Experiment Name: At_100uM_ABA_P Parameter: Plant Line Value: WS
  misc_feature: MA Experiment 20000166 PARAMETER Experiment Name: At_100uM_ABA_P Parameter: Timepoint (hr) Value: 1
  misc_feature: MA Experiment 20000166 PARAMETER Experiment Name: At_100uM_ABA_P Parameter: Tissue Value: Aerial
  misc_feature: MA Experiment 20000166 PARAMETER Experiment Name: At_100uM_ABA_P Parameter: Treatment Value: 100uM ABA vs. No Treatment
  misc_feature: MA Experiment ID: 20000169 Result: Up-regulated in Transcription
  misc_feature: MA Experiment 20000169 PARAMETER Experiment Name: At_100uM_ABA_P Parameter: Age (day) Value: 14
  misc_feature: MA Experiment 20000169 PARAMETER Experiment Name: At_100uM_ABA_P Parameter: Organism Value: A. thaliana
  misc_feature: MA Experiment 20000169 PARAMETER Experiment Name: At_100uM_ABA_P Parameter: Plant Line Value: WS
  misc_feature: MA Experiment 20000169 PARAMETER Experiment Name: At_100uM_ABA_P Parameter: Timepoint (hr) Value: 6
  misc_feature: MA Experiment 20000169 PARAMETER Experiment Name: At_100uM_ABA_P Parameter: Tissue Value: Aerial
  misc_feature: MA Experiment 20000169 PARAMETER Experiment Name: At_100uM_ABA_P Parameter: Treatment Value: 100uM ABA vs. No Treatment
  misc_feature: MA Experiment ID: 20000184 Result: Down-regulated in Transcription
  misc_feature: MA Experiment 20000184 PARAMETER Experiment Name: At_Shoots__P Parameter: Age (day) Value: 7
  misc_feature: MA Experiment 20000184 PARAMETER Experiment Name: At_Shoots__P Parameter: Tissue Value: Shoots vs. Whole Plant
  misc_feature: MA Experiment ID: 20000224 Result: Up-regulated in Transcription
  misc_feature: MA Experiment ID: 20000267 Result: Up-regulated in Transcription
  misc_feature: MA Experiment 20000267 PARAMETER Experiment Name: At_Drought_P Parameter: Age (day) Value: 7
  misc_feature: MA Experiment 20000267 PARAMETER Experiment Name: At_Drought_P Parameter: Organism Value: A. thaliana
  misc_feature: MA Experiment 20000267 PARAMETER Experiment Name: At_Drought_P Parameter: Plant Line Value: WS
  misc_feature: MA Experiment 20000267 PARAMETER Experiment Name: At_Drought_P Parameter: Timepoint (hr) Value: 6
  misc_feature: MA Experiment 20000267 PARAMETER Experiment Name: At_Drought_P Parameter: Tissue Value: Whole Plant
  misc_feature: MA Experiment 20000267 PARAMETER Experiment Name: At_Drought_P Parameter: Treatment Value: Drought vs. No Drought
  misc_feature: MA Experiment ID: 20000436 Result: Up-regulated in Transcription
  misc_feature: MA Experiment 20000436 PARAMETER Experiment Name: At_Drought_P Parameter: Age (day) Value: 7
  misc_feature: MA Experiment 20000436 PARAMETER Experiment Name: At_Drought_P Parameter: Organism Value: A. thaliana
  misc_feature: MA Experiment 20000436 PARAMETER Experiment Name: At_Drought_P Parameter: Plant Line Value: WS
  misc_feature: MA Experiment 20000436 PARAMETER Experiment Name: At_Drought_P Parameter: Timepoint (hr) Value: 12
  misc_feature: MA Experiment 20000436 PARAMETER Experiment Name: At_Drought_P Parameter: Tissue Value: Whole Plant
  misc_feature: MA Experiment 20000436 PARAMETER Experiment Name: At_Drought_P Parameter: Treatment Value: Drought vs. No Drought
  misc_feature: MA Experiment ID: 20000437 Result: Up-regulated in Transcription
  misc_feature: MA Experiment 20000437 PARAMETER Experiment Name: At_Drought_P Parameter: Age (day) Value: 8
  misc_feature: MA Experiment 20000437 PARAMETER Experiment Name: At_Drought_P Parameter: Organism Value: A. thaliana
  misc_feature: MA Experiment 20000437 PARAMETER Experiment Name: At_Drought_P Parameter: Plant Line Value: WS
  misc_feature: MA Experiment 20000437 PARAMETER Experiment Name: At_Drought_P Parameter: Timepoint (hr) Value: 24
  misc_feature: MA Experiment 20000437 PARAMETER Experiment Name: At_Drought_P Parameter: Tissue Value: Whole Plant
  misc_feature: MA Experiment 20000437 PARAMETER Experiment Name: At_Drought_P Parameter: Treatment Value: Drought vs. No Drought
  misc_feature: MA Experiment ID: 20000453 Result: Up-regulated in Transcription
  misc_feature: MA Experiment 20000453 PARAMETER Experiment Name: At_100uM_ABA_P Parameter: Age (day) Value: 15
  misc_feature: MA Experiment 20000453 PARAMETER Experiment Name: At_100uM_ABA_P Parameter: Organism Value: A. thaliana
  misc_feature: MA Experiment 20000453 PARAMETER Experiment Name: At_100uM_ABA_P Parameter: Plant Line Value: WS
  misc_feature: MA Experiment 20000453 PARAMETER Experiment Name: At_100uM_ABA_P Parameter: Timepoint (hr) Value: 24
  misc_feature: MA Experiment 20000453 PARAMETER Experiment Name: At_100uM_ABA_P Parameter: Tissue Value: Aerial
  misc_feature: MA Experiment 20000453 PARAMETER Experiment Name: At_100uM_ABA_P Parameter: Treatment Value: 100uM ABA vs. No Treatment
  misc_feature: MA Experiment ID: 20000794 Result: Up-regulated in Transcription
  misc_feature: MA Experiment 20000794 PARAMETER Experiment Name: At_Petals_P Parameter: Age (day) Value: 23-25 days
  misc_feature: MA Experiment 20000794 PARAMETER Experiment Name: At_Petals_P Parameter: Plant Line Value: WS
  misc_feature: MA Experiment 20000794 PARAMETER Experiment Name: At_Petals_P Parameter: Tissue Value: Petals vs. Whole plant
  misc_feature: MA Experiment ID: 20001247 Result: Up-regulated in Transcription
  misc_feature: MA Experiment 20001247 PARAMETER Experiment Name: At_Far-red-induction_P Parameter: Age (day) Value: 7
  misc_feature: MA Experiment 20001247 PARAMETER Experiment Name: At_Far-red-induction_P Parameter: Light Value: Far-red vs. White
  misc_feature: MA Experiment 20001247 PARAMETER Experiment Name: At_Far-red-induction_P Parameter: Organism Value: A. thaliana
  misc_feature: MA Experiment 20001247 PARAMETER Experiment Name: At_Far-red-induction_P Parameter: Plant Line Value: Columbia
  misc_feature: MA Experiment 20001247 PARAMETER Experiment Name: At_Far-red-induction_P Parameter: Timepoint (hr) Value: 1
  misc_feature: MA Experiment 20001247 PARAMETER Experiment Name: At_Far-red-induction_P Parameter: Tissue Value: Whole Plant
  misc_feature: MA Experiment ID: 20001248 Result: Down-regulated in Transcription
  misc_feature: MA Experiment 20001248 PARAMETER Experiment Name: At_Far-red-induction_P Parameter: Age (day) Value: 7
  misc_feature: MA Experiment 20001248 PARAMETER Experiment Name: At_Far-red-induction_P Parameter: Light Value: Far-red vs. White
  misc_feature: MA Experiment 20001248 PARAMETER Experiment Name: At_Far-red-induction_P Parameter: Organism Value: A. thaliana
  misc_feature: MA Experiment 20001248 PARAMETER Experiment Name: At_Far-red-induction_P Parameter: Plant Line Value: Columbia
  misc_feature: MA Experiment 20001248 PARAMETER Experiment Name: At_Far-red-induction_P Parameter: Timepoint (hr) Value: 4
  misc_feature: MA Experiment 20001248 PARAMETER Experiment Name: At_Far-red-induction_P Parameter: Tissue Value: Whole Plant
  misc_feature: MA Experiment ID: 20001451 Result: Up-regulated in Transcription
  misc_feature: MA Experiment 20001451 PARAMETER Experiment Name: At_Far-red-induction_P Parameter: Age (day) Value: 7
  misc_feature: MA Experiment 20001451 PARAMETER Experiment Name: At_Far-red-induction_P Parameter: Light Value: Far-red vs. White
  misc_feature: MA Experiment 20001451 PARAMETER Experiment Name: At_Far-red-induction_P Parameter: Organism Value: A. thaliana
  misc_feature: MA Experiment 20001451 PARAMETER Experiment Name: At_Far-red-induction_P Parameter: Plant Line Value: Columbia
  misc_feature: MA Experiment 20001451 PARAMETER Experiment Name: At_Far-red-induction_P Parameter: Timepoint (hr) Value: 24
  misc_feature: MA Experiment 20001451 PARAMETER Experiment Name: At_Far-red-induction_P Parameter: Tissue Value: Whole Plant
  misc_feature: MA Experiment ID: 20001554 Result: Up-regulated in Transcription
  misc_feature: MA Experiment 20001554 PARAMETER Experiment Name: At_Drought_Soil_Dry_P Parameter: Age (day) Value: 21
  misc_feature: MA Experiment 20001554 PARAMETER Experiment Name: At_Drought_Soil_Dry_P Parameter: Organism Value: A. thaliana
  misc_feature: MA Experiment 20001554 PARAMETER Experiment Name: At_Drought_Soil_Dry_P Parameter: Plant Line Value: WS
  misc_feature: MA Experiment 20001554 PARAMETER Experiment Name: At_Drought_Soil_Dry_P Parameter: Post Timepoint (hr) Value: None
  misc_feature: MA Experiment 20001554 PARAMETER Experiment Name: At_Drought_Soil_Dry_P Parameter: Post-Treatment Value: None
  misc_feature: MA Experiment 20001554 PARAMETER Experiment Name: At_Drought_Soil_Dry_P Parameter: Timepoint (day) Value: 7
  misc_feature: MA Experiment 20001554 PARAMETER Experiment Name: At_Drought_Soil_Dry_P Parameter: Treatment Value: Drought vs. No Drought
  misc_feature: MA Experiment ID: 20001557 Result: Up-regulated in Transcription
  misc_feature: MA Experiment 20001557 PARAMETER Experiment Name: At_Drought_Soil_Dry_P Parameter: Age (day) Value: 27
  misc_feature: MA Experiment 20001557 PARAMETER Experiment Name: At_Drought_Soil_Dry_P Parameter: Organism Value: A. thaliana
  misc_feature: MA Experiment 20001557 PARAMETER Experiment Name: At_Drought_Soil_Dry_P Parameter: Plant Line Value: WS
  misc_feature: MA Experiment 20001557 PARAMETER Experiment Name: At_Drought_Soil_Dry_P Parameter: Post Timepoint (hr) Value: 3
  misc_feature: MA Experiment 20001557 PARAMETER Experiment Name: At_Drought_Soil_Dry_P Parameter: Post-Treatment Value: Re-Water vs. No Drought
  misc_feature: MA Experiment 20001557 PARAMETER Experiment Name: At_Drought_Soil_Dry_P Parameter: Timepoint (day) Value: 13
  misc_feature: MA Experiment 20001557 PARAMETER Experiment Name: At_Drought_Soil_Dry_P Parameter: Treatment Value: Drought vs. No Drought
  misc_feature: MA Experiment ID: 20001558 Result: Up-regulated in Transcription
  misc_feature: MA Experiment 20001558 PARAMETER Experiment Name: At_Drought_Soil_Dry_P Parameter: Age (day) Value: 27
  misc_feature: MA Experiment 20001558 PARAMETER Experiment Name: At_Drought_Soil_Dry_P Parameter: Organism Value: A. thaliana
  misc_feature: MA Experiment 20001558 PARAMETER Experiment Name: At_Drought_Soil_Dry_P Parameter: Plant Line Value: WS
  misc_feature: MA Experiment 20001558 PARAMETER Experiment Name: At_Drought_Soil_Dry_P Parameter: Post Timepoint (hr) Value: 6
  misc_feature: MA Experiment 20001558 PARAMETER Experiment Name: At_Drought_Soil_Dry_P Parameter: Post-Treatment Value: Re-Water vs. No Drought
  misc_feature: MA Experiment 20001558 PARAMETER Experiment Name: At_Drought_Soil_Dry_P Parameter: Timepoint (day) Value: 13
  misc_feature: MA Experiment 20001558 PARAMETER Experiment Name: At_Drought_Soil_Dry_P Parameter: Treatment Value: Drought vs. No Drought
  misc_feature: MA Experiment ID: 20001560 Result: Up-regulated in Transcription
  misc_feature: MA Experiment 20001560 PARAMETER Experiment Name: At_Drought_Soil_Dry_P Parameter: Age (day) Value: 28
  misc_feature: MA Experiment 20001560 PARAMETER Experiment Name: At_Drought_Soil_Dry_P Parameter: Organism Value: A. thaliana
  misc_feature: MA Experiment 20001560 PARAMETER Experiment Name: At_Drought_Soil_Dry_P Parameter: Plant Line Value: WS
  misc_feature: MA Experiment 20001560 PARAMETER Experiment Name: At_Drought_Soil_Dry_P Parameter: Post Timepoint (hr) Value: None
  misc_feature: MA Experiment 20001560 PARAMETER Experiment Name: At_Drought_Soil_Dry_P Parameter: Post-Treatment Value: None
  misc_feature: MA Experiment 20001560 PARAMETER Experiment Name: At_Drought_Soil_Dry_P Parameter: Timepoint (day) Value: 14
  misc_feature: MA Experiment 20001560 PARAMETER Experiment Name: At_Drought_Soil_Dry_P Parameter: Treatment Value: Drought vs. No Drought
  misc_feature: MA Experiment ID: 20001757 Result: Down-regulated in Transcription
  misc_feature: MA Experiment 20001757 PARAMETER Experiment Name: At_50mM_NH4NO3_L-to-H_P Parameter: Timepoint (hr) Value: 6
  misc_feature: MA Experiment 20001757 PARAMETER Experiment Name: At_50mM_NH4NO3_L-to-H_P Parameter: Tissue Value: Leaf
  misc_feature: MA Experiment 20001757 PARAMETER Experiment Name: At_50mM_NH4NO3_L-to-H_P Parameter: Treatment Value: 50mM NH4NO3 vs 100mM Mannitol
  misc_feature: MA Experiment ID: 20001904 Result: Up-regulated in Transcription
  misc_feature: MA Experiment 20001904 PARAMETER Experiment Name: At_Drought_Reproduction_P Parameter: Age (day) Value: 37
  misc_feature: MA Experiment 20001904 PARAMETER Experiment Name: At_Drought_Reproduction_P Parameter: Organism Value: A. thaliana
  misc_feature: MA Experiment 20001904 PARAMETER Experiment Name: At_Drought_Reproduction_P Parameter: Plant Line Value: WS
  misc_feature: MA Experiment 20001904 PARAMETER Experiment Name: At_Drought_Reproduction_P Parameter: Timepoint (day) Value: 7
  misc_feature: MA Experiment 20001904 PARAMETER Experiment Name: At_Drought_Reproduction_P Parameter: Tissue Value: Rosettes
  misc_feature: MA Experiment 20001904 PARAMETER Experiment Name: At_Drought_Reproduction_P Parameter: Treatment Value: Drought vs. No Drought
  misc_feature: MA Experiment ID: 20001905 Result: Up-regulated in Transcription
  misc_feature: MA Experiment 20001905 PARAMETER Experiment Name: At_Drought_Reproduction_P Parameter: Age (day) Value: 40
  misc_feature: MA Experiment 20001905 PARAMETER Experiment Name: At_Drought_Reproduction_P Parameter: Organism Value: A. thaliana
  misc_feature: MA Experiment 20001905 PARAMETER Experiment Name: At_Drought_Reproduction_P Parameter: Plant Line Value: WS
  misc_feature: MA Experiment 20001905 PARAMETER Experiment Name: At_Drought_Reproduction_P Parameter: Timepoint (day) Value: 10
  misc_feature: MA Experiment 20001905 PARAMETER Experiment Name: At_Drought_Reproduction_P Parameter: Tissue Value: Rosettes
  misc_feature: MA Experiment 20001905 PARAMETER Experiment Name: At_Drought_Reproduction_P Parameter: Treatment Value: Drought vs. No Drought
aacagaaaaatagttcacccaactttctcctattaatacttgcctcttctctcttcctacttctaaccttctttttctccttcatcacacacatatacacacgctttcgtttaaactctctctgtttcaatcattaatcagaaagaagcaacacaaatatggatcacgacaagtctacttcttgttgctgcgttcttgatgcttccacttatgttggtttctggattctcaagaaattgcttagcagaggatactctgttcacgcagcgattcgtagaaacggggagagtgaaattgaggagatgatcagagagatggaaacaacagaagagagattagtggtgtacgatgtagatgtgttggattatcaaagcatacttgtctctctcaagacatgtaacgttgtcttctgttgcttagacagccctgaagggtacgatgagaaggaggtggatttggaagtgagaggagcgatcaatgtggtggaagcgtgtggaagaacagagagtatagagaagattgtgttttcttcttcattaacagcttcaatttggagagacaacattggaactcaaaaggatgttgatgagaagtgttggagtgaccaagacttctgtcgcagcaagaagttgtggcatgcactggcaaagatgttgtcggagaaagcagcttgggcattagccatggaccgtaggctcaacatggtctctatcaaccctggtcttgtcgtcggaccatctgtcgcacaacacaacgctaggcccaccatgtcataccttaaaggagctgcacaaatgtatgagaatggtgtgttagcttatgtagacgttaagtttctagcggacgttcatattagagcattcgaggatgtttcagcttgcggtcgatacttctgcttcaaccaaatcgtcaacacagaagaagaagctctcaagctagtggagagtttgtctcctttgattcctatgccaccgaggtatgagaatgagatgcacggaagtgaagtttacgaagaaagattaaggaacaacaaattaagcaagctggtagaagctggctctgcttgttaaagaaagatttcacaatttaaattgaaagagacgagattatacaaaaaaaagttgtaatttgtatattgatcttctcatagatgcatgtgttgcttgtgaactattaaaaagaaagaaaaaaaacacatttcatctcattttataactaatagtatatgagtagttttttttttttggctgggggcacaatatgaatgttttctaatttttgttaaacatattaaatcttggtg

SEQ ID NO: 103960 - protein, 303 aa, Arabidopsis thaliana; identical to SEQ ID NO: 42688
  peptide (1)..(303): Ceres Seq. ID no. 13613963
  misc_feature (1)..(303): Homolog of NCBI NO: 15234751 NR Description: cinnamoyl-CoA reductase-related [Arabidopsis
  misc_feature (1)..(303): Homolog of NCBI NO: 21553548 NR Description: cinnamoyl-CoA reductase-like protein [Arabidopsis
  misc_feature (1)..(303): Homolog of NCBI NO: 25412171 NR Description: probable cinnamoyl CoA reductase [imported] -
  misc_feature (1)..(303): Homolog of NCBI NO: 18400407 NR Description: cinnamoyl-CoA reductase-related [Arabidopsis >gi|20197297|gb|AAC63661.2| putative cinnamoyl CoA reductase
  misc_feature (1)..(303): Homolog of NCBI NO: 21553382 NR Description: putative cinnamoyl CoA reductase [Arabidopsis
  misc_feature (1)..(297): Homolog of NCBI NO: 37537132 NR Description: putative cinnamoyl-CoA reductase [Oryza sativa
  misc_feature (11)..(296): Homolog of NCBI NO: 9964087 NR Description: cinnamoyl CoA reductase [Lolium perenne]
  misc_feature (11)..(296): Homolog of NCBI NO: 25140432 NR Description: cinnamoyl CoA reductase [Hordeum vulgare]
  misc_feature (11)..(296): Homolog of NCBI NO: 3341511 NR Description: cinnamoyl-CoA reductase [Saccharum officinarum]
  misc_feature (11)..(296): Homolog of NCBI NO: 3242328 NR Description: cinnamoyl-CoA reductase [Zea mays]

SEQ ID NO: 103961 - protein, 255 aa, Arabidopsis thaliana; identical to SEQ ID NO: 42689
  peptide (1)..(255): Ceres Seq. ID no. 13613964
  misc_feature (1)..(255): Homolog of NCBI NO: 15234751 NR Description: cinnamoyl-CoA reductase-related [Arabidopsis
  misc_feature (1)..(255): Homolog of NCBI NO: 21553548 NR Description: cinnamoyl-CoA reductase-like protein [Arabidopsis
  misc_feature (1)..(255): Homolog of NCBI NO: 25412171 NR Description: probable cinnamoyl CoA reductase [imported] -
  misc_feature (1)..(255): Homolog of NCBI NO: 18400407 NR Description: cinnamoyl-CoA reductase-related [Arabidopsis >gi|20197297|gb|AAC63661.2| putative cinnamoyl CoA reductase
  misc_feature (1)..(255): Homolog of NCBI NO: 21553382 NR Description: putative cinnamoyl CoA reductase [Arabidopsis
  misc_feature (1)..(249): Homolog of NCBI NO: 37537132 NR Description: putative cinnamoyl-CoA reductase [Oryza sativa
  misc_feature (1)..(248): Homolog of NCBI NO: 9964087 NR Description: cinnamoyl CoA reductase [Lolium perenne]
  misc_feature (1)..(248): Homolog of NCBI NO: 25140432 NR Description: cinnamoyl CoA reductase [Hordeum vulgare]
  misc_feature (1)..(248): Homolog of NCBI NO: 3341511 NR Description: cinnamoyl-CoA reductase [Saccharum officinarum]
  misc_feature (1)..(248): Homolog of NCBI NO: 3242328 NR Description: cinnamoyl-CoA reductase [Zea mays]

SEQ ID NO: 103962 - protein, 251 aa, Arabidopsis thaliana; identical to SEQ ID NO: 42690
  peptide (1)..(251): Ceres Seq. ID no. 13613965
  misc_feature (1)..(251): Homolog of NCBI NO: 15234751 NR Description: cinnamoyl-CoA reductase-related [Arabidopsis
  misc_feature (1)..(251): Homolog of NCBI NO: 21553548 NR Description: cinnamoyl-CoA reductase-like protein [Arabidopsis
  misc_feature (1)..(251): Homolog of NCBI NO: 25412171 NR Description: probable cinnamoyl CoA reductase [imported] -
  misc_feature (1)..(251): Homolog of NCBI NO: 18400407 NR Description: cinnamoyl-CoA reductase-related [Arabidopsis >gi|20197297|gb|AAC63661.2| putative cinnamoyl CoA reductase
  misc_feature (1)..(251): Homolog of NCBI NO: 21553382 NR Description: putative cinnamoyl CoA reductase [Arabidopsis
  misc_feature (1)..(245): Homolog of NCBI NO: 37537132 NR Description: putative cinnamoyl-CoA reductase [Oryza sativa
  misc_feature (1)..(244): Homolog of NCBI NO: 9964087 NR Description: cinnamoyl CoA reductase [Lolium perenne]
  misc_feature (1)..(244): Homolog of NCBI NO: 25140432 NR Description: cinnamoyl CoA reductase [Hordeum vulgare]
  misc_feature (1)..(244): Homolog of NCBI NO: 3341511 NR Description: cinnamoyl-CoA reductase [Saccharum officinarum]
  misc_feature (1)..(244): Homolog of NCBI NO: 3242328 NR Description: cinnamoyl-CoA reductase [Zea mays]

SEQ ID NO: 103963 - DNA, 1103 bp, Arabidopsis thaliana
  misc_feature (1)..(1103): Ceres Seq. ID no. 13613966
  misc_feature: MA Experiment ID: 108461 Result: Up-regulated in Transcription
  misc_feature: MA Experiment 108461 PARAMETER Experiment Name: At_Germinating_Seeds_cDNA_P Parameter: Age (day) Value: 1 vs. 0
  misc_feature: MA Experiment 108461 PARAMETER Experiment Name: At_Germinating_Seeds_cDNA_P Parameter: Tissue Value: Germinating Seeds
  misc_feature: MA Experiment ID: 108463 Result: Up-regulated in Transcription
  misc_feature: MA Experiment 108463 PARAMETER Experiment Name: At_Germinating_Seeds_cDNA_P Parameter: Age (day) Value: 3 vs. 0
  misc_feature: MA Experiment 108463 PARAMETER Experiment Name: At_Germinating_Seeds_cDNA_P Parameter: Tissue Value: Germinating Seeds
  misc_feature: MA Experiment ID: 108464 Result: Up-regulated in Transcription
  misc_feature: MA Experiment 108464 PARAMETER Experiment Name: At_Germinating_Seeds_cDNA_P Parameter: Age (day) Value: 4 vs. 0
  misc_feature: MA Experiment 108464 PARAMETER Experiment Name: At_Germinating_Seeds_cDNA_P Parameter: Tissue Value: Germinating Seeds
  misc_feature: MA Experiment ID: 108488 Result: Down-regulated in Transcription
  misc_feature: MA Experiment ID: 108579 Result: Down-regulated in Transcription
  misc_feature: MA Experiment 108579 PARAMETER Experiment Name: At_4deg_Cold_cDNA_P Parameter: Temperature (deg C) Value: 4 vs. 22
  misc_feature: MA Experiment 108579 PARAMETER Experiment Name: At_4deg_Cold_cDNA_P Parameter: Timepoint (hr) Value: 6
  misc_feature: MA Experiment 108579 PARAMETER Experiment Name: At_4deg_Cold_cDNA_P Parameter: Tissue Value: Aerial
  misc_feature: MA Experiment ID: 20000069 Result: Up-regulated in Transcription
  misc_feature: MA Experiment 20000069 PARAMETER Experiment Name: At_100uM_ABA_Mutants_cDNA_P Parameter: Plant Line Value: CS23
  misc_feature: MA Experiment 20000069 PARAMETER Experiment Name: At_100uM_ABA_Mutants_cDNA_P Parameter: Timepoint (hr) Value: 6
  misc_feature: MA Experiment 20000069 PARAMETER Experiment Name: At_100uM_ABA_Mutants_cDNA_P Parameter: Tissue Value: Aerial
  misc_feature: MA Experiment 20000069 PARAMETER Experiment Name: At_100uM_ABA_Mutants_cDNA_P Parameter: Treatment Value: 100uM ABA vs. No Treatment
  misc_feature: MA Experiment ID: 20000071 Result: Up-regulated in Transcription
  misc_feature: MA Experiment 20000071 PARAMETER Experiment Name: At_100uM_ABA_Mutants_cDNA_P Parameter: Plant Line Value: CS8104
  misc_feature: MA Experiment 20000071 PARAMETER Experiment Name: At_100uM_ABA_Mutants_cDNA_P Parameter: Timepoint (hr) Value: 6
  misc_feature: MA Experiment 20000071 PARAMETER Experiment Name: At_100uM_ABA_Mutants_cDNA_P Parameter: Tissue Value: Aerial
  misc_feature: MA Experiment 20000071 PARAMETER Experiment Name: At_100uM_ABA_Mutants_cDNA_P Parameter: Treatment Value: 100uM ABA vs. No Treatment
  misc_feature: MA Experiment ID: 20000072 Result: Up-regulated in Transcription
  misc_feature: MA Experiment 20000072 PARAMETER Experiment Name: At_100uM_ABA_Mutants_cDNA_P Parameter: Plant Line Value: CS8105
  misc_feature: MA Experiment 20000072 PARAMETER Experiment Name: At_100uM_ABA_Mutants_cDNA_P Parameter: Timepoint (hr) Value: 6
  misc_feature: MA Experiment 20000072 PARAMETER Experiment Name: At_100uM_ABA_Mutants_cDNA_P Parameter: Tissue Value: Aerial
  misc_feature: MA Experiment 20000072 PARAMETER Experiment Name: At_100uM_ABA_Mutants_cDNA_P Parameter: Treatment Value: 100uM ABA vs. No Treatment
  misc_feature: MA Experiment ID: 20000086 Result: Up-regulated in Transcription
  misc_feature: MA Experiment 20000086 PARAMETER Experiment Name: At_100uM_ABA_Mutants_cDNA_P Parameter: Plant Line Value: CS22
  misc_feature: MA Experiment 20000086 PARAMETER Experiment Name: At_100uM_ABA_Mutants_cDNA_P Parameter: Timepoint (hr) Value: 6
  misc_feature: MA Experiment 20000086 PARAMETER Experiment Name: At_100uM_ABA_Mutants_cDNA_P Parameter: Tissue Value: Aerial
  misc_feature: MA Experiment 20000086 PARAMETER Experiment Name: At_100uM_ABA_Mutants_cDNA_P Parameter: Treatment Value: 100uM ABA vs. No Treatment
  misc_feature: MA Experiment ID: 20000180 Result: Up-regulated in Transcription
  misc_feature: MA Experiment 20000180 PARAMETER Experiment Name: At_Germinating_Seeds_P Parameter: Age (hr) Value: 24 vs. 0
  misc_feature: MA Experiment 20000180 PARAMETER Experiment Name: At_Germinating_Seeds_P Parameter: Tissue Value: Germinating Seeds
  misc_feature: MA Experiment ID: 20000184 Result: Down-regulated in Transcription
  misc_feature: MA Experiment 20000184 PARAMETER Experiment Name: At_Shoots__P Parameter: Age (day) Value: 7
  misc_feature: MA Experiment 20000184 PARAMETER Experiment Name: At_Shoots__P Parameter: Tissue Value: Shoots vs. Whole Plant
  misc_feature: MA Experiment ID: 20000438 Result: Down-regulated in Transcription
  misc_feature: MA Experiment 20000438 PARAMETER Experiment Name: At_Shoots__P Parameter: Age (day) Value: 14
  misc_feature: MA Experiment 20000438 PARAMETER Experiment Name: At_Shoots__P Parameter: Tissue Value: Shoots vs. Whole Plant
  misc_feature: MA Experiment ID: 20001904 Result: Up-regulated in Transcription
  misc_feature: MA Experiment 20001904 PARAMETER Experiment Name: At_Drought_Reproduction_P Parameter: Age (day) Value: 37
  misc_feature: MA Experiment 20001904 PARAMETER Experiment Name: At_Drought_Reproduction_P Parameter: Organism Value: A. thaliana
  misc_feature: MA Experiment 20001904 PARAMETER Experiment Name: At_Drought_Reproduction_P Parameter: Plant Line Value: WS
  misc_feature: MA Experiment 20001904 PARAMETER Experiment Name: At_Drought_Reproduction_P Parameter: Timepoint (day) Value: 7
  misc_feature: MA Experiment 20001904 PARAMETER Experiment Name: At_Drought_Reproduction_P Parameter: Tissue Value: Rosettes
  misc_feature: MA Experiment 20001904 PARAMETER Experiment Name: At_Drought_Reproduction_P Parameter: Treatment Value: Drought vs. No Drought
  misc_feature: MA Experiment ID: 20001905 Result: Up-regulated in Transcription
  misc_feature: MA Experiment 20001905 PARAMETER Experiment Name: At_Drought_Reproduction_P Parameter: Age (day) Value: 40
  misc_feature: MA Experiment 20001905 PARAMETER Experiment Name: At_Drought_Reproduction_P Parameter: Organism Value: A. thaliana
  misc_feature: MA Experiment 20001905 PARAMETER Experiment Name: At_Drought_Reproduction_P Parameter: Plant Line Value: WS
  misc_feature: MA Experiment 20001905 PARAMETER Experiment Name: At_Drought_Reproduction_P Parameter: Timepoint (day) Value: 10
  misc_feature: MA Experiment 20001905 PARAMETER Experiment Name: At_Drought_Reproduction_P Parameter: Tissue Value: Rosettes
  misc_feature: MA Experiment 20001905 PARAMETER Experiment Name: At_Drought_Reproduction_P Parameter: Treatment Value: Drought vs. No Drought
atagacagctaatctcgatgtgtgattctttttttttcaactaatttttgactattttttttctgttttctttatttaacaaaaatctcacttggcgtgtctgatcttgttccccgtcgtcgtctctaacttacacatttccattctccgaatctctatctctccttttgcttcatcggtgtgatctctgagacgaaagaagaagaagatggtggttattgagcagaagaagaggtttgctttgtttttagcgacgtgtgattcagagttcgtgaagaagacttacggtggttacttcaatgtcttcgtttcaactttcggcgaagaaggtgagcaatgggatctattccgagtcatcgacggacaatttcccgacgagaatgatttagacaagtacgacggtttcgttatcagtggtagtccacatgatgctttcggagacgccgattggattgttaagctttgcgaagtttgtcagaaacttgatcacatgaagaagaaagttctcggcatctgcttcggccaccagataattactagagttaaaggtgggaagataggaagagcactcaaaggtgcagatatgggacttagaagcataaccatagcgaaagacaatgaaaaactacgaggttactttggagacgttgaggtcccagcatctttagctattataaaatgtcatcaggatgaagtgttggaacttcctgagtctgctacactacttgcttcttctgaggtatgtaacgtcgagatgttctctattggagatcattttttctgtattcaagggcatccagagtataacaaagagattctgtttgagattgtggaccgagtccttaatatgaagctgatggagcaagagtttgcggataaggcaaagagtacgatggagactgcgcaaccagacaggattctatggcagaagctctgcaaaaacttcctgaaaggttgatgatccgagactatgttatctctgtatgaacttatcaaaaactatgtcatctctcaataaacctgcagtatctttcatattttatcttcaggaaacagaaagaaacacatataaaacaaatcacaatcacaaataatcttttatg

SEQ ID NO: 103964 - protein, 249 aa, Arabidopsis thaliana
  peptide (1)..(249): Ceres Seq. ID no. 13613967
  misc_feature (21)..(211): Pfam Name: Glutamine amidotransferase class-I Pfam Description: Glutamine amidotransferase class-I
  misc_feature (1)..(249): Homolog of NCBI NO: 15234767 NR Description: glutamine amidotransferase class-I protein [Arabidopsis thaliana] >gi|25407659|pir||D85357
  misc_feature (1)..(249): Homolog of NCBI NO: 17381294 NR Description: AT4g30550/F17I23_110 [Arabidopsis thaliana]
  misc_feature (1)..(249): Homolog of NCBI NO: 21555885 NR Description: unknown [Arabidopsis thaliana]
  misc_feature (3)..(249): Homolog of NCBI NO: 15224079 NR Description: defense-related protein, putative [Arabidopsis
  misc_feature (3)..(249): Homolog of NCBI NO: 15234763 NR Description: glutamine amidotransferase class-I protein [Arabidopsis thaliana] >gi|25407655|pir||B85357
  misc_feature (3)..(248): Homolog of NCBI NO: 21593315 NR Description: defense-related protein [Arabidopsis thaliana]
  misc_feature (3)..(249): Homolog of NCBI NO: 14009290 NR Description: defense-related protein [Brassica carinata]
  misc_feature (3)..(249): Homolog of NCBI NO: 15234765 NR Description: glutamine amidotransferase class-I protein [Arabidopsis thaliana] >gi|25407657|pir||C85357
  misc_feature (5)..(212): Homolog of NCBI NO: 15224078 NR Description: defense-related protein, putative [Arabidopsis
  misc_feature (18)..(249): Homolog of NCBI NO: 13174241 NR Description: putative glutamine synthetase [Oryza sativa]
MVVIEQKKRFALFLATCDSEFVKKTYGGYFNVFVSTFGEEGEQWDLFRVIDGQFPDENDLDKYDGFVISGSPHDAFGDADWIVKLCEVCQKLDHMKKKVLGICFGHQIITRVKGGKIGRALKGADMGLRSITIAKDNEKLRGYFGDVEVPASLAIIKCHQDEVLELPESATLLASSEVCNVEMFSIGDHFFCIQGHPEYNKEILFEIVDRVLNMKLMEQEFADKAKSTMETAQPDRILWQKLCKNFLKG

SEQ ID NO: 103965 - protein, 155 aa, Arabidopsis thaliana
  peptide (1)..(155): Ceres Seq. ID no. 13613968
  misc_feature (1)..(117): Pfam Name: Glutamine amidotransferase class-I Pfam Description: Glutamine amidotransferase class-I
  misc_feature (1)..(155): Homolog of NCBI NO: 15234767 NR Description: glutamine amidotransferase class-I protein [Arabidopsis thaliana] >gi|25407659|pir||D85357
  misc_feature (1)..(155): Homolog of NCBI NO: 17381294 NR Description: AT4g30550/F17I23_110 [Arabidopsis thaliana]
  misc_feature (1)..(155): Homolog of NCBI NO: 21555885 NR Description: unknown [Arabidopsis thaliana]
  misc_feature (1)..(155): Homolog of NCBI NO: 15224079 NR Description: defense-related protein, putative [Arabidopsis
  misc_feature (1)..(155): Homolog of NCBI NO: 15234763 NR Description: glutamine amidotransferase class-I protein [Arabidopsis thaliana] >gi|25407655|pir||B85357
  misc_feature (1)..(154): Homolog of NCBI NO: 21593315 NR Description: defense-related protein [Arabidopsis thaliana]
  misc_feature (1)..(155): Homolog of NCBI NO: 14009290 NR Description: defense-related protein [Brassica carinata]
  misc_feature (1)..(155): Homolog of NCBI NO: 15234765 NR Description: glutamine amidotransferase class-I protein [Arabidopsis thaliana] >gi|25407657|pir||C85357
  misc_feature (1)..(118): Homolog of NCBI NO: 15224078 NR Description: defense-related protein, putative [Arabidopsis
  misc_feature (1)..(155): Homolog of NCBI NO: 13174241 NR Description: putative glutamine synthetase [Oryza sativa]
MKKKVLGICFGHQIITRVKGGKIGRALKGADMGLRSITIAKDNEKLRGYFGDVEVPASLAIIKCHQDEVLELPESATLLASSEVCNVEMFSIGDHFFCIQGHPEYNKEILFEIVDRVLNMKLMEQEFADKAKSTMETAQPDRILWQKLCKNFLKG

SEQ ID NO: 103966 - protein, 124 aa, Arabidopsis thaliana
  peptide (1)..(124): Ceres Seq. ID no. 13613969
  misc_feature (1)..(86): Pfam Name: Glutamine amidotransferase class-I Pfam Description: Glutamine amidotransferase class-I
  misc_feature (1)..(124): Homolog of NCBI NO: 15234767 NR Description: glutamine amidotransferase class-I protein [Arabidopsis thaliana] >gi|25407659|pir||D85357
  misc_feature (1)..(124): Homolog of NCBI NO: 17381294 NR Description: AT4g30550/F17I23_110 [Arabidopsis thaliana]
  misc_feature (1)..(124): Homolog of NCBI NO: 21555885 NR Description: unknown [Arabidopsis thaliana]
  misc_feature (1)..(124): Homolog of NCBI NO: 15224079 NR Description: defense-related protein, putative [Arabidopsis
  misc_feature (1)..(124): Homolog of NCBI NO: 15234763 NR Description: glutamine amidotransferase class-I protein [Arabidopsis thaliana] >gi|25407655|pir||B85357
  misc_feature (1)..(123): Homolog of NCBI NO: 21593315 NR Description: defense-related protein [Arabidopsis thaliana]
  misc_feature (1)..(124): Homolog of NCBI NO: 14009290 NR Description: defense-related protein [Brassica carinata]
  misc_feature (1)..(124): Homolog of NCBI NO: 15234765 NR Description: glutamine amidotransferase class-I protein [Arabidopsis thaliana] >gi|25407657|pir||C85357
  misc_feature (1)..(87): Homolog of NCBI NO: 15224078 NR Description: defense-related protein, putative [Arabidopsis
  misc_feature (1)..(124): Homolog of NCBI NO: 13174241 NR Description: putative glutamine synthetase [Oryza sativa]
MGLRSITIAKDNEKLRGYFGDVEVPASLAIIKCHQDEVLELPESATLLASSEVCNVEMFSIGDHFFCIQGHPEYNKEILFEIVDRVLNMKLMEQEFADKAKSTMETAQPDRILWQKLCKNFLKG

SEQ ID NO: 103967 - DNA, 2371 bp, Arabidopsis thaliana
  misc_feature (1)..(2371): Ceres Seq. ID no. 13613970
  misc_feature: MA Experiment ID: 20000171 Result: Down-regulated in Transcription
  misc_feature: MA Experiment 20000171 PARAMETER Experiment Name: At_42deg_Heat_P Parameter: Age (day) Value: 14
  misc_feature: MA Experiment 20000171 PARAMETER Experiment Name: At_42deg_Heat_P Parameter: Organism Value: A. thaliana
  misc_feature: MA Experiment 20000171 PARAMETER Experiment Name: At_42deg_Heat_P Parameter: Plant Line Value: WS
  misc_feature: MA Experiment 20000171 PARAMETER Experiment Name: At_42deg_Heat_P Parameter: Temperature (deg C) Value: 42 vs. 22
  misc_feature: MA Experiment 20000171 PARAMETER Experiment Name: At_42deg_Heat_P Parameter: Timepoint (hr) Value: 1
  misc_feature: MA Experiment 20000171 PARAMETER Experiment Name: At_42deg_Heat_P Parameter: Tissue Value: Aerial
  misc_feature: MA Experiment ID: 20000173 Result: Down-regulated in Transcription
  misc_feature: MA Experiment 20000173 PARAMETER Experiment Name: At_42deg_Heat_P Parameter: Age (day) Value: 14
  misc_feature: MA Experiment 20000173 PARAMETER Experiment Name: At_42deg_Heat_P Parameter: Organism Value: A. thaliana
  misc_feature: MA Experiment 20000173 PARAMETER Experiment Name: At_42deg_Heat_P Parameter: Plant Line Value: WS
  misc_feature: MA Experiment 20000173 PARAMETER Experiment Name: At_42deg_Heat_P Parameter: Temperature (deg C) Value: 42 vs. 22
  misc_feature: MA Experiment 20000173 PARAMETER Experiment Name: At_42deg_Heat_P Parameter: Timepoint (hr) Value: 6
  misc_feature: MA Experiment 20000173 PARAMETER Experiment Name: At_42deg_Heat_P Parameter: Tissue Value: Aerial
  misc_feature: MA Experiment ID: 20000184 Result: Down-regulated in Transcription
  misc_feature: MA Experiment 20000184 PARAMETER Experiment Name: At_Shoots__P Parameter: Age (day) Value: 7
  misc_feature: MA Experiment 20000184 PARAMETER Experiment Name: At_Shoots__P Parameter: Tissue Value: Shoots vs. Whole Plant
  misc_feature: MA Experiment ID: 20000185 Result: Up-regulated in Transcription
  misc_feature: MA Experiment 20000185 PARAMETER Experiment Name: At_Roots__P Parameter: Age (day) Value: 7 vs. 21
  misc_feature: MA Experiment 20000185 PARAMETER Experiment Name: At_Roots__P Parameter: Organism Value: A. thaliana
  misc_feature: MA Experiment 20000185 PARAMETER Experiment Name: At_Roots__P Parameter: Tissue Value: Roots vs. Whole Plant
  misc_feature: MA Experiment ID: 20000234 Result: Up-regulated in Transcription
  misc_feature: MA Experiment 20000234 PARAMETER Experiment Name: At_Siliques_P Parameter: Age (day) Value: 21
  misc_feature: MA Experiment 20000234 PARAMETER Experiment Name: At_Siliques_P Parameter: Organism Value: A. thaliana
  misc_feature: MA Experiment 20000234 PARAMETER Experiment Name: At_Siliques_P Parameter: Plant Line Value: WS
  misc_feature: MA Experiment 20000234 PARAMETER Experiment Name: At_Siliques_P Parameter: Tissue Value: Less Than 5mm Siliques vs. Whole Plant
  misc_feature: MA Experiment ID: 20000264 Result: Up-regulated in Transcription
  misc_feature: MA Experiment 20000264 PARAMETER Experiment Name: At_Open_Flower_P Parameter: Age (day) Value: 21
  misc_feature: MA Experiment 20000264 PARAMETER Experiment Name: At_Open_Flower_P Parameter: Plant Line Value: WS
  misc_feature: MA Experiment 20000264 PARAMETER Experiment Name: At_Open_Flower_P Parameter: Tissue Value: Open Flower vs. Whole Plant
  misc_feature: MA Experiment ID: 20000265 Result: Up-regulated in Transcription
  misc_feature: MA Experiment 20000265 PARAMETER Experiment Name: At_Open_Flower_P Parameter: Age (day) Value: 21
  misc_feature: MA Experiment 20000265 PARAMETER Experiment Name: At_Open_Flower_P Parameter: Plant Line Value: WS
  misc_feature: MA Experiment 20000265 PARAMETER Experiment Name: At_Open_Flower_P Parameter: Tissue Value: Closed Flower vs. Whole Plant
  misc_feature: MA Experiment ID: 20000286 Result: Up-regulated in Transcription
  misc_feature: MA Experiment 20000286 PARAMETER Experiment Name: At_Open_Flower_P Parameter: Age (day) Value: 21
  misc_feature: MA Experiment 20000286 PARAMETER Experiment Name: At_Open_Flower_P Parameter: Plant Line Value: WS
  misc_feature: MA Experiment 20000286 PARAMETER Experiment Name: At_Open_Flower_P Parameter: Tissue Value: Half Open vs. Whole Plant
  misc_feature: MA Experiment ID: 20000439 Result: Up-regulated in Transcription
  misc_feature: MA Experiment 20000439 PARAMETER Experiment Name: At_Roots__P Parameter: Age (day) Value: 14 vs. 21
  misc_feature: MA Experiment 20000439 PARAMETER Experiment Name: At_Roots__P Parameter: Organism Value: A. thaliana
  misc_feature: MA Experiment 20000439 PARAMETER Experiment Name: At_Roots__P Parameter: Tissue Value: Roots vs. Whole Plant
  misc_feature: MA Experiment ID: 20001451 Result: Down-regulated in Transcription
  misc_feature: MA Experiment 20001451 PARAMETER Experiment Name: At_Far-red-induction_P Parameter: Age (day) Value: 7
  misc_feature: MA Experiment 20001451 PARAMETER Experiment Name: At_Far-red-induction_P Parameter: Light Value: Far-red vs. White
  misc_feature: MA Experiment 20001451 PARAMETER Experiment Name: At_Far-red-induction_P Parameter: Organism Value: A. thaliana
  misc_feature: MA Experiment 20001451 PARAMETER Experiment Name: At_Far-red-induction_P Parameter: Plant Line Value: Columbia
  misc_feature: MA Experiment 20001451 PARAMETER Experiment Name: At_Far-red-induction_P Parameter: Timepoint (hr) Value: 24
  misc_feature: MA Experiment 20001451 PARAMETER Experiment Name: At_Far-red-induction_P Parameter: Tissue Value: Whole Plant
ggtttgggattcatgagttgagtcacaaggaaaaagcatgttagactgtggcaaaaaagcagtcaaatcacaagtaatcagtggccgtctcgagaagtttgtaaggttggatagtatggattctaggtactcgcagacttctgatactggtctaaacagatgcactctcaatttacaaggaccaacacgtggtggtggtgctcagggaaacaatgtatcttctggttcctttaagaaagggtttagaaaaggttctaaaggtctttggtctataggaagatcaattggtttaggggtttcacgagcagtttttcctgaagatcttaaagtatcagagaagaagatttttgatccacaggacaagtttcttttgctctgtaacaaactgtttgttacttcttgcattctcgctgtgtctgtggatccgctcttcttgtatcttccgtttgttaaggataatgagaaatgtatcggtatagaccggaagttggctattatagcaacaacgctgcggacagtaattgatgcgttttatctttttcacatggctcttcggtttagaacagcttttgtcgccccttcttctcgggtttttggtcgaggcgaacttgtgattgaccctgcacagatagcaaaacgttatttgcagcagtatttcatcattgactttctctctgtgcttccacttccacagattgtagtttggagatttctttacatctctaaaggtgcaagtgtgctagcaacaaagcgggcattgcgatctatcattttagttcaatatattccaagattcattcggttgtatcctttgagctcagagttaaagagaacagctggtgtttttgctgaaactgcttgggctggtgcagcttattacttgctactctacatgctcgcaagccatattgttggggctatatggtacttattggccttggaacgttataatggatgctggaccaaggtttgcagtaatagcagcttggactgtcacagaaacttcctgttttgtggtaatgaaaaaatggatggttatgcagcttggactaccatcaaagattctgttctgcaattaaattgcccagttaatacaaccgataatcctccttttgattttgggatctacttaagagccttgtcctctggcattgtctcatctaagagctttgtctctaagtacttcttctgtttatggtggggacttcagaatctcagcactcttggtcaagggcttgaaaccagcacataccctggagaagttatattctccatagcacttgccattgctggacttcttctctttgctcttcttattggaaacatgcagacttatcttcaatcccttacaatccggcttgaagaaatgagagtgaaaagacgtgattcagaacagtggatgcatcatcgaatgcttccaccggaactgcgagaacgagtcagacgatatgaccagtacaaatggttggagacacgcggagttgatgaagagaatttggttcagaacctcccaaaggatctgagaagagatatcaaacgccatctctgtctggctttggttcggagggttccattgtttgagaatatggatgagaggctgctcgatgcaatctgtgagcggttgaagccgtgtctgtacacagagagctcttatttggttcgggaaggcgacccggttaacgagatgctcttcattatccgtggtcggcttgagagtgtgaccaccgatggcggaagaagcggtttcttcaaccgcagtttgcttaaagaaggagatttctgtggggaagagcttttgacatgggcacttgatcccaaatctggttccaacctaccatcctctaccagaaccgcaaaggctctaactgaagtagaggcttttgctttgatagcagatgagctcaaatttgtggctagccagttcagaagactacacagcaggcaagttcaacacacattcagattctactcgcaacaatggagaacttgggctgctatcttcatacaagccgcgtggcgacgatacgtgaagaagaagaaacttgagcaactcaggaaagaagaagaagaaggagaaggatcagttactagcatcagagcgacgttcctggcttcaaagtttgctgcaaatgcacttcgtaaagttcacaagaaccgtattgaagcaaagtctactatagaacttgtgaaatatcagaagccttcagaacctgatttctctgctgatgatactagttgaccaaattttaccagaaaagtgctaatgtctatgaacgcttataacttgtataactcggattgaattttattgtttgatttgtgttgctacattaagataaagaaaaaggtggtaacataaaagattatttgt

SEQ ID NO: 103968 - protein, 733 aa, Arabidopsis thaliana
  peptide (1)..(733): Ceres Seq. ID no. 13613971
  misc_feature (154)..(430): Pfam Name: Ion transport protein Pfam Description: Ion transport protein
  misc_feature (281)..(731): Homolog of NCBI NO: 25412181 NR Description: hypothetical protein At2g23980 [imported] -
  misc_feature (27)..(276): Homolog of NCBI NO: 25412181 NR Description: hypothetical protein At2g23980 [imported] -
  misc_feature (14)..(730): Homolog of NCBI NO: 30696976 NR Description: cyclic nucleotide-regulated ion channel (CNGC5)
  misc_feature (14)..(730): Homolog of NCBI NO: 15242908 NR Description: cyclic nucleotide-regulated ion channel (CNGC5)
  misc_feature (10)..(680): Homolog of NCBI NO: 25513728 NR Description: probable cyclic nucleotide and
  misc_feature (37)..(680): Homolog of NCBI NO: 15223667 NR Description: cyclic nucleotide-regulated ion channel, putative
  misc_feature (61)..(680): Homolog of NCBI NO: 15219100 NR Description: cyclic nucleotide-regulated ion channel, putative
  misc_feature (8)..(731): Homolog of NCBI NO: 38344883 NR Description: OSJNBa0033G05.7 [Oryza sativa (japonica
  misc_feature (17)..(731): Homolog of NCBI NO: 15238657 NR Description: cyclic nucleotide-regulated ion channel (CNGC1)
  misc_feature (94)..(733): Homolog of NCBI NO: 18378827 NR Description: cyclic nucleotide-regulated ion channel [Arabidopsis thaliana] >gi|25518607|pir||F86143 hypothetical
MLDCGKKAVKSQVISGRLEKFVRLDSMDSRYSQTSDTGLNRCTLNLQGPTRGGGAQGNNVSSGSFKKGFRKGSKGLWSIGRSIGLGVSRAVFPEDLKVSEKKIFDPQDKFLLLCNKLFVTSCILAVSVDPLFLYLPFVKDNEKCIGIDRKLAIIATTLRTVIDAFYLFHMALRFRTAFVAPSSRVFGRGELVIDPAQIAKRYLQQYFIIDFLSVLPLPQIVVWRFLYISKGASVLATKRALRSIILVQYIPRFIRLYPLSSELKRTAGVFAETAWAGAAYYLLLYMLASHIVGAIWYLLALERYNGCWTKVCSNSSLDCHRNFLFCGNEKMDGYAAWTTIKDSVLQLNCPVNTTDNPPFDFGIYLRALSSGIVSSKSFVSKYFFCLWWGLQNLSTLGQGLETSTYPGEVIFSIALAIAGLLLFALLIGNMQTYLQSLTIRLEEMRVKRRDSEQWMHHRMLPPELRERVRRYDQYKWLETRGVDEENLVQNLPKDLRRDIKRHLCLALVRRVPLFENMDERLLDAICERLKPCLYTESSYLVREGDPVNEMLFIIRGRLESVTTDGGRSGFFNRSLLKEGDFCGEELLTWALDPKSGSNLPSSTRTAKALTEVEAFALIADELKFVASQFRRLHSRQVQHTFRFYSQQWRTWAAIFIQAAWRRYVKKKKLEQLRKEEEEGEGSVTSIRATFLASKFAANALRKVHKNRIEAKSTIELVKYQKPSEPDFSADDTS

SEQ ID NO: 103969 - protein, 707 aa, Arabidopsis thaliana
  peptide (1)..(707): Ceres Seq. ID no. 13613972
  misc_feature (128)..(404): Pfam Name: Ion transport protein Pfam Description: Ion transport protein
  misc_feature (255)..(705): Homolog of NCBI NO: 25412181 NR Description: hypothetical protein At2g23980 [imported] -
  misc_feature (1)..(250): Homolog of NCBI NO: 25412181 NR Description: hypothetical protein At2g23980 [imported] -
  misc_feature (1)..(704): Homolog of NCBI NO: 30696976 NR Description: cyclic nucleotide-regulated ion channel (CNGC5)
  misc_feature (1)..(704): Homolog of NCBI NO: 15242908 NR Description: cyclic nucleotide-regulated ion channel (CNGC5)
  misc_feature (1)..(654): Homolog of NCBI NO: 25513728 NR Description: probable cyclic nucleotide and
  misc_feature (11)..(654): Homolog of NCBI NO: 15223667 NR Description: cyclic nucleotide-regulated ion channel, putative
  misc_feature (35)..(654): Homolog of NCBI NO: 15219100 NR Description: cyclic nucleotide-regulated ion channel, putative
  misc_feature (1)..(705): Homolog of NCBI NO: 38344883 NR Description: OSJNBa0033G05.7 [Oryza sativa (japonica
  misc_feature (1)..(705): Homolog of NCBI NO: 15238657 NR Description: cyclic nucleotide-regulated ion channel (CNGC1)
  misc_feature (68)..(707): Homolog of NCBI NO: 18378827 NR Description: cyclic nucleotide-regulated ion channel [Arabidopsis thaliana] >gi|25518607|pir||F86143 hypothetical
MDSRYSQTSDTGLNRCTLNLQGPTRGGGAQGNNVSSGSFKKGFRKGSKGLWSIGRSIGLGVSRAVFPEDLKVSEKKIFDPQDKFLLLCNKLFVTSCILAVSVDPLFLYLPFVKDNEKCIGIDRKLAIIATTLRTVIDAFYLFHMALRFRTAFVAPSSRVFGRGELVIDPAQIAKRYLQQYFIIDFLSVLPLPQIVVWRFLYISKGASVLATKRALRSIILVQYIPRFIRLYPLSSELKRTAGVFAETAWAGAAYYLLLYMLASHIVGAIWYLLALERYNGCWTKVCSNSSLDCHRNFLFCGNEKMDGYAAWTTIKDSVLQLNCPVNTTDNPPFDFGIYLRALSSGIVSSKSFVSKYFFCLWWGLQNLSTLGQGLETSTYPGEVIFSIALAIAGLLLFALLIGNMQTYLQSLTIRLEEMRVKRRDSEQWMHHRMLPPELRERVRRYDQYKWLETRGVDEENLVQNLPKDLRRDIKRHLCLALVRRVPLFENMDERLLDAICERLKPCLYTESSYLVREGDPVNEMLFIIRGRLESVTTDGGRSGFFNRSLLKEGDFCGEELLTWALDPKSGSNLPSSTRTAKALTEVEAFALIADELKFVASQFRRLHSRQVQHTFRFYSQQWRTWAAIFIQAAWRRYVKKKKLEQLRKEEEEGEGSVTSIRATFLASKFAANALRKVHKNRIEAKSTIELVKYQKPSEPDFSADDTS

SEQ ID NO: 103970 - protein, 564 aa, Arabidopsis thaliana
  peptide (1)..(564): Ceres Seq. ID no. 13613973
  misc_feature (1)..(261): Pfam Name: Ion transport protein Pfam Description: Ion transport protein
  misc_feature (112)..(562): Homolog of NCBI NO: 25412181 NR Description: hypothetical protein At2g23980 [imported] -
  misc_feature (1)..(107): Homolog of NCBI NO: 25412181 NR Description: hypothetical protein At2g23980 [imported] -
  misc_feature (1)..(561): Homolog of NCBI NO: 30696976 NR Description: cyclic nucleotide-regulated ion channel (CNGC5)
  misc_feature (1)..(561): Homolog of NCBI NO: 15242908 NR Description: cyclic nucleotide-regulated ion channel (CNGC5)
  misc_feature (1)..(511): Homolog of NCBI NO: 25513728 NR Description: probable cyclic nucleotide and
  misc_feature (1)..(511): Homolog of NCBI NO: 15223667 NR Description: cyclic nucleotide-regulated ion channel, putative
  misc_feature (1)..(511): Homolog of NCBI NO: 15219100 NR Description: cyclic nucleotide-regulated ion channel, putative
  misc_feature (1)..(562): Homolog of NCBI NO: 38344883 NR Description: OSJNBa0033G05.7 [Oryza sativa (japonica
  misc_feature (1)..(562): Homolog of NCBI NO: 15238657 NR Description: cyclic nucleotide-regulated ion channel (CNGC1)
  misc_feature (1)..(564): Homolog of NCBI NO: 18378827 NR Description: cyclic nucleotide-regulated ion channel [Arabidopsis thaliana] >gi|25518607|pir||F86143 hypothetical
MALRFRTAFVAPSSRVFGRGELVIDPAQIAKRYLQQYFIIDFLSVLPLPQIVVWRFLYISKGASVLATKRALRSIILVQYIPRFIRLYPLSSELKRTAGVFAETAWAGAAYYLLLYMLASHIVGAIWYLLALERYNGCWTKVCSNSSLDCHRNFLFCGNEKMDGYAAWTTIKDSVLQLNCPVNTTDNPPFDFGIYLRALSSGIVSSKSFVSKYFFCLWWGLQNLSTLGQGLETSTYPGEVIFSIALAIAGLLLFALLIGNMQTYLQSLTIRLEEMRVKRRDSEQWMHHRMLPPELRERVRRYDQYKWLETRGVDEENLVQNLPKDLRRDIKRHLCLALVRRVPLFENMDERLLDAICERLKPCLYTESSYLVREGDPVNEMLFIIRGRLESVTTDGGRSGFFNRSLLKEGDFCGEELLTWALDPKSGSNLPSSTRTAKALTEVEAFALIADELKFVASQFRRLHSRQVQHTFRFYSQQWRTWAAIFIQAAWRRYVKKKKLEQLRKEEEEGEGSVTSIRATFLASKFAANALRKVHKNRIEAKSTIELVKYQKPSEPDFSADDTS

SEQ ID NO: 103971 - DNA, 1323 bp, Arabidopsis thaliana
  misc_feature (1)..(1323): Ceres Seq. ID no. 13613999
  misc_feature: MA Experiment ID: 108434 Result: Up-regulated in Transcription
  misc_feature: MA Experiment 108434 PARAMETER Experiment Name: At_Root_Tips_cDNA_P Parameter: Tissue Value: Root Tips
  misc_feature: MA Experiment ID: 108462 Result: Down-regulated in Transcription
  misc_feature: MA Experiment 108462 PARAMETER Experiment Name: At_Germinating_Seeds_cDNA_P Parameter: Age (day) Value: 2 vs. 0
  misc_feature: MA Experiment 108462 PARAMETER Experiment Name: At_Germinating_Seeds_cDNA_P Parameter: Tissue Value: Germinating Seeds
  misc_feature: MA Experiment ID: 108463 Result: Down-regulated in Transcription
  misc_feature: MA Experiment 108463 PARAMETER Experiment Name: At_Germinating_Seeds_cDNA_P Parameter: Age (day) Value: 3 vs. 0
  misc_feature: MA Experiment 108463 PARAMETER Experiment Name: At_Germinating_Seeds_cDNA_P Parameter: Tissue Value: Germinating Seeds
  misc_feature: MA Experiment ID: 108464 Result: Down-regulated in Transcription
  misc_feature: MA Experiment 108464 PARAMETER Experiment Name: At_Germinating_Seeds_cDNA_P Parameter: Age (day) Value: 4 vs. 0
  misc_feature: MA Experiment 108464 PARAMETER Experiment Name: At_Germinating_Seeds_cDNA_P Parameter: Tissue Value: Germinating Seeds
  misc_feature: MA Experiment ID: 20000090 Result: Up-regulated in Transcription
  misc_feature: MA Experiment ID: 20000180 Result: Down-regulated in Transcription
  misc_feature: MA Experiment 20000180 PARAMETER Experiment Name: At_Germinating_Seeds_P Parameter: Age (hr) Value: 24 vs. 0
  misc_feature: MA Experiment 20000180 PARAMETER Experiment Name: At_Germinating_Seeds_P Parameter: Tissue Value: Germinating Seeds
  misc_feature: MA Experiment ID: 20000227 Result: Up-regulated in Transcription
  misc_feature: MA Experiment 20000227 PARAMETER Experiment Name: At_Root-Tips-vs-Tops_P Parameter: Tissue Value: Root Tips vs. Root Tops
  misc_feature: MA Experiment ID: 20000794 Result: Down-regulated in Transcription
  misc_feature: MA Experiment 20000794 PARAMETER Experiment Name: At_Petals_P Parameter: Age (day) Value: 23-25 days
  misc_feature: MA Experiment 20000794 PARAMETER Experiment Name: At_Petals_P Parameter: Plant Line Value: WS
  misc_feature: MA Experiment 20000794 PARAMETER Experiment Name: At_Petals_P Parameter: Tissue Value: Petals vs. Whole plant
  misc_feature: MA Experiment ID: 20001556 Result: Up-regulated in Transcription
  misc_feature: MA Experiment 20001556 PARAMETER Experiment Name: At_Drought_Soil_Dry_P Parameter: Age (day) Value: 26
  misc_feature: MA Experiment 20001556 PARAMETER Experiment Name: At_Drought_Soil_Dry_P Parameter: Organism Value: A. thaliana
  misc_feature: MA Experiment 20001556 PARAMETER Experiment Name: At_Drought_Soil_Dry_P Parameter: Plant Line Value: WS
  misc_feature: MA Experiment 20001556 PARAMETER Experiment Name: At_Drought_Soil_Dry_P Parameter: Post Timepoint (hr) Value: None
  misc_feature: MA Experiment 20001556 PARAMETER Experiment Name: At_Drought_Soil_Dry_P Parameter: Post-Treatment Value: None
  misc_feature: MA Experiment 20001556 PARAMETER Experiment Name: At_Drought_Soil_Dry_P Parameter: Timepoint (day) Value: 12
  misc_feature: MA Experiment 20001556 PARAMETER Experiment Name: At_Drought_Soil_Dry_P Parameter: Treatment Value: Drought vs. No Drought
  misc_feature: MA Experiment ID: 20001557 Result: Up-regulated in Transcription
  misc_feature: MA Experiment 20001557 PARAMETER Experiment Name: At_Drought_Soil_Dry_P Parameter: Age (day) Value: 27
  misc_feature: MA Experiment 20001557 PARAMETER Experiment Name: At_Drought_Soil_Dry_P Parameter: Organism Value: A. thaliana
  misc_feature: MA Experiment 20001557 PARAMETER Experiment Name: At_Drought_Soil_Dry_P Parameter: Plant Line Value: WS
  misc_feature: MA Experiment 20001557 PARAMETER Experiment Name: At_Drought_Soil_Dry_P Parameter: Post Timepoint (hr) Value: 3
  misc_feature: MA Experiment 20001557 PARAMETER Experiment Name: At_Drought_Soil_Dry_P Parameter: Post-Treatment Value: Re-Water vs. No Drought
  misc_feature: MA Experiment 20001557 PARAMETER Experiment Name: At_Drought_Soil_Dry_P Parameter: Timepoint (day) Value: 13
  misc_feature: MA Experiment 20001557 PARAMETER Experiment Name: At_Drought_Soil_Dry_P Parameter: Treatment Value: Drought vs. No Drought
  misc_feature: MA Experiment ID: 20001558 Result: Up-regulated in Transcription
  misc_feature: MA Experiment 20001558 PARAMETER Experiment Name: At_Drought_Soil_Dry_P Parameter: Age (day) Value: 27
  misc_feature: MA Experiment 20001558 PARAMETER Experiment Name: At_Drought_Soil_Dry_P Parameter: Organism Value: A. thaliana
  misc_feature: MA Experiment 20001558 PARAMETER Experiment Name: At_Drought_Soil_Dry_P Parameter: Plant Line Value: WS
  misc_feature: MA Experiment 20001558 PARAMETER Experiment Name: At_Drought_Soil_Dry_P Parameter: Post Timepoint (hr) Value: 6
  misc_feature: MA Experiment 20001558 PARAMETER Experiment Name: At_Drought_Soil_Dry_P Parameter: Post-Treatment Value: Re-Water vs. No Drought
  misc_feature: MA Experiment 20001558 PARAMETER Experiment Name: At_Drought_Soil_Dry_P Parameter: Timepoint (day) Value: 13
  misc_feature: MA Experiment 20001558 PARAMETER Experiment Name: At_Drought_Soil_Dry_P Parameter: Treatment Value: Drought vs. No Drought
  misc_feature: MA Experiment ID: 20001560 Result: Up-regulated in Transcription
  misc_feature: MA Experiment 20001560 PARAMETER Experiment Name: At_Drought_Soil_Dry_P Parameter: Age (day) Value: 28
  misc_feature: MA Experiment 20001560 PARAMETER Experiment Name: At_Drought_Soil_Dry_P Parameter: Organism Value: A. thaliana
  misc_feature: MA Experiment 20001560 PARAMETER Experiment Name: At_Drought_Soil_Dry_P Parameter: Plant Line Value: WS
  misc_feature: MA Experiment 20001560 PARAMETER Experiment Name: At_Drought_Soil_Dry_P Parameter: Post Timepoint (hr) Value: None
  misc_feature: MA Experiment 20001560 PARAMETER Experiment Name: At_Drought_Soil_Dry_P Parameter: Post-Treatment Value: None
  misc_feature: MA Experiment 20001560 PARAMETER Experiment Name: At_Drought_Soil_Dry_P Parameter: Timepoint (day) Value: 14
  misc_feature: MA Experiment 20001560 PARAMETER Experiment Name: At_Drought_Soil_Dry_P Parameter: Treatment Value: Drought vs. No Drought
aaaaccctagaaaacctctggagctatggagatgatgcaggattcgttccaagtccataggattccacaatcgaagtatgtcgatggagttagatggcttccacaagcttctgctttgaatcgtttcttcgcaacagcgtcctatgacgcggattgtgattcttcatcaatcgagatccaatcgctcgacccaaaccctagagggaatcacaacacgaacccgttaatcgagtcgttatcttcatggacttcaccttctcgcgtttcgtctctagaagtcgcgggaaacggcggtggtggcggttcattcaaaccaatggtttcagcagctacgtcttctggttctcttcacgttctgatgattgatttggtggaaggagctgcgattgaagagttttacgcggcggaaggggagaggtttcatgtgggacgcgtggaaggtgtggattggagagagggaggagaatgtgttactgttggtgaagatgggagagtgaatgtagtgaagattgtgaatggtgaaggtttaaggtatagaaaggtctttgatgggaatggattggtggcttatagagctgtgaaatgggcttctccgactgagtttgttactggaggatatggttttggtttgcaattgtgggatcagaggaagtctggtgaagctgtttcacaactcaaagggaactggtttcaaggcaaaacttctgcaattgtccactccattgacattcatccatctcggaagcacacttgcattgcaggaggttcttcaggtactgtatttgcttgggatcttcggtggccacagcaacccattgttctttctggggttggagcaagtgagaatataaacaatcctctgtctgaaagtgaggtatgggaagttcagtatgactcatacacaaaatccaacgtctcatcctcaaggattctccctgttatgacctgctctgaagatggaatccttggtatcatagaacaaggggaagaaccaatcgagcttctggctgaaccttgtgccattaacagttttgacatcgacaggcaaaatccacaggatgtgatatgtagcttggagtgggaatcaatagcagttttctcaaggccttagtataatatggaactgtgcacggtatgctatgttttcttctgcgagctacaacgaagaaattgaggaaggtagtgatagatgatgagagacaagtttaaggaagagggtgtggaatgtgtttataagtttcattataacaagatcttaaaatacagtctgcacaaacagagttttgtattcatcttaaagttagtgtgatcttgaagatttgc

SEQ ID NO: 103972 - protein, 361 aa, Arabidopsis thaliana
  peptide (1)..(361): Ceres Seq. ID no. 13614000
  misc_feature (1)..(361): Homolog of NCBI NO: 18417678 NR Description: WD-40 repeat protein family [Arabidopsis thaliana]
  misc_feature (4)..(361): Homolog of NCBI NO: 21554881 NR Description: unknown [Arabidopsis thaliana]
  misc_feature (1)..(244): Homolog of NCBI NO: 25372649 NR Description: hypothetical protein AT4g30840 [imported] - thaliana >gi|2980782|emb|CAA18209.1| hypothetical protein thaliana] >gi|7269985|emb|CAB79802.1| hypothetical protein
  misc_feature (246)..(344): Homolog of NCBI NO: 25372649 NR Description: hypothetical protein AT4g30840 [imported] - thaliana >gi|2980782|emb|CAA18209.1| hypothetical protein thaliana] >gi|7269985|emb|CAB79802.1| hypothetical protein
  misc_feature (147)..(289): Homolog of NCBI NO: 30851621 NR Description: 2610529I12Rik protein [Mus musculus]
  misc_feature (147)..(289): Homolog of NCBI NO: 27923818 NR Description: Nucleoporin Nup43 >gi|26354845|dbj|BAC41049.1|
MEMMQDSFQVHRIPQSKYVDGVRWLPQASALNRFFATASYDADCDSSSIEIQSLDPNPRGNHNTNPLIESLSSWTSPSRVSSLEVAGNGGGGGSFKPMVSAATSSGSLHVLMIDLVEGAAIEEFYAAEGERFHVGRVEGVDWREGGECVTVGEDGRVNVVKIVNGEGLRYRKVFDGNGLVAYRAVKWASPTEFVTGGYGFGLQLWDQRKSGEAVSQLKGNWFQGKTSAIVHSIDIHPSRKHTCIAGGSSGTVFAWDLRWPQQPIVLSGVGASENINNPLSESEVWEVQYDSYTKSNVSSSRILPVMTCSEDGILGIIEQGEEPIELLAEPCAINSFDIDRQNPQDVICSLEWESIAVFSRP

SEQ ID NO: 103973 - protein, 359 aa, Arabidopsis thaliana
  peptide (1)..(359): Ceres Seq. ID no. 13614001
  misc_feature (1)..(359): Homolog of NCBI NO: 18417678 NR Description: WD-40 repeat protein family [Arabidopsis thaliana]
  misc_feature (2)..(359): Homolog of NCBI NO: 21554881 NR Description: unknown [Arabidopsis thaliana]
  misc_feature (1)..(242): Homolog of NCBI NO: 25372649 NR Description: hypothetical protein AT4g30840 [imported] - thaliana >gi|2980782|emb|CAA18209.1| hypothetical protein thaliana] >gi|7269985|emb|CAB79802.1| hypothetical protein
  misc_feature (244)..(342): Homolog of NCBI NO: 25372649 NR Description: hypothetical protein AT4g30840 [imported] - thaliana >gi|2980782|emb|CAA18209.1| hypothetical protein thaliana] >gi|7269985|emb|CAB79802.1| hypothetical protein
  misc_feature (145)..(287): Homolog of NCBI NO: 30851621 NR Description: 2610529I12Rik protein [Mus musculus]
  misc_feature (145)..(287): Homolog of NCBI NO: 27923818 NR Description: Nucleoporin Nup43 >gi|26354845|dbj|BAC41049.1|
MMQDSFQVHRIPQSKYVDGVRWLPQASALNRFFATASYDADCDSSSIEIQSLDPNPRGNHNTNPLIESLSSWTSPSRVSSLEVAGNGGGGGSFKPMVSAATSSGSLHVLMIDLVEGAAIEEFYAAEGERFHVGRVEGVDWREGGECVTVGEDGRVNVVKIVNGEGLRYRKVFDGNGLVAYRAVKWASPTEFVTGGYGFGLQLWDQRKSGEAVSQLKGNWFQGKTSAIVHSIDIHPSRKHTCIAGGSSGTVFAWDLRWPQQPIVLSGVGASENINNPLSESEVWEVQYDSYTKSNVSSSRILPVMTCSEDGILGIIEQGEEPIELLAEPCAINSFDIDRQNPQDVICSLEWESIAVFSRP

SEQ ID NO: 103974 - protein, 358 aa, Arabidopsis thaliana
  peptide (1)..(358): Ceres Seq. ID no. 13614002
  misc_feature (1)..(358): Homolog of NCBI NO: 18417678 NR Description: WD-40 repeat protein family [Arabidopsis thaliana]
  misc_feature (1)..(358): Homolog of NCBI NO: 21554881 NR Description: unknown [Arabidopsis thaliana]
  misc_feature (1)..(241): Homolog of NCBI NO: 25372649 NR Description: hypothetical protein AT4g30840 [imported] - thaliana >gi|2980782|emb|CAA18209.1| hypothetical protein thaliana] >gi|7269985|emb|CAB79802.1| hypothetical protein
  misc_feature (243)..(341): Homolog of NCBI NO: 25372649 NR Description: hypothetical protein AT4g30840 [imported] - thaliana >gi|2980782|emb|CAA18209.1| hypothetical protein thaliana] >gi|7269985|emb|CAB79802.1| hypothetical protein
  misc_feature (144)..(286): Homolog of NCBI NO: 30851621 NR Description: 2610529I12Rik protein [Mus musculus]
  misc_feature (144)..(286): Homolog of NCBI NO: 27923818 NR Description: Nucleoporin Nup43 >gi|26354845|dbj|BAC41049.1|
MQDSFQVHRIPQSKYVDGVRWLPQASALNRFFATASYDADCDSSSIEIQSLDPNPRGNHNTNPLIESLSSWTSPSRVSSLEVAGNGGGGGSFKPMVSAATSSGSLHVLMIDLVEGAAIEEFYAAEGERFHVGRVEGVDWREGGECVTVGEDGRVNVVKIVNGEGLRYRKVFDGNGLVAYRAVKWASPTEFVTGGYGFGLQLWDQRKSGEAVSQLKGNWFQGKTSAIVHSIDIHPSRKHTCIAGGSSGTVFAWDLRWPQQPIVLSGVGASENINNPLSESEVWEVQYDSYTKSNVSSSRILPVMTCSEDGILGIIEQGEEPIELLAEPCAINSFDIDRQNPQDVICSLEWESIAVFSRP

SEQ ID NO: 103975 - DNA, 1922 bp, Arabidopsis thaliana
  misc_feature (1)..(1922): Ceres Seq. ID no. 13614011
  misc_feature: MA Experiment ID: 108433 Result: Down-regulated in Transcription
  misc_feature: MA Experiment 108433 PARAMETER Experiment Name: At_rhl_Mutant2_cDNA_P Parameter: Age (day) Value: 7
  misc_feature: MA Experiment 108433 PARAMETER Experiment Name: At_rhl_Mutant2_cDNA_P Parameter: Organism Value: A. thaliana
  misc_feature: MA Experiment 108433 PARAMETER Experiment Name: At_rhl_Mutant2_cDNA_P Parameter: Plant Line Value: rhl Mutant vs. wt landsburg
  misc_feature: MA Experiment 108433 PARAMETER Experiment Name: At_rhl_Mutant2_cDNA_P Parameter: Tissue Value: Roots
  misc_feature: MA Experiment ID: 108461 Result: Up-regulated in Transcription
  misc_feature: MA Experiment 108461 PARAMETER Experiment Name: At_Germinating_Seeds_cDNA_P Parameter: Age (day) Value: 1 vs. 0
  misc_feature: MA Experiment 108461 PARAMETER Experiment Name: At_Germinating_Seeds_cDNA_P Parameter: Tissue Value: Germinating Seeds
  misc_feature: MA Experiment ID: 108569 Result: Up-regulated in Transcription
  misc_feature: MA Experiment 108569 PARAMETER Experiment Name: At_0.001%_MeJA__cDNA_P Parameter: Timepoint (hr) Value: 6
  misc_feature: MA Experiment 108569 PARAMETER Experiment Name: At_0.001%_MeJA__cDNA_P Parameter: Tissue Value: Aerial
  misc_feature: MA Experiment 108569 PARAMETER Experiment Name: At_0.001%_MeJA__cDNA_P Parameter: Treatment Value: 0.001% MeJA vs. No Treatment
  misc_feature: MA Experiment ID: 108573 Result: Up-regulated in Transcription
  misc_feature: MA Experiment 108573 PARAMETER Experiment Name: At_Drought_cDNA_P Parameter: Timepoint (hr) Value: 6
  misc_feature: MA Experiment 108573 PARAMETER Experiment Name: At_Drought_cDNA_P Parameter: Tissue Value: Aerial
  misc_feature: MA Experiment 108573 PARAMETER Experiment Name: At_Drought_cDNA_P Parameter: Treatment Value: Drought vs. No Drought
  misc_feature: MA Experiment ID: 108576 Result: Down-regulated in Transcription
  misc_feature: MA Experiment 108576 PARAMETER Experiment Name: At_42deg_Heat_cDNA_P Parameter: Temperature (deg C) Value: 42 vs. 22
  misc_feature: MA Experiment 108576 PARAMETER Experiment Name: At_42deg_Heat_cDNA_P Parameter: Timepoint (hr) Value: 1
  misc_feature: MA Experiment 108576 PARAMETER Experiment Name: At_42deg_Heat_cDNA_P Parameter: Tissue Value: Aerial
  misc_feature: MA Experiment ID: 108668 Result: Up-regulated in Transcription
  misc_feature: MA Experiment 108668 PARAMETER Experiment Name: At_2mM_SA_cDNA_P Parameter: Plant Line Value: WS
  misc_feature: MA Experiment 108668 PARAMETER Experiment Name: At_2mM_SA_cDNA_P Parameter: Timepoint (hr) Value: 6
  misc_feature: MA Experiment 108668 PARAMETER Experiment Name: At_2mM_SA_cDNA_P Parameter: Treatment Value: 2mM SA vs. No Treatment
  misc_feature: MA Experiment ID: 20000111 Result: Down-regulated in Transcription
  misc_feature: MA Experiment 20000111 PARAMETER Experiment Name: At_42deg_Heat_cDNA_P Parameter: Temperature (deg C) Value: 42 vs. 22
  misc_feature: MA Experiment 20000111 PARAMETER Experiment Name: At_42deg_Heat_cDNA_P Parameter: Timepoint (hr) Value: 6
  misc_feature: MA Experiment 20000111 PARAMETER Experiment Name: At_42deg_Heat_cDNA_P Parameter: Tissue Value: Aerial
  misc_feature: MA Experiment ID: 20000113 Result: Down-regulated in Transcription
  misc_feature: MA Experiment 20000113 PARAMETER Experiment Name: At_42deg_Heat_cDNA_P Parameter: Temperature (deg C) Value: 42 vs. 22
  misc_feature: MA Experiment 20000113 PARAMETER Experiment Name: At_42deg_Heat_cDNA_P Parameter: Timepoint (hr) Value: 8
  misc_feature: MA Experiment 20000113 PARAMETER Experiment Name: At_42deg_Heat_cDNA_P Parameter: Tissue Value: Aerial
  misc_feature: MA Experiment ID: 20000182 Result: Up-regulated in Transcription
  misc_feature: MA Experiment 20000182 PARAMETER Experiment Name: At_2mM_SA_P Parameter: Age (day) Value: 14
  misc_feature: MA Experiment 20000182 PARAMETER Experiment Name: At_2mM_SA_P Parameter: Organism Value: A. thaliana
  misc_feature: MA Experiment 20000182 PARAMETER Experiment Name: At_2mM_SA_P Parameter: Plant Line Value: WS
  misc_feature: MA Experiment 20000182 PARAMETER Experiment Name: At_2mM_SA_P Parameter: Timepoint (hr) Value: 6
  misc_feature: MA Experiment 20000182 PARAMETER Experiment Name: At_2mM_SA_P Parameter: Tissue Value: Aerial
  misc_feature: MA Experiment 20000182 PARAMETER Experiment Name: At_2mM_SA_P Parameter: Treatment Value: 2mM SA vs. No Treatment
  misc_feature: MA Experiment ID: 20001757 Result: Down-regulated in Transcription
  misc_feature: MA Experiment 20001757 PARAMETER Experiment Name: At_50mM_NH4NO3_L-to-H_P Parameter: Timepoint (hr) Value: 6
  misc_feature: MA Experiment 20001757 PARAMETER Experiment Name: At_50mM_NH4NO3_L-to-H_P Parameter: Tissue Value: Leaf
  misc_feature: MA Experiment 20001757 PARAMETER Experiment Name: At_50mM_NH4NO3_L-to-H_P Parameter: Treatment Value: 50mM NH4NO3 vs 100mM Mannitol
tatactttctctgtttacattctcgtttccgaggagaaaagtctcgatcttctggatctggggtttggtttggtttggggttgactcggttttgactcgggacaagtcgtctcgtgagatggatgtctctcgtttattagtatctctttgagagtctgtctttctgggttcaatagattcttatagtttcgcttagaaacacgcacaaaaagatgtcgttgaagcatcatcacagaggattagagctctctgcttcgaagagttttgtctcaaagaaatggactttatttctctgtatcggtttcttctgcgcaggaattctcttctccgacagaatgtggccagagcctgaatccaatgttgtatcaagggacacagtagcatcagatgaacggctgcggttagagtctgaggactgtgattcatcaaaaaagggtttaaagcgtgaatcgaaagacatccttggagatgtttacaagagtccagatgcaattcaaacgcttgataaaacgatttcaaagctggaaacagaactggccgatgcaagagctgcgcaagaatctatcatgaatggttcaccagtttctgatgactttaagctccctgaaactgtcactaaaagaaagtatctgatggttgttggtgttaatactgcgtttagcagcagaaagcgcagggattcagtccgtgctacttggatgcctcccggtgaggagagaaagaagctcgaggaagagaaagggatcgtgatgcggtttgtgataggccatagttctactcccggtggaattcttgatagagcgattcaggctgaagaaagtaaacatggagacttcttgaggctggatcatgttgaaggttatctcgagctgtcagcaaagactaaaacttactttaccacggcttttgcaatgtgggatgcagacttctacgtcaaagtcgatgatgatgtgcatgtaaatatagccacgcttggagcagaattagcaagataccggatgaagccccgagtgtacattggttgcatgaaatctggacctgttcttgctcagaaaggagtgagatatcatgaacccgaatactggaaatttggagaagagggtaacaaatacttccgccatgccacaggtcagctctatgcaatatccagggagttggcgtcttacatatcgataaaccaaaacgtacttcacaaatatgtgaatgaagatgtctctttaggatcatggtttcttggattagatgtggagcatgtagatgaccgtaggctatgttgtggtacaacagattgtgagtggaaggcgcaggcgggcaacatctgtgttgcctcgttcgattggagctgcagtgggatttgtagatcagcggataggatgaaggatgttcatcgtaggtgtggagaaggtgaaaaggcccttctggctgcatctttctgaacacaataactaaagaaacacattgaggaagaagagtacagagacaaatccgctcgacagtctacacttggtagtatagacacacagtcaaactctctctatatatgtatgtatgtatgtatgtatgtatgtatcttgtgaactgagatgagaagggtgctttttgccctcctttcttgtttctttatgcttttctcaattctctgaaggtctggagttctttgcacacagaaaatgcagattttagctgcaaaggcggactccatgagtgcaccttcagagtcatttcattgaggcgttttctctgccttttgagcttttcttcttcatttctttttggattttgcctattttgttcattttttcctttgccatgattgtggtgaaacatgggttgtttatgtgtgtacttgaaacacaaaactagtcaataaagattagaccatatgagaagaaattcagaagcttaataaaaacttttcttgg

SEQ ID NO: 103976 - protein, 407 aa, Arabidopsis thaliana; identical to SEQ ID NO: 42577
  peptide (1)..(407): Ceres Seq. ID no. 13614012
  misc_feature (153)..(351): Pfam Name: Galactosyltransferase Pfam Description: Galactosyltransferase
  misc_feature (1)..(407): Homolog of NCBI NO: 18416895 NR Description: galactosyltransferase family [Arabidopsis
  misc_feature (1)..(407): Homolog of NCBI NO: 7485336 NR Description: hypothetical protein F10M23.280 - Arabidopsis >gi|4455217|emb|CAB36540.1| Avr9 elicitor response like protein thaliana] >gi|7269547|emb|CAB79549.1| Avr9 elicitor response like
  misc_feature (14)..(407): Homolog of NCBI NO: 15220440 NR Description: galactosyltransferase family [Arabidopsis
  misc_feature (1)..(281): Homolog of NCBI NO: 30687425 NR Description: galactosyltransferase family [Arabidopsis
  misc_feature (11)..(407): Homolog of NCBI NO: 15225684 NR Description: galactosyltransferase family [Arabidopsis
  misc_feature (19)..(407): Homolog of NCBI NO: 4138265 NR Description: Avr9 elicitor response protein [Nicotiana tabacum]
  misc_feature (14)..(407): Homolog of NCBI NO: 15223337 NR Description: galactosyltransferase family [Arabidopsis
  misc_feature (92)..(402): Homolog of NCBI NO: 15221085 NR Description: galactosyltransferase family [Arabidopsis
  misc_feature (1)..(129): Homolog of NCBI NO: 15221085 NR Description: galactosyltransferase family [Arabidopsis
  misc_feature (15)..(402): Homolog of NCBI NO: 30699558 NR Description: Avr9 elicitor response protein -related

SEQ ID NO: 103977 - protein, 366 aa, Arabidopsis thaliana; identical to SEQ ID NO: 42578
  peptide (1)..(366): Ceres Seq. ID no. 13614013
  misc_feature (112)..(310): Pfam Name: Galactosyltransferase Pfam Description: Galactosyltransferase
  misc_feature (1)..(366): Homolog of NCBI NO: 18416895 NR Description: galactosyltransferase family [Arabidopsis
  misc_feature (1)..(366): Homolog of NCBI NO: 7485336 NR Description: hypothetical protein F10M23.280 - Arabidopsis >gi|4455217|emb|CAB36540.1| Avr9 elicitor response like protein thaliana] >gi|7269547|emb|CAB79549.1| Avr9 elicitor response like
  misc_feature (1)..(366): Homolog of NCBI NO: 15220440 NR Description: galactosyltransferase family [Arabidopsis
  misc_feature (1)..(240): Homolog of NCBI NO: 30687425 NR Description: galactosyltransferase family [Arabidopsis
  misc_feature (1)..(366): Homolog of NCBI NO: 15225684 NR Description: galactosyltransferase family [Arabidopsis
  misc_feature (1)..(366): Homolog of NCBI NO: 4138265 NR Description: Avr9 elicitor response protein [Nicotiana tabacum]
  misc_feature (1)..(366): Homolog of NCBI NO: 15223337 NR Description: galactosyltransferase family [Arabidopsis
  misc_feature (51)..(361): Homolog of NCBI NO: 15221085 NR Description: galactosyltransferase family [Arabidopsis
  misc_feature (1)..(88): Homolog of NCBI NO: 15221085 NR Description: galactosyltransferase family [Arabidopsis
  misc_feature (1)..(361): Homolog of NCBI NO: 30699558 NR Description: Avr9 elicitor response protein -related

SEQ ID NO: 103978 - protein, 289 aa, Arabidopsis thaliana; identical to SEQ ID NO: 42579
  peptide (1)..(289): Ceres Seq. ID no. 13614014
  misc_feature (35)..(233): Pfam Name: Galactosyltransferase Pfam Description: Galactosyltransferase
  misc_feature (1)..(289): Homolog of NCBI NO: 18416895 NR Description: galactosyltransferase family [Arabidopsis
  misc_feature (1)..(289): Homolog of NCBI NO: 7485336 NR Description: hypothetical protein F10M23.280 - Arabidopsis >gi|4455217|emb|CAB36540.1| Avr9 elicitor response like protein thaliana] >gi|7269547|emb|CAB79549.1| Avr9 elicitor response like
  misc_feature (1)..(289): Homolog of NCBI NO: 15220440 NR Description: galactosyltransferase family [Arabidopsis
  misc_feature (1)..(163): Homolog of NCBI NO: 30687425 NR Description: galactosyltransferase family [Arabidopsis
  misc_feature (1)..(289): Homolog of NCBI NO: 15225684 NR Description: galactosyltransferase family [Arabidopsis
  misc_feature (1)..(289): Homolog of NCBI NO: 4138265 NR Description: Avr9 elicitor response protein [Nicotiana tabacum]
  misc_feature (1)..(289): Homolog of NCBI NO: 15223337 NR Description: galactosyltransferase family [Arabidopsis
  misc_feature (1)..(284): Homolog of NCBI NO: 15221085 NR Description: galactosyltransferase family [Arabidopsis
  misc_feature (1)..(11): Homolog of NCBI NO: 15221085 NR Description: galactosyltransferase family [Arabidopsis
  misc_feature (1)..(284): Homolog of NCBI NO: 30699558 NR Description: Avr9 elicitor response protein -related

SEQ ID NO: 103979 - DNA, 2713 bp, Arabidopsis thaliana
  misc_feature (1)..(2713): Ceres Seq. ID no. 13614027
  misc_feature: MA Experiment ID: 20001451 Result: Down-regulated in Transcription
  misc_feature: MA Experiment 20001451 PARAMETER Experiment Name: At_Far-red-induction_P Parameter: Age (day) Value: 7
  misc_feature: MA Experiment 20001451 PARAMETER Experiment Name: At_Far-red-induction_P Parameter: Light Value: Far-red vs. White
  misc_feature: MA Experiment 20001451 PARAMETER Experiment Name: At_Far-red-induction_P Parameter: Organism Value: A. thaliana
  misc_feature: MA Experiment 20001451 PARAMETER Experiment Name: At_Far-red-induction_P Parameter: Plant Line Value: Columbia
  misc_feature: MA Experiment 20001451 PARAMETER Experiment Name: At_Far-red-induction_P Parameter: Timepoint (hr) Value: 24
  misc_feature: MA Experiment 20001451 PARAMETER Experiment Name: At_Far-red-induction_P Parameter: Tissue Value: Whole Plant
aagggtggcgattcgaggagtttccatggtggaacagaaaccctagagcctttatgctgccactaattatcactcttcactattgaattggggatggactcagagaaaatcctcaatccaagacttgtttcgattaatagcaccagccgcaaaggtatgtccgttgagttgccgcagaaaccgccgccaccgccgtcgttgttagaccggtttaaagctttgcttaatcagcgtgaagatgagttcggtggtggtgaagaggttttgcctccgagtatggatgagattgttcagctttatgaggttgttttgggtgagcttactttcaattctaagcctattatcactgatctcactattatcgctggtgaacaacgggaacatggtgaaggaatcgctaatgctatttgcactcgaatccttgaggctcctgttgagcaaaagttgccatctctgtatcttttagacagcattgttaagaacattgggcgggattatggtcgctatttctcatcccgtctacccgaggtcttctgccttgcatataggcaagcacatccgagtttacatccgtcaatgcgtcacctgtttgggacttggtcgagtgtttttccaccacctgtactacgcaagattgatatgcaattgcaactttcatctgcagcaaaccaatcttccgtaggggcttctgagcctagtcaaccaacgagaggtatacatgttaatccaaaatatcttcgcaggctggagccctcagccgccgaaaataatttgagaggaattaattccagtgcaagagtttatggccaaaattcactcggtgggtataatgatttcgaagatcagttagagagcccatcttcactgtctagtacaccagatggttttaccaggaggtctaatgatggagctaatccttctaatcaagcttttaactatggaatgggtcgagctactagcagagatgatgaacatatggaatggcgaagaaaggaaaacttaggccaaggaaatgatcacgaaagacctagagcgttgatagatgcatatggagttgacaccagcaaacacgtaacgatcaataaaccaattcgcgatatgaatggcatgcacagtaagatggttacaccatggcagaacactgaggaagaagagtttgattgggaagatatgagccctaccctagatcgtagcagagctggtgaatttttgcgatcatctgtaccagcattaggaagtgtaagggcaagacccagagtaggaaacacaagtgattttcatttagattctgacattaagaatggtgtaagtcatcagctacgagaaaattggagtttgtcacaaaattatccacatacatccaaccgtgttgatacaagagcaggaaaagacttgaaagtattggcttcatctgtagggttagtttcatcaaacagtgaattcggggctcctccatttgatagcattcaagatgttaactcacgttttggccgggctcttcctgatgggacatggccccatttgagtgctagaggacccaactctctccctgtaccttctgctcatttgcatcatttggcaaatcccggtaatgcgatgtcaaatcgcttgcaaggtaagcctttatataggcccgaaaaccaggtctctcagagtcatcttaatgatatgactcaacagaatcagatgctagttaattatttgccatcctcatctgctatggctccaaggccaatgcaatcgttgttaacccacgtaagtcatgggtaccctccacatgggtcaaccattagaccatctttatcaatccaaggtggggaagccatgcatcctctttcttcaggagttttatctcagataggagcctctaatcaaccaccaggtggcgcattctctggtctgattggctctctcatggctcaaggtttgatctcattgaacaatcagcctgctggtcagggaccattggggttggagtttgatgcagacatgctcaagatacgtaatgagtctgcaatcagtgctttatatggggatctcccgaggcaatgcacaacctgtggtctacgcttcaagtgccaagaagagcacagtaagcacatggattggcatgtaaccaagaacaggatgtccaagaaccataagcagaacccttctcggaaatggtttgtaagtgctagcatgtggctcagtggtgcagaagcacttggagctgaagcagtaccagggttcttgcccacggagccaacaacagaaaagaaggatgacgaagatatggcagttcctgcagatgaagaccaaacttcatgtgcattatgtggtgagccatttgaagacttttatagtgatgaaaccgaggaatggatgtacaaaggtgcggtatacatgaatgctcctgaagaatcaacaacagatatggacaagtctcagttaggtcctatagtgcatgcaaagtgcaggccagagtccaatgggggtgatatggaagagggtagtcagaggaaaaagatgcggagttagatcccttagaccgaattttaggtctttttcttgactacatttaagttacattcttatttcttcatcatctatatgcacttagtcacagaataccaccaatgaagagaaatgatggagagagtcttctttctcctaaaactgtaccattgaaaaaaagaggtttacacccacatatattatcattctttatgcc

SEQ ID NO: 103980 - protein, 808 aa, Arabidopsis thaliana
  peptide (1)..(808): Ceres Seq. ID no. 13614028
  misc_feature (497)..(788): Homolog of NCBI NO: 38637067 NR Description: putative S-locus protein 4 [Oryza sativa
  misc_feature (36)..(215): Homolog of NCBI NO: 38637067 NR Description: putative S-locus protein 4 [Oryza sativa
  misc_feature (313)..(401): Homolog of NCBI NO: 38637067 NR Description: putative S-locus protein 4 [Oryza sativa
  misc_feature (544)..(806): Homolog of NCBI NO: 25408479 NR Description: hypothetical protein At2g36480 [imported] -
  misc_feature (64)..(260): Homolog of NCBI NO: 25408479 NR Description: hypothetical protein At2g36480 [imported] -
  misc_feature (544)..(800): Homolog of NCBI NO: 18404146 NR Description: expressed protein [Arabidopsis thaliana]
  misc_feature (110)..(260): Homolog of NCBI NO: 18404146 NR Description: expressed protein [Arabidopsis thaliana]
  misc_feature (616)..(795): Homolog of NCBI NO: 18642418 NR Description: putative PCF11 protein [Brassica napus]
  misc_feature (612)..(795): Homolog of NCBI NO: 6069478 NR Description: S-locus protein 4 [Brassica rapa]
  misc_feature (624)..(802): Homolog of NCBI NO: 15239923 NR Description: S-locus protein 4-related [Arabidopsis thaliana]
MDSEKILNPRLVSINSTSRKGMSVELPQKPPPPPSLLDRFKALLNQREDEFGGGEEVLPPSMDEIVQLYEVVLGELTFNSKPIITDLTIIAGEQREHGEGIANAICTRILEAPVEQKLPSLYLLDSIVKNIGRDYGRYFSSRLPEVFCLAYRQAHPSLHPSMRHLFGTWSSVFPPPVLRKIDMQLQLSSAANQSSVGASEPSQPTRGIHVNPKYLRRLEPSAAENNLRGINSSARVYGQNSLGGYNDFEDQLESPSSLSSTPDGFTRRSNDGANPSNQAFNYGMGRATSRDDEHMEWRRKENLGQGNDHERPRALIDAYGVDTSKHVTINKPIRDMNGMHSKMVTPWQNTEEEEFDWEDMSPTLDRSRAGEFLRSSVPALGSVRARPRVGNTSDFHLDSDIKNGVSHQLRENWSLSQNYPHTSNRVDTRAGKDLKVLASSVGLVSSNSEFGAPPFDSIQDVNSRFGRALPDGTWPHLSARGPNSLPVPSAHLHHLANPGNAMSNRLQGKPLYRPENQVSQSHLNDMTQQNQMLVNYLPSSSAMAPRPMQSLLTHVSHGYPPHGSTIRPSLSIQGGEAMHPLSSGVLSQIGASNQPPGGAFSGLIGSLMAQGLISLNNQPAGQGPLGLEFDADMLKIRNESAISALYGDLPRQCTTCGLRFKCQEEHSKHMDWHVTKNRMSKNHKQNPSRKWFVSASMWLSGAEALGAEAVPGFLPTEPTTEKKDDEDMAVPADEDQTSCALCGEPFEDFYSDETEEWMYKGAVYMNAPEESTTDMDKSQLGPIVHAKCRPESNGGDMEEGSQRKKMRS

SEQ ID NO: 103981 - protein, 787 aa, Arabidopsis thaliana
  peptide (1)..(787): Ceres Seq. ID no. 13614029
  misc_feature (476)..(767): Homolog of NCBI NO: 38637067 NR Description: putative S-locus protein 4 [Oryza sativa
  misc_feature (15)..(194): Homolog of NCBI NO: 38637067 NR Description: putative S-locus protein 4 [Oryza sativa
  misc_feature (292)..(380): Homolog of NCBI NO: 38637067 NR Description: putative S-locus protein 4 [Oryza sativa
  misc_feature (523)..(785): Homolog of NCBI NO: 25408479 NR Description: hypothetical protein At2g36480 [imported] -
  misc_feature (43)..(239): Homolog of NCBI NO: 25408479 NR Description: hypothetical protein At2g36480 [imported] -
  misc_feature (523)..(779): Homolog of NCBI NO: 18404146 NR Description: expressed protein [Arabidopsis thaliana]
  misc_feature (89)..(239): Homolog of NCBI NO: 18404146 NR Description: expressed protein [Arabidopsis thaliana]
  misc_feature (595)..(774): Homolog of NCBI NO: 18642418 NR Description: putative PCF11 protein [Brassica napus]
  misc_feature (591)..(774): Homolog of NCBI NO: 6069478 NR Description: S-locus protein 4 [Brassica rapa]
  misc_feature (603)..(781): Homolog of NCBI NO: 15239923 NR Description: S-locus protein 4-related [Arabidopsis thaliana]
MSVELPQKPPPPPSLLDRFKALLNQREDEFGGGEEVLPPSMDEIVQLYEVVLGELTFNSKPIITDLTIIAGEQREHGEGIANAICTRILEAPVEQKLPSLYLLDSIVKNIGRDYGRYFSSRLPEVFCLAYRQAHPSLHPSMRHLFGTWSSVFPPPVLRKIDMQLQLSSAANQSSVGASEPSQPTRGIHVNPKYLRRLEPSAAENNLRGINSSARVYGQNSLGGYNDFEDQLESPSSLSSTPDGFTRRSNDGANPSNQAFNYGMGRATSRDDEHMEWRRKENLGQGNDHERPRALIDAYGVDTSKHVTINKPIRDMNGMHSKMVTPWQNTEEEEFDWEDMSPTLDRSRAGEFLRSSVPALGSVRARPRVGNTSDFHLDSDIKNGVSHQLRENWSLSQNYPHTSNRVDTRAGKDLKVLASSVGLVSSNSEFGAPPFDSIQDVNSRFGRALPDGTWPHLSARGPNSLPVPSAHLHHLANPGNAMSNRLQGKPLYRPENQVSQSHLNDMTQQNQMLVNYLPSSSAMAPRPMQSLLTHVSHGYPPHGSTIRPSLSIQGGEAMHPLSSGVLSQIGASNQPPGGAFSGLIGSLMAQGLISLNNQPAGQGPLGLEFDADMLKIRNESAISALYGDLPRQCTTCGLRFKCQEEHSKHMDWHVTKNRMSKNHKQNPSRKWFVSASMWLSGAEALGAEAVPGFLPTEPTTEKKDDEDMAVPADEDQTSCALCGEPFEDFYSDETEEWMYKGAVYMNAPEESTTDMDKSQLGPIVHAKCRPESNGGDMEEGSQRKKMRS

SEQ ID NO: 103982 - protein, 747 aa, Arabidopsis thaliana
  peptide (1)..(747): Ceres Seq. ID no. 13614030
  misc_feature (436)..(727): Homolog of NCBI NO: 38637067 NR Description: putative S-locus protein 4 [Oryza sativa
  misc_feature (1)..(154): Homolog of NCBI NO: 38637067 NR Description: putative S-locus protein 4 [Oryza sativa
  misc_feature (252)..(340): Homolog of NCBI NO: 38637067 NR Description: putative S-locus protein 4 [Oryza sativa
  misc_feature (483)..(745): Homolog of NCBI NO: 25408479 NR Description: hypothetical protein At2g36480 [imported] -
  misc_feature (3)..(199): Homolog of NCBI NO: 25408479 NR Description: hypothetical protein At2g36480 [imported] -
  misc_feature (483)..(739): Homolog of NCBI NO: 18404146 NR Description: expressed protein [Arabidopsis thaliana]
  misc_feature (49)..(199): Homolog of NCBI NO: 18404146 NR Description: expressed protein [Arabidopsis thaliana]
  misc_feature (555)..(734): Homolog of NCBI NO: 18642418 NR Description: putative PCF11 protein [Brassica napus]
  misc_feature (551)..(734): Homolog of NCBI NO: 6069478 NR Description: S-locus protein 4 [Brassica rapa]
  misc_feature (563)..(741): Homolog of NCBI NO: 15239923 NR Description: S-locus protein 4-related [Arabidopsis thaliana]
MDEIVQLYEVVLGELTFNSKPIITDLTIIAGEQREHGEGIANAICTRILEAPVEQKLPSLYLLDSIVKNIGRDYGRYFSSRLPEVFCLAYRQAHPSLHPSMRHLFGTWSSVFPPPVLRKIDMQLQLSSAANQSSVGASEPSQPTRGIHVNPKYLRRLEPSAAENNLRGINSSARVYGQNSLGGYNDFEDQLESPSSLSSTPDGFTRRSNDGANPSNQAFNYGMGRATSRDDEHMEWRRKENLGQGNDHERPRALIDAYGVDTSKHVTINKPIRDMNGMHSKMVTPWQNTEEEEFDWEDMSPTLDRSRAGEFLRSSVPALGSVRARPRVGNTSDFHLDSDIKNGVSHQLRENWSLSQNYPHTSNRVDTRAGKDLKVLASSVGLVSSNSEFGAPPFDSIQDVNSRFGRALPDGTWPHLSARGPNSLPVPSAHLHHLANPGNAMSNRLQGKPLYRPENQVSQSHLNDMTQQNQMLVNYLPSSSAMAPRPMQSLLTHVSHGYPPHGSTIRPSLSIQGGEAMHPLSSGVLSQIGASNQPPGGAFSGLIGSLMAQGLISLNNQPAGQGPLGLEFDADMLKIRNESAISALYGDLPRQCTTCGLRFKCQEEHSKHMDWHVTKNRMSKNHKQNPSRKWFVSASMWLSGAEALGAEAVPGFLPTEPTTEKKDDEDMAVPADEDQTSCALCGEPFEDFYSDETEEWMYKGAVYMNAPEESTTDMDKSQLGPIVHAKCRPESNGGDMEEGSQRKKMRS

SEQ ID NO: 103983 - DNA, 1741 bp, Arabidopsis thaliana
  misc_feature (1)..(1741): Ceres Seq. ID no. 13614031
  misc_feature: MA Experiment ID: 108435 Result: Down-regulated in Transcription
  misc_feature: MA Experiment 108435 PARAMETER Experiment Name: At_stm_Mutants_cDNA_P Parameter: Plant Line Value: wt Landsburg vs stm
  misc_feature: MA Experiment 108435 PARAMETER Experiment Name: At_stm_Mutants_cDNA_P Parameter: Tissue Value: Shoot Apical Meristem Region
  misc_feature: MA Experiment ID: 108461 Result: Down-regulated in Transcription
  misc_feature: MA Experiment 108461 PARAMETER Experiment Name: At_Germinating_Seeds_cDNA_P Parameter: Age (day) Value: 1 vs. 0
  misc_feature: MA Experiment 108461 PARAMETER Experiment Name: At_Germinating_Seeds_cDNA_P Parameter: Tissue Value: Germinating Seeds
  misc_feature: MA Experiment ID: 108569 Result: Up-regulated in Transcription
  misc_feature: MA Experiment 108569 PARAMETER Experiment Name: At_0.001%_MeJA__cDNA_P Parameter: Timepoint (hr) Value: 6
  misc_feature: MA Experiment 108569 PARAMETER Experiment Name: At_0.001%_MeJA__cDNA_P Parameter: Tissue Value: Aerial
  misc_feature: MA Experiment 108569 PARAMETER Experiment Name: At_0.001%_MeJA__cDNA_P Parameter: Treatment Value: 0.001% MeJA vs. No Treatment
  misc_feature: MA Experiment ID: 108573 Result: Up-regulated in Transcription
  misc_feature: MA Experiment 108573 PARAMETER Experiment Name: At_Drought_cDNA_P Parameter: Timepoint (hr) Value: 6
  misc_feature: MA Experiment 108573 PARAMETER Experiment Name: At_Drought_cDNA_P Parameter: Tissue Value: Aerial
  misc_feature: MA Experiment 108573 PARAMETER Experiment Name: At_Drought_cDNA_P Parameter: Treatment Value: Drought vs. No Drought
  misc_feature: MA Experiment ID: 108585 Result: Up-regulated in Transcription
  misc_feature: MA Experiment 108585 PARAMETER Experiment Name: At_5mM_NaNP_cDNA_P Parameter: Timepoint (hr) Value: 6
  misc_feature: MA Experiment 108585 PARAMETER Experiment Name: At_5mM_NaNP_cDNA_P Parameter: Tissue Value: Aerial
  misc_feature: MA Experiment 108585 PARAMETER Experiment Name: At_5mM_NaNP_cDNA_P Parameter: Treatment Value: null
  misc_feature: MA Experiment ID: 108595 Result: Down-regulated in Transcription
  misc_feature: MA Experiment 108595 PARAMETER Experiment Name: At_Ler-pi_Ovule_cDNA_P Parameter: Plant Line Value: null
  misc_feature: MA Experiment ID: 108668 Result: Up-regulated in Transcription
  misc_feature: MA Experiment 108668 PARAMETER Experiment Name: At_2mM_SA_cDNA_P Parameter: Plant Line Value: WS
  misc_feature: MA Experiment 108668 PARAMETER Experiment Name: At_2mM_SA_cDNA_P Parameter: Timepoint (hr) Value: 6
  misc_feature: MA Experiment 108668 PARAMETER Experiment Name: At_2mM_SA_cDNA_P Parameter: Treatment Value: 2mM SA vs. No Treatment
  misc_feature: MA Experiment ID: 20000069 Result: Down-regulated in Transcription
  misc_feature: MA Experiment 20000069 PARAMETER Experiment Name: At_100uM_ABA_Mutants_cDNA_P Parameter: Plant Line Value: CS23
  misc_feature: MA Experiment 20000069 PARAMETER Experiment Name: At_100uM_ABA_Mutants_cDNA_P Parameter: Timepoint (hr) Value: 6
  misc_feature: MA Experiment 20000069 PARAMETER Experiment Name: At_100uM_ABA_Mutants_cDNA_P Parameter: Tissue Value: Aerial
  misc_feature: MA Experiment 20000069 PARAMETER Experiment Name: At_100uM_ABA_Mutants_cDNA_P Parameter: Treatment Value: 100uM ABA vs. No Treatment
  misc_feature: MA Experiment ID: 20000070 Result: Down-regulated in Transcription
  misc_feature: MA Experiment 20000070 PARAMETER Experiment Name: At_100uM_ABA_Mutants_cDNA_P Parameter: Plant Line Value: CS24
  misc_feature: MA Experiment 20000070 PARAMETER Experiment Name: At_100uM_ABA_Mutants_cDNA_P Parameter: Timepoint (hr) Value: 6
  misc_feature: MA Experiment 20000070 PARAMETER Experiment Name: At_100uM_ABA_Mutants_cDNA_P Parameter: Tissue Value: Aerial
  misc_feature: MA Experiment 20000070 PARAMETER Experiment Name: At_100uM_ABA_Mutants_cDNA_P Parameter: Treatment Value: 100uM ABA vs. No Treatment
  misc_feature: MA Experiment ID: 20000086 Result: Down-regulated in Transcription
  misc_feature: MA Experiment 20000086 PARAMETER Experiment Name: At_100uM_ABA_Mutants_cDNA_P Parameter: Plant Line Value: CS22
  misc_feature: MA Experiment 20000086 PARAMETER Experiment Name: At_100uM_ABA_Mutants_cDNA_P Parameter: Timepoint (hr) Value: 6
  misc_feature: MA Experiment 20000086 PARAMETER Experiment Name: At_100uM_ABA_Mutants_cDNA_P Parameter: Tissue Value: Aerial
  misc_feature: MA Experiment 20000086 PARAMETER Experiment Name: At_100uM_ABA_Mutants_cDNA_P Parameter: Treatment Value: 100uM ABA vs. No Treatment
  misc_feature: MA Experiment ID: 20000087 Result: Down-regulated in Transcription
  misc_feature: MA Experiment 20000087 PARAMETER Experiment Name: At_100uM_ABA_Mutants_cDNA_P Parameter: Plant Line Value: WS
  misc_feature: MA Experiment 20000087 PARAMETER Experiment Name: At_100uM_ABA_Mutants_cDNA_P Parameter: Timepoint (hr) Value: 6
  misc_feature: MA Experiment 20000087 PARAMETER Experiment Name: At_100uM_ABA_Mutants_cDNA_P Parameter: Tissue Value: Aerial
  misc_feature: MA Experiment 20000087 PARAMETER Experiment Name: At_100uM_ABA_Mutants_cDNA_P Parameter: Treatment Value: 100uM ABA vs. No Treatment
  misc_feature: MA Experiment ID: 20000089 Result: Down-regulated in Transcription
  misc_feature: MA Experiment ID: 20000090 Result: Down-regulated in Transcription
  misc_feature: MA Experiment ID: 20000111 Result: Down-regulated in Transcription
  misc_feature: MA Experiment 20000111 PARAMETER Experiment Name: At_42deg_Heat_cDNA_P Parameter: Temperature (deg C) Value: 42 vs. 22
  misc_feature: MA Experiment 20000111 PARAMETER Experiment Name: At_42deg_Heat_cDNA_P Parameter: Timepoint (hr) Value: 6
  misc_feature: MA Experiment 20000111 PARAMETER Experiment Name: At_42deg_Heat_cDNA_P Parameter: Tissue Value: Aerial
  misc_feature: MA Experiment ID: 20000117 Result: Down-regulated in Transcription
  misc_feature: MA Experiment 20000117 PARAMETER Experiment Name: At_100uM_ABA_Mutants_cDNA_P Parameter: Plant Line Value: Columbia
  misc_feature: MA Experiment 20000117 PARAMETER Experiment Name: At_100uM_ABA_Mutants_cDNA_P Parameter: Timepoint (hr) Value: 6
  misc_feature: MA Experiment 20000117 PARAMETER Experiment Name: At_100uM_ABA_Mutants_cDNA_P Parameter: Tissue Value: Aerial
  misc_feature: MA Experiment 20000117 PARAMETER Experiment Name: At_100uM_ABA_Mutants_cDNA_P Parameter: Treatment Value: 100uM ABA vs. No Treatment
  misc_feature: MA Experiment ID: 20000180 Result: Down-regulated in Transcription
  misc_feature: MA Experiment 20000180 PARAMETER Experiment Name: At_Germinating_Seeds_P Parameter: Age (hr) Value: 24 vs. 0
  misc_feature: MA Experiment 20000180 PARAMETER Experiment Name: At_Germinating_Seeds_P Parameter: Tissue Value: Germinating Seeds
  misc_feature: MA Experiment ID: 20000184 Result: Up-regulated in Transcription
  misc_feature: MA Experiment 20000184 PARAMETER Experiment Name: At_Shoots__P Parameter: Age (day) Value: 7
  misc_feature: MA Experiment 20000184 PARAMETER Experiment Name: At_Shoots__P Parameter: Tissue Value: Shoots vs. Whole Plant
  misc_feature: MA Experiment ID: 20000794 Result: Up-regulated in Transcription
  misc_feature: MA Experiment 20000794 PARAMETER Experiment Name: At_Petals_P Parameter: Age (day) Value: 23-25 days
  misc_feature: MA Experiment 20000794 PARAMETER Experiment Name: At_Petals_P Parameter: Plant Line Value: WS
  misc_feature: MA Experiment 20000794 PARAMETER Experiment Name: At_Petals_P Parameter: Tissue Value: Petals vs. Whole plant
  misc_feature: MA Experiment ID: 20001911 Result: Up-regulated in Transcription
  misc_feature: MA Experiment 20001911 PARAMETER Experiment Name: At_Drought_Reproduction_P Parameter: Age (day) Value: 40
  misc_feature: MA Experiment 20001911 PARAMETER Experiment Name: At_Drought_Reproduction_P Parameter: Organism Value: A. thaliana
  misc_feature: MA Experiment 20001911 PARAMETER Experiment Name: At_Drought_Reproduction_P Parameter: Plant Line Value: WS
  misc_feature: MA Experiment 20001911 PARAMETER Experiment Name: At_Drought_Reproduction_P Parameter: Timepoint (day) Value: 10
  misc_feature: MA Experiment 20001911 PARAMETER Experiment Name: At_Drought_Reproduction_P Parameter: Tissue Value: Flowers
  misc_feature: MA Experiment 20001911 PARAMETER Experiment Name: At_Drought_Reproduction_P Parameter: Treatment Value: Drought vs. No Drought
ccccgagtgggctcaacgttgtcattagctatattctagtttaatggttatcatcagaaaatctgaaatcaaatttttggattgtaatccatggctgctcttggtaaaggacataaaacagctttcatctcttgaatggcttcgtctcttttgcaatttttgagttagccaagtgctcaagggagatacataatacctgaagatgtccaaggcaagtgatgccgtcagagaaccattggtggacaagaatatggctggatcaaaaccagaccagccgtggatggtttatctcagcacattcgttgcggtctgtggttcttttgcgttcggttcttgtgcgggatactcttcacctgctcaggctgcaattaggaatgacctttcattgactatagctgagttttcactctttggttctttactaacttttggcgcaatgatcggtgctataacaagcgggcctatagctgatttagttggaagaaagggggcgatgagagtttcctctgcattttgtgtagtcgggtggctagcaatcatctttgccaagggagtagtggctctggaccttggaagactggcaacgggatatggaatgggagcattttcctatgtggtgccaatctttatagcagaaattgcacctaaaactttcagaggggctctaaccacactgaaccagattctgatctgcactggagtgtcggtttccttcatcataggcacactagtgacgtggagagtcttggcattaataggaatcatcccatgcgctgcctccttccttggcctcttttttatccctgagtctccaagatggctggcaaaagtggggcgtgatacggagtttgaagctgcactgaggaagctccgtgggaagaaggctgatatttcggaggaggcagcagagatccaggattatatcgaaactctggaaaggctaccgaaagccaagatgctggatttgtttcagaggagatacatacgctctgttcttatagctttcgggttgatggtgtttcagcagtttggaggaatcaacggaatatgtttctacacaagctcgatatttgagcaagcaggttttcccacaagacttgggatgataatatatgctgttcttcaggtggtaatcactgcgcttaatgcaccgatagttgacagagccggaagaaaaccattgctactggtttctgcaacagggttagtgataggctgtttgatagcagcggtttctttctatctcaaggttcacgacatggcgcacgaagcagtcccagtcctggctgttgttggtataatggtgtacataggatcgttttcagcaggaatgggagcaatgccgtgggtggtcatgtctgagatatttcccataaacataaaaggagtagcaggaggcatggcgacgctggtgaactggtttggagcgtgggctgtttcttacactttcaacttcctcatgtcctggagctcttacggaactttcctcatttacgctgccatcaacgcgctggccattgtcttcgtcattgccatcgtgcctgagacaaaagggaagacattggagcagatccaagctatagtcaatccatagctcaaacacttcctagatgttcgtttctattagccagctgggacataaattgcaatcttggatctctttgcttttatgattctttactgagttcaattgttatcactctctctatttctaatctcttcttaatgaactttggacttc

SEQ ID NO: 103984 - protein, 463 aa, Arabidopsis thaliana; identical to SEQ ID NO: 40571
  peptide (1)..(463): Ceres Seq. ID no. 13614032
  misc_feature (30)..(461): Pfam Name: Sugar (and other) transporter Pfam Description: Sugar (and other) transporter
  misc_feature (1)..(463): Homolog of NCBI NO: 18407508 NR Description: sugar transporter, putative [Arabidopsis >gi|30690868|ref|NP_850483.1| sugar transporter, putative thaliana] >gi|20197560|gb|AAD13706.2| putative sugar transporter
  misc_feature (1)..(463): Homolog of NCBI NO: 21536914 NR Description: putative sugar transporter [Arabidopsis thaliana]
  misc_feature (14)..(462): Homolog of NCBI NO: 23504385 NR Description: putative sugar transporter [Lycopersicon
  misc_feature (27)..(461): Homolog of NCBI NO: 18419741 NR Description: sugar transporter, putative [Arabidopsis >gi|17381265|gb|AAL36051.1| AT5g18840/F17K4_90 [Arabidopsis >gi|23309019|gb|AAN18269.1| At5g18840/F17K4_90 [Arabidopsis
  misc_feature (1)..(461): Homolog of NCBI NO: 6729025 NR Description: putative sugar transporter [Arabidopsis thaliana]
  misc_feature (1)..(461): Homolog of NCBI NO: 30679397 NR Description: sugar transporter family [Arabidopsis thaliana]
  misc_feature (27)..(461): Homolog of NCBI NO: 21592787 NR Description: sugar transporter-like protein [Arabidopsis
  misc_feature (327)..(463): Homolog of NCBI NO: 25409087 NR Description: probable sugar transporter [imported] -
  misc_feature (1)..(98): Homolog of NCBI NO: 25409087 NR Description: probable sugar transporter [imported] -
  misc_feature (117)..(160): Homolog of NCBI NO: 25409087 NR Description: probable sugar transporter [imported] -

SEQ ID NO: 103985 - protein, 447 aa, Arabidopsis thaliana; identical to SEQ ID NO: 40572
  peptide (1)..(447): Ceres Seq. ID no. 13614033
  misc_feature (14)..(445): Pfam Name: Sugar (and other) transporter Pfam Description: Sugar (and other) transporter
  misc_feature (1)..(447): Homolog of NCBI NO: 18407508 NR Description: sugar transporter, putative [Arabidopsis >gi|30690868|ref|NP_850483.1| sugar transporter, putative thaliana] >gi|20197560|gb|AAD13706.2| putative sugar transporter
  misc_feature (1)..(447): Homolog of NCBI NO: 21536914 NR Description: putative sugar transporter [Arabidopsis thaliana]
  misc_feature (1)..(446): Homolog of NCBI NO: 23504385 NR Description: putative sugar transporter [Lycopersicon
  misc_feature (11)..(445): Homolog of NCBI NO: 18419741 NR Description: sugar transporter, putative [Arabidopsis >gi|17381265|gb|AAL36051.1| AT5g18840/F17K4_90 [Arabidopsis >gi|23309019|gb|AAN18269.1| At5g18840/F17K4_90 [Arabidopsis
  misc_feature (1)..(445): Homolog of NCBI NO: 6729025 NR Description: putative sugar transporter [Arabidopsis thaliana]
  misc_feature (1)..(445): Homolog of NCBI NO: 30679397 NR Description: sugar transporter family [Arabidopsis thaliana]
  misc_feature (11)..(445): Homolog of NCBI NO: 21592787 NR Description: sugar transporter-like protein [Arabidopsis
  misc_feature (311)..(447): Homolog of NCBI NO: 25409087 NR Description: probable sugar transporter [imported] -
  misc_feature (1)..(82): Homolog of NCBI NO: 25409087 NR Description: probable sugar transporter [imported] -
  misc_feature (101)..(144): Homolog of NCBI NO: 25409087 NR Description: probable sugar transporter [imported] -

SEQ ID NO: 103986 - protein, 437 aa, Arabidopsis thaliana; identical to SEQ ID NO: 40573
  peptide (1)..(437): Ceres Seq. ID no. 13614034
  misc_feature (4)..(435): Pfam Name: Sugar (and other) transporter Pfam Description: Sugar (and other) transporter
  misc_feature (1)..(437): Homolog of NCBI NO: 18407508 NR Description: sugar transporter, putative [Arabidopsis >gi|30690868|ref|NP_850483.1| sugar transporter, putative thaliana] >gi|20197560|gb|AAD13706.2| putative sugar transporter
  misc_feature (1)..(437): Homolog of NCBI NO: 21536914 NR Description: putative sugar transporter [Arabidopsis thaliana]
  misc_feature (1)..(436): Homolog of NCBI NO: 23504385 NR Description: putative sugar transporter [Lycopersicon
  misc_feature (1)..(435): Homolog of NCBI NO: 18419741 NR Description: sugar transporter, putative [Arabidopsis >gi|17381265|gb|AAL36051.1| AT5g18840/F17K4_90 [Arabidopsis >gi|23309019|gb|AAN18269.1| At5g18840/F17K4_90 [Arabidopsis
  misc_feature (1)..(435): Homolog of NCBI NO: 6729025 NR Description: putative sugar transporter [Arabidopsis thaliana]
  misc_feature (1)..(435): Homolog of NCBI NO: 30679397 NR Description: sugar transporter family [Arabidopsis thaliana]
  misc_feature (1)..(435): Homolog of NCBI NO: 21592787 NR Description: sugar transporter-like protein [Arabidopsis
  misc_feature (301)..(437): Homolog of NCBI NO: 25409087 NR Description: probable sugar transporter [imported] -
  misc_feature (1)..(72): Homolog of NCBI NO: 25409087 NR Description: probable sugar transporter [imported] -
  misc_feature (91)..(134): Homolog of NCBI NO: 25409087 NR Description: probable sugar transporter [imported] -

SEQ ID NO: 103987 - DNA, 944 bp, Arabidopsis thaliana
  misc_feature (1)..(944): Ceres Seq. ID no. 13614053
  misc_feature: MA Experiment ID: 108434 Result: Up-regulated in Transcription
  misc_feature: MA Experiment 108434 PARAMETER Experiment Name: At_Root_Tips_cDNA_P Parameter: Tissue Value: Root Tips
  misc_feature: MA Experiment ID: 108577 Result: Down-regulated in Transcription
  misc_feature: MA Experiment 108577 PARAMETER Experiment Name: At_42deg_Heat_cDNA_P Parameter: Temperature (deg C) Value: 42 vs. 22
  misc_feature: MA Experiment 108577 PARAMETER Experiment Name: At_42deg_Heat_cDNA_P Parameter: Timepoint (hr) Value: 6
  misc_feature: MA Experiment 108577 PARAMETER Experiment Name: At_42deg_Heat_cDNA_P Parameter: Tissue Value: Aerial
  misc_feature: MA Experiment ID: 108579 Result: Down-regulated in Transcription
  misc_feature: MA Experiment 108579 PARAMETER Experiment Name: At_4deg_Cold_cDNA_P Parameter: Temperature (deg C) Value: 4 vs. 22
  misc_feature: MA Experiment 108579 PARAMETER Experiment Name: At_4deg_Cold_cDNA_P Parameter: Timepoint (hr) Value: 6
  misc_feature: MA Experiment 108579 PARAMETER Experiment Name: At_4deg_Cold_cDNA_P Parameter: Tissue Value: Aerial
  misc_feature: MA Experiment ID: 20000224 Result: Up-regulated in Transcription
  misc_feature: MA Experiment ID: 20000438 Result: Down-regulated in Transcription
  misc_feature: MA Experiment 20000438 PARAMETER Experiment Name: At_Shoots__P Parameter: Age (day) Value: 14
  misc_feature: MA Experiment 20000438 PARAMETER Experiment Name: At_Shoots__P Parameter: Tissue Value: Shoots vs. Whole Plant
  misc_feature: MA Experiment ID: 20000794 Result: Up-regulated in Transcription
  misc_feature: MA Experiment 20000794 PARAMETER Experiment Name: At_Petals_P Parameter: Age (day) Value: 23-25 days
  misc_feature: MA Experiment 20000794 PARAMETER Experiment Name: At_Petals_P Parameter: Plant Line Value: WS
  misc_feature: MA Experiment 20000794 PARAMETER Experiment Name: At_Petals_P Parameter: Tissue Value: Petals vs. Whole plant
atcaatatcaaattgtcgaatttacacgaagaacaaaaataaggaatcgagagagagagagagataggcgcatatatgggaagaaaatgagagaaaaatggaaactttgaccgccattgaacactcacgagatctcttcttcttgtatttcttctctctcctctctgtctgatgcgtgttcttgattcatcggctcagatcagtcaccaaatagaataaatagcaaacaagatcctctgtggaatttgatacatagagaaactgtctagtgctgtggtgtcttttgagattttcttgtggttctgtggattgtttgttggttggttgcttcttggataaatggcagaagtccataatcaactagagatcaagtttcggttaaccgatggttcggatatcggtcctaaagcattccctgatgctacaactgtttcggctttgaaggaaactgttatttctgaatggccaagagagaaggagaatgggccgaaaacagtgaaagaggtgaagttgataagcgcagggaaggtattggagaacagcaagacggttaaagactaccgaagtcctgtctctaatctcgcaggcgctgtcaccacaatgcacgttatcatccaagctccggttacggaaaaagaaaagaagcctaaaggtgacccgaagatgaacaaatgcgtctgttcagtcatgtaagagagtagcaaaatctcaagagagactcatcagatttctggtccttaagtttggtctttcttgtggttagtatagattgtttactaatacagatacagaattaaagagtattgaaccatttttttttataataaaaaaaaatagtataaatcaaagctctactctagcttgttgcaagattgaaagagatcatcaataaatcaaggtactggtgattcagttcctcttaatggagtctctgttttagctct

SEQ ID NO: 103988 - protein, 117 aa, Arabidopsis thaliana; identical to SEQ ID NO: 21367
  peptide (1)..(117): Ceres Seq. ID no. 13614054
  misc_feature (8)..(95): Pfam Name: Ubiquitin family Pfam Description: Ubiquitin family
  misc_feature (1)..(117): Homolog of NCBI NO: 15232032 NR Description: ubiquitin family [Arabidopsis thaliana]
  misc_feature (1)..(114): Homolog of NCBI NO: 18417680 NR Description: expressed protein [Arabidopsis thaliana] expressed protein [Arabidopsis thaliana] NTGP5 [Arabidopsis thaliana] >gi|28973721|gb|AAO64177.1| unknown
  misc_feature (1)..(99): Homolog of NCBI NO: 11358132 NR Description: hypothetical protein T20K14_70 - Arabidopsis >gi|9755801|emb|CAC01745.1| putative protein [Arabidopsis
  misc_feature (1)..(117): Homolog of NCBI NO: 15219188 NR Description: ubiquitin family [Arabidopsis thaliana] unknown protein [Arabidopsis thaliana]
  misc_feature (8)..(117): Homolog of NCBI NO: 21592966 NR Description: ubiquitin-fusion protein, putative [Arabidopsis
  misc_feature (8)..(117): Homolog of NCBI NO: 15218145 NR Description: expressed protein [Arabidopsis thaliana]
  misc_feature (4)..(117): Homolog of NCBI NO: 4097587 NR Description: NTGP5 [Nicotiana tabacum]
  misc_feature (1)..(100): Homolog of NCBI NO: 25402954 NR Description: protein F2E2.12 [imported] - Arabidopsis thaliana
  misc_feature (2)..(117): Homolog of NCBI NO: 38347220 NR Description: OSJNBa0055C08.14 [Oryza sativa (japonica
  misc_feature (8)..(117): Homolog of NCBI NO: 15234839 NR Description: ubiquitin family [Arabidopsis thaliana]

SEQ ID NO: 103989 - DNA, 1483 bp, Arabidopsis thaliana
  misc_feature (1)..(1483): Ceres Seq. ID no. 13614061
  misc_feature: MA Experiment ID: 108573 Result: Up-regulated in Transcription
  misc_feature: MA Experiment 108573 PARAMETER Experiment Name: At_Drought_cDNA_P Parameter: Timepoint (hr) Value: 6
  misc_feature: MA Experiment 108573 PARAMETER Experiment Name: At_Drought_cDNA_P Parameter: Tissue Value: Aerial
  misc_feature: MA Experiment 108573 PARAMETER Experiment Name: At_Drought_cDNA_P Parameter: Treatment Value: Drought vs. No Drought
  misc_feature: MA Experiment ID: 20000224 Result: Down-regulated in Transcription
atggctgtatggttttggttccgatcacaaagagcatcgaatcgagctacttcctccgccggctttgctgtgtgtgtgatcgttcgtttactaaatctgaaacaagtatctaacgccttgccggagatgtcgagctcaggccaaactcagttccgttatacacagacgccgtcgaaggtggttcatctgcggaatcttccatgggaatgcgtcgaagaggagctcatcgacctttgcaaacgattcggcaagatcgtcaataccaagagcaatgtcggcgccaatcgcaatcaagctttcgtcgaatttgctgacttgaatcaagctatatcaatggtttcgtattatgcttcatcttcagagcccgcacagattcgtgggaaaactgtctatattcagtactctaatcgccatgagattgttaacaatcagagtcctggagatgtccctggaaatgtcctcttggttacctttgaaggagtggaatctcacgaagtcagcatcgatgttatccatctggtattttctgcttttggatttgtgcataaaattgccacatttgagaaagctgctggtttccaggcactagttcaatttactgatgtggagactgcatccgcggcaaggagtgcgttggatggcagaagtatacccaggtatctgctttccgcacatgttggttcgtgcagtttgcgaatgtcttattcagctcatactgatctcaacatcaagtttcagtcccaccggagcagagattacacaaatccataccttccagtgaatcagaccgcaatggatgggtctatgcagcctgctttaggtgctgacggcaagaaagttgaatctcagagcaacgtccttctcggtttgattgagaatatgcagtatgctgtcactgtggatgttcttcacacggtgttttctgcatatggaactgtccagaagattgctatatttgagaagaatggttcaacgcaagcattaattcaatactctgatataccaacagcagcaatggccaaagaagcactggaaggacactgcatttatgacggtggctactgtaagcttcgactatcatactctcgtcatactgatctgaatgttaaggcttttagcgacaaaagcagagactatacacttcctgatctaagcctacttgtggcacaaaaaggtcccgcggtgtcgggttctgcaccaccagcaggttggcagaacccgcaagcgcaaagtcaatactcaggttatggcggaagcccatatatgtacccatcatctgatcccaacggggcttcaccctcaggtcaacctccttactatggatgagatatttgtttactaaaaatttcggattttgctgccaatggggagtatttccatgtttaggttgtttgaggttaaaagtgtgattgttctttcttttttgttgttgacataatttaagtggggagaccaataataaatcgaatatgttgcgcttgct

SEQ ID NO: 103990 - protein, 441 aa, Arabidopsis thaliana
  peptide (1)..(441): Ceres Seq. ID no. 13614062
  misc_feature (61)..(132): Pfam Name: RNA recognition motif. (a.k.a. RRM, RBD, or RNP domain) Pfam Description: RNA recognition motif. (a.k.a. RRM, RBD, or RNP
  misc_feature (43)..(441): Homolog of NCBI NO: 15232047 NR Description: polypyrimidine tract-binding protein 1 (PTB) nuclear ribonucleoprotein I) (hnRNP I), putative [Arabidopsis
  misc_feature (43)..(441): Homolog of NCBI NO: 11358627 NR Description: polypyrimidine tract-binding protein homolog
  misc_feature (43)..(437): Homolog of NCBI NO: 18921326 NR Description: putative polypyrimidine tract-binding protein
  misc_feature (43)..(436): Homolog of NCBI NO: 15238677 NR Description: polypyrimidine tract-binding protein 1 (PTB) nuclear ribonucleoprotein I) (hnRNP I), putative [Arabidopsis
  misc_feature (251)..(440): Homolog of NCBI NO: 34912728 NR Description: putative polypyrimidine tract-binding protein
  misc_feature (45)..(219): Homolog of NCBI NO: 34912728 NR Description: putative polypyrimidine tract-binding protein
  misc_feature (170)..(355): Homolog of NCBI NO: 20260638 NR Description: putative polypyrimidine tract-binding protein
  misc_feature (58)..(385): Homolog of NCBI NO: 22329999 NR Description: polypyrimidine tract-binding protein 1 (PTB) nuclear ribonucleoprotein I) (hnRNP I), putative [Arabidopsis
  misc_feature (57)..(262): Homolog of NCBI NO: 28949889 NR Description: polypyrimidine track-binding protein homologue
  misc_feature (274)..(439): Homolog of NCBI NO: 31230545 NR Description: ENSANGP00000002751 [Anopheles gambiae]
MAVWFWFRSQRASNRATSSAGFAVCVIVRLLNLKQVSNALPEMSSSGQTQFRYTQTPSKVVHLRNLPWECVEEELIDLCKRFGKIVNTKSNVGANRNQAFVEFADLNQAISMVSYYASSSEPAQIRGKTVYIQYSNRHEIVNNQSPGDVPGNVLLVTFEGVESHEVSIDVIHLVFSAFGFVHKIATFEKAAGFQALVQFTDVETASAARSALDGRSIPRYLLSAHVGSCSLRMSYSAHTDLNIKFQSHRSRDYTNPYLPVNQTAMDGSMQPALGADGKKVESQSNVLLGLIENMQYAVTVDVLHTVFSAYGTVQKIAIFEKNGSTQALIQYSDIPTAAMAKEALEGHCIYDGGYCKLRLSYSRHTDLNVKAFSDKSRDYTLPDLSLLVAQKGPAVSGSAPPAGWQNPQAQSQYSGYGGSPYMYPSSDPNGASPSGQPPYYG

SEQ ID NO: 103991 - protein, 399 aa, Arabidopsis thaliana; identical to SEQ ID NO: 27594
  peptide (1)..(399): Ceres Seq. ID no. 13614063
  misc_feature (19)..(90): Pfam Name: RNA recognition motif. (a.k.a. RRM, RBD, or RNP domain) Pfam Description: RNA recognition motif. (a.k.a. RRM, RBD, or RNP
  misc_feature (1)..(399): Homolog of NCBI NO: 15232047 NR Description: polypyrimidine tract-binding protein 1 (PTB) nuclear ribonucleoprotein I) (hnRNP I), putative [Arabidopsis
  misc_feature (1)..(399): Homolog of NCBI NO: 11358627 NR Description: polypyrimidine tract-binding protein homolog
  misc_feature (1)..(395): Homolog of NCBI NO: 18921326 NR Description: putative polypyrimidine tract-binding protein
  misc_feature (1)..(394): Homolog of NCBI NO: 15238677 NR Description: polypyrimidine tract-binding protein 1 (PTB) nuclear ribonucleoprotein I) (hnRNP I), putative [Arabidopsis
  misc_feature (209)..(398): Homolog of NCBI NO: 34912728 NR Description: putative polypyrimidine tract-binding protein
  misc_feature (3)..(177): Homolog of NCBI NO: 34912728 NR Description: putative polypyrimidine tract-binding protein
  misc_feature (128)..(313): Homolog of NCBI NO: 20260638 NR Description: putative polypyrimidine tract-binding protein
  misc_feature (16)..(343): Homolog of NCBI NO: 22329999 NR Description: polypyrimidine tract-binding protein 1 (PTB) nuclear ribonucleoprotein I) (hnRNP I), putative [Arabidopsis
  misc_feature (15)..(220): Homolog of NCBI NO: 28949889 NR Description: polypyrimidine track-binding protein homologue
  misc_feature (232)..(397): Homolog of NCBI NO: 31230545 NR Description: ENSANGP00000002751 [Anopheles gambiae]

SEQ ID NO: 103992 - protein, 330 aa, Arabidopsis thaliana; identical to SEQ ID NO: 27595
  peptide (1)..(330): Ceres Seq. ID no. 13614064
  misc_feature (1)..(330): Homolog of NCBI NO: 15232047 NR Description: polypyrimidine tract-binding protein 1 (PTB) nuclear ribonucleoprotein I) (hnRNP I), putative [Arabidopsis
  misc_feature (1)..(330): Homolog of NCBI NO: 11358627 NR Description: polypyrimidine tract-binding protein homolog
  misc_feature (1)..(326): Homolog of NCBI NO: 18921326 NR Description: putative polypyrimidine tract-binding protein
  misc_feature (1)..(325): Homolog of NCBI NO: 15238677 NR Description: polypyrimidine tract-binding protein 1 (PTB) nuclear ribonucleoprotein I) (hnRNP I), putative [Arabidopsis
  misc_feature (140)..(329): Homolog of NCBI NO: 34912728 NR Description: putative polypyrimidine tract-binding protein
  misc_feature (1)..(108): Homolog of NCBI NO: 34912728 NR Description: putative polypyrimidine tract-binding protein
  misc_feature (59)..(244): Homolog of NCBI NO: 20260638 NR Description: putative polypyrimidine tract-binding protein
  misc_feature (1)..(274): Homolog of NCBI NO: 22329999 NR Description: polypyrimidine tract-binding protein 1 (PTB) nuclear ribonucleoprotein I) (hnRNP I), putative [Arabidopsis
  misc_feature (1)..(151): Homolog of NCBI NO: 28949889 NR Description: polypyrimidine track-binding protein homologue
  misc_feature (163)..(328): Homolog of NCBI NO: 31230545 NR Description: ENSANGP00000002751 [Anopheles gambiae]

SEQ ID NO: 103993 - DNA, 1185 bp, Arabidopsis thaliana
  misc_feature (1)..(1185): Ceres Seq. ID no. 13614076
  misc_feature: MA Experiment ID: 108434 Result: Up-regulated in Transcription
  misc_feature: MA Experiment 108434 PARAMETER Experiment Name: At_Root_Tips_cDNA_P Parameter: Tissue Value: Root Tips
  misc_feature: MA Experiment ID: 108462 Result: Down-regulated in Transcription
  misc_feature: MA Experiment 108462 PARAMETER Experiment Name: At_Germinating_Seeds_cDNA_P Parameter: Age (day) Value: 2 vs. 0
  misc_feature: MA Experiment 108462 PARAMETER Experiment Name: At_Germinating_Seeds_cDNA_P Parameter: Tissue Value: Germinating Seeds
  misc_feature: MA Experiment ID: 108463 Result: Down-regulated in Transcription
  misc_feature: MA Experiment 108463 PARAMETER Experiment Name: At_Germinating_Seeds_cDNA_P Parameter: Age (day) Value: 3 vs. 0
  misc_feature: MA Experiment 108463 PARAMETER Experiment Name: At_Germinating_Seeds_cDNA_P Parameter: Tissue Value: Germinating Seeds
  misc_feature: MA Experiment ID: 108464 Result: Down-regulated in Transcription
  misc_feature: MA Experiment 108464 PARAMETER Experiment Name: At_Germinating_Seeds_cDNA_P Parameter: Age (day) Value: 4 vs. 0
  misc_feature: MA Experiment 108464 PARAMETER Experiment Name: At_Germinating_Seeds_cDNA_P Parameter: Tissue Value: Germinating Seeds
  misc_feature: MA Experiment ID: 108569 Result: Up-regulated in Transcription
  misc_feature: MA Experiment 108569 PARAMETER Experiment Name: At_0.001%_MeJA__cDNA_P Parameter: Timepoint (hr) Value: 6
  misc_feature: MA Experiment 108569 PARAMETER Experiment Name: At_0.001%_MeJA__cDNA_P Parameter: Tissue Value: Aerial
  misc_feature: MA Experiment 108569 PARAMETER Experiment Name: At_0.001%_MeJA__cDNA_P Parameter: Treatment Value: 0.001% MeJA vs. No Treatment
aatattcggaaataaaaaacattttagggttttcctcagtctctctctcttatagacgccaaccacgttttccagctcttgttctttcgattctcagagaagacttttcagaacatcctccaactttctcagataagcaacaatggtgaaaggtcccggtctctacaccgaaatcggcaaaaaggccagagatcttctgtacaaagaccacaacagtgaccagaaattcagtatcaccactttctctcctgccggtgttgccatcacctcaaccggaactaagaaaggtgacttattgttgggagatgtcgcttttcagtcgaggcgaaagaacattactactgatttgaaagtttgcactgattctacttttctgatcaccgctaccgttgatgaggctgcacccggactgaggtcaatcttcagcttcaaggttcctgaccaaaattctggcaaggttgagctgcaatacttgcatgagtacgccggtatcagcacaagcatgggattgactcagaacccaactgtcaacttctctggtgtgattggctccaatgtcttggctgttggtactgatgtttcatttgacaccaagtctggaaatttcaccaagatcaatgctggtttaagcttcaccaaggaggacttaattgcctcccttactgtgaacgacaagggcgatctattgaatgcatcttactatcacattgtgaacccgctgttcaacactgcggttggagccgaagtgagccacaagttatctagcaaggacagcaccataactgttggaacacagcactcgcttgaccccttgacctctgtgaaggctcgtgtcaatagtgcgggtattgcaagtgctctcattcaacacgagtggaaacccaagtcattcttcacaatctctggagaagtcgacacaaagtcaattgacaagagtgctaaagttggattggctctcgcactcaagccttgaaactgagatggaagaagaagttgcaatagtttttttaaactagtttctttctacgtactctgttttttctctgcttggttcatggtttgagtgggcaactactgatctttcccattttcctgccggatttgtagaagaataaaaaggttgaaaatgatcatcttgagatggtgatgaaactcttaagatcctcctcttctgcttctcttttt

SEQ ID NO: 103994 - protein, 276 aa, Arabidopsis thaliana; identical to SEQ ID NO: 25200
  peptide (1)..(276): Ceres Seq. ID no. 13614077
  misc_feature (4)..(269): Pfam Name: Eukaryotic porin Pfam Description: Eukaryotic porin
  misc_feature (1)..(276): Homolog of NCBI NO: 15232074 NR Description: porin -related [Arabidopsis thaliana]
  misc_feature (1)..(276): Homolog of NCBI NO: 21593558 NR Description: putative porin [Arabidopsis thaliana]
  misc_feature (1)..(276): Homolog of NCBI NO: 36957183 NR Description: VDAC1.2 [Lotus corniculatus var. japonicus]
  misc_feature (1)..(276): Homolog of NCBI NO: 36957170 NR Description: VDAC1.1 [Lotus corniculatus var. japonicus]
  misc_feature (1)..(276): Homolog of NCBI NO: 1172555 NR Description: 34 kDa outer mitochondrial membrane protein porin
  misc_feature (1)..(276): Homolog of NCBI NO: 5031279 NR Description: porin [Prunus armeniaca]
  misc_feature (1)..(276): Homolog of NCBI NO: 7442952 NR Description: voltage-dependent anion channel protein - spinach
  misc_feature (1)..(276): Homolog of NCBI NO: 7442953 NR Description: porin - common ice plant
  misc_feature (1)..(276): Homolog of NCBI NO: 1172556 NR Description: 36 kDa outer mitochondrial membrane protein porin
  misc_feature (1)..(276): Homolog of NCBI NO: 629728 NR Description: porin I, 36K - potato >gi|1076680|pir||C55364

SEQ ID NO: 103995 - protein, 156 aa, Arabidopsis thaliana; identical to SEQ ID NO: 25201
  peptide (1)..(156): Ceres Seq. ID no. 13614078
  misc_feature (1)..(149): Pfam Name: Eukaryotic porin Pfam Description: Eukaryotic porin
  misc_feature (1)..(156): Homolog of NCBI NO: 15232074 NR Description: porin -related [Arabidopsis thaliana]
  misc_feature (1)..(156): Homolog of NCBI NO: 21593558 NR Description: putative porin [Arabidopsis thaliana]
  misc_feature (1)..(156): Homolog of NCBI NO: 36957183 NR Description: VDAC1.2 [Lotus corniculatus var. japonicus]
  misc_feature (1)..(156): Homolog of NCBI NO: 36957170 NR Description: VDAC1.1 [Lotus corniculatus var. japonicus]
  misc_feature (1)..(156): Homolog of NCBI NO: 1172555 NR Description: 34 kDa outer mitochondrial membrane protein porin
  misc_feature (1)..(156): Homolog of NCBI NO: 5031279 NR Description: porin [Prunus armeniaca]
  misc_feature (1)..(156): Homolog of NCBI NO: 7442952 NR Description: voltage-dependent anion channel protein - spinach
  misc_feature (1)..(156): Homolog of NCBI NO: 7442953 NR Description: porin - common ice plant
  misc_feature (1)..(156): Homolog of NCBI NO: 1172556 NR Description: 36 kDa outer mitochondrial membrane protein porin
  misc_feature (1)..(156): Homolog of NCBI NO: 629728 NR Description: porin I, 36K - potato >gi|1076680|pir||C55364

SEQ ID NO: 103996 - DNA, 1119 bp, Arabidopsis thaliana
  misc_feature (1)..(1119): Ceres Seq. ID no. 13614079
  misc_feature: MA Experiment ID: 108434 Result: Down-regulated in Transcription
  misc_feature: MA Experiment 108434 PARAMETER Experiment Name: At_Root_Tips_cDNA_P Parameter: Tissue Value: Root Tips
  misc_feature: MA Experiment ID: 108462 Result: Up-regulated in Transcription
  misc_feature: MA Experiment 108462 PARAMETER Experiment Name: At_Germinating_Seeds_cDNA_P Parameter: Age (day) Value: 2 vs. 0
  misc_feature: MA Experiment 108462 PARAMETER Experiment Name: At_Germinating_Seeds_cDNA_P Parameter: Tissue Value: Germinating Seeds
  misc_feature: MA Experiment ID: 108464 Result: Up-regulated in Transcription
  misc_feature: MA Experiment 108464 PARAMETER Experiment Name: At_Germinating_Seeds_cDNA_P Parameter: Age (day) Value: 4 vs. 0
  misc_feature: MA Experiment 108464 PARAMETER Experiment Name: At_Germinating_Seeds_cDNA_P Parameter: Tissue Value: Germinating Seeds
  misc_feature: MA Experiment ID: 108469 Result: Up-regulated in Transcription
  misc_feature: MA Experiment ID: 108572 Result: Down-regulated in Transcription
  misc_feature: MA Experiment 108572 PARAMETER Experiment Name: At_Drought_cDNA_P Parameter: Timepoint (hr) Value: 1
  misc_feature: MA Experiment 108572 PARAMETER Experiment Name: At_Drought_cDNA_P Parameter: Tissue Value: Aerial
  misc_feature: MA Experiment 108572 PARAMETER Experiment Name: At_Drought_cDNA_P Parameter: Treatment Value: Drought vs. No Drought
  misc_feature: MA Experiment ID: 108573 Result: Down-regulated in Transcription
  misc_feature: MA Experiment 108573 PARAMETER Experiment Name: At_Drought_cDNA_P Parameter: Timepoint (hr) Value: 6
  misc_feature: MA Experiment 108573 PARAMETER Experiment Name: At_Drought_cDNA_P Parameter: Tissue Value: Aerial
  misc_feature: MA Experiment 108573 PARAMETER Experiment Name: At_Drought_cDNA_P Parameter: Treatment Value: Drought vs. No Drought
  misc_feature: MA Experiment ID: 108574 Result: Down-regulated in Transcription
  misc_feature: MA Experiment 108574 PARAMETER Experiment Name: At_Wounding__cDNA_P Parameter: Timepoint (hr) Value: 1
  misc_feature: MA Experiment 108574 PARAMETER Experiment Name: At_Wounding__cDNA_P Parameter: Tissue Value: Aerial
  misc_feature: MA Experiment 108574 PARAMETER Experiment Name: At_Wounding__cDNA_P Parameter: Treatment Value: Wounding vs. No Wounding
  misc_feature: MA Experiment ID: 108577 Result: Down-regulated in Transcription
  misc_feature: MA Experiment 108577 PARAMETER Experiment Name: At_42deg_Heat_cDNA_P Parameter: Temperature (deg C) Value: 42 vs. 22
  misc_feature: MA Experiment 108577 PARAMETER Experiment Name: At_42deg_Heat_cDNA_P Parameter: Timepoint (hr) Value: 6
  misc_feature: MA Experiment 108577 PARAMETER Experiment Name: At_42deg_Heat_cDNA_P Parameter: Tissue Value: Aerial
  misc_feature: MA Experiment ID: 108595 Result: Down-regulated in Transcription
  misc_feature: MA Experiment 108595 PARAMETER Experiment Name: At_Ler-pi_Ovule_cDNA_P Parameter: Plant Line Value: null
  misc_feature: MA Experiment ID: 108668 Result: Up-regulated in Transcription
  misc_feature: MA Experiment 108668 PARAMETER Experiment Name: At_2mM_SA_cDNA_P Parameter: Plant Line Value: WS
  misc_feature: MA Experiment 108668 PARAMETER Experiment Name: At_2mM_SA_cDNA_P Parameter: Timepoint (hr) Value: 6
  misc_feature: MA Experiment 108668 PARAMETER Experiment Name: At_2mM_SA_cDNA_P Parameter: Treatment Value: 2mM SA vs. No Treatment
  misc_feature: MA Experiment ID: 20000069 Result: Up-regulated in Transcription
  misc_feature: MA Experiment 20000069 PARAMETER Experiment Name: At_100uM_ABA_Mutants_cDNA_P Parameter: Plant Line Value: CS23
  misc_feature: MA Experiment 20000069 PARAMETER Experiment Name: At_100uM_ABA_Mutants_cDNA_P Parameter: Timepoint (hr) Value: 6
  misc_feature: MA Experiment 20000069 PARAMETER Experiment Name: At_100uM_ABA_Mutants_cDNA_P Parameter: Tissue Value: Aerial
  misc_feature: MA Experiment 20000069 PARAMETER Experiment Name: At_100uM_ABA_Mutants_cDNA_P Parameter: Treatment Value: 100uM ABA vs. No Treatment
  misc_feature: MA Experiment ID: 20000072 Result: Up-regulated in Transcription
  misc_feature: MA Experiment 20000072 PARAMETER Experiment Name: At_100uM_ABA_Mutants_cDNA_P Parameter: Plant Line Value: CS8105
  misc_feature: MA Experiment 20000072 PARAMETER Experiment Name: At_100uM_ABA_Mutants_cDNA_P Parameter: Timepoint (hr) Value: 6
  misc_feature: MA Experiment 20000072 PARAMETER Experiment Name: At_100uM_ABA_Mutants_cDNA_P Parameter: Tissue Value: Aerial
  misc_feature: MA Experiment 20000072 PARAMETER Experiment Name: At_100uM_ABA_Mutants_cDNA_P Parameter: Treatment Value: 100uM ABA vs. No Treatment
  misc_feature: MA Experiment ID: 20000090 Result: Up-regulated in Transcription
  misc_feature: MA Experiment ID: 20000111 Result: Down-regulated in Transcription
  misc_feature: MA Experiment 20000111 PARAMETER Experiment Name: At_42deg_Heat_cDNA_P Parameter: Temperature (deg C) Value: 42 vs. 22
  misc_feature: MA Experiment 20000111 PARAMETER Experiment Name: At_42deg_Heat_cDNA_P Parameter: Timepoint (hr) Value: 6
  misc_feature: MA Experiment 20000111 PARAMETER Experiment Name: At_42deg_Heat_cDNA_P Parameter: Tissue Value: Aerial
  misc_feature: MA Experiment ID: 20000113 Result: Down-regulated in Transcription
  misc_feature: MA Experiment 20000113 PARAMETER Experiment Name: At_42deg_Heat_cDNA_P Parameter: Temperature (deg C) Value: 42 vs. 22
  misc_feature: MA Experiment 20000113 PARAMETER Experiment Name: At_42deg_Heat_cDNA_P Parameter: Timepoint (hr) Value: 8
  misc_feature: MA Experiment 20000113 PARAMETER Experiment Name: At_42deg_Heat_cDNA_P Parameter: Tissue Value: Aerial
  misc_feature: MA Experiment ID: 20000180 Result: Up-regulated in Transcription
  misc_feature: MA Experiment 20000180 PARAMETER Experiment Name: At_Germinating_Seeds_P Parameter: Age (hr) Value: 24 vs. 0
  misc_feature: MA Experiment 20000180 PARAMETER Experiment Name: At_Germinating_Seeds_P Parameter: Tissue Value: Germinating Seeds
  misc_feature: MA Experiment ID: 20000182 Result: Up-regulated in Transcription
  misc_feature: MA Experiment 20000182 PARAMETER Experiment Name: At_2mM_SA_P Parameter: Age (day) Value: 14
  misc_feature: MA Experiment 20000182 PARAMETER Experiment Name: At_2mM_SA_P Parameter: Organism Value: A. thaliana
  misc_feature: MA Experiment 20000182 PARAMETER Experiment Name: At_2mM_SA_P Parameter: Plant Line Value: WS
  misc_feature: MA Experiment 20000182 PARAMETER Experiment Name: At_2mM_SA_P Parameter: Timepoint (hr) Value: 6
  misc_feature: MA Experiment 20000182 PARAMETER Experiment Name: At_2mM_SA_P Parameter: Tissue Value: Aerial
  misc_feature: MA Experiment 20000182 PARAMETER Experiment Name: At_2mM_SA_P Parameter: Treatment Value: 2mM SA vs. No Treatment
  misc_feature: MA Experiment ID: 20000184 Result: Down-regulated in Transcription
  misc_feature: MA Experiment 20000184 PARAMETER Experiment Name: At_Shoots__P Parameter: Age (day) Value: 7
  misc_feature: MA Experiment 20000184 PARAMETER Experiment Name: At_Shoots__P Parameter: Tissue Value: Shoots vs. Whole Plant
  misc_feature: MA Experiment ID: 20000224 Result: Down-regulated in Transcription
  misc_feature: MA Experiment ID: 20000227 Result: Down-regulated in Transcription
  misc_feature: MA Experiment 20000227 PARAMETER Experiment Name: At_Root-Tips-vs-Tops_P Parameter: Tissue Value: Root Tips vs. Root Tops
  misc_feature: MA Experiment ID: 20000234 Result: Down-regulated in Transcription
  misc_feature: MA Experiment 20000234 PARAMETER Experiment Name: At_Siliques_P Parameter: Age (day) Value: 21
  misc_feature: MA Experiment 20000234 PARAMETER Experiment Name: At_Siliques_P Parameter: Organism Value: A. thaliana
  misc_feature: MA Experiment 20000234 PARAMETER Experiment Name: At_Siliques_P Parameter: Plant Line Value: WS
  misc_feature: MA Experiment 20000234 PARAMETER Experiment Name: At_Siliques_P Parameter: Tissue Value: Less Than 5mm Siliques vs. Whole Plant
  misc_feature: MA Experiment ID: 20000264 Result: Down-regulated in Transcription
  misc_feature: MA Experiment 20000264 PARAMETER Experiment Name: At_Open_Flower_P Parameter: Age (day) Value: 21
  misc_feature: MA Experiment 20000264 PARAMETER Experiment Name: At_Open_Flower_P Parameter: Plant Line Value: WS
  misc_feature: MA Experiment 20000264 PARAMETER Experiment Name: At_Open_Flower_P Parameter: Tissue Value: Open Flower vs. Whole Plant
  misc_feature: MA Experiment ID: 20000265 Result: Down-regulated in Transcription
  misc_feature: MA Experiment 20000265 PARAMETER Experiment Name: At_Open_Flower_P Parameter: Age (day) Value: 21
  misc_feature: MA Experiment 20000265 PARAMETER Experiment Name: At_Open_Flower_P Parameter: Plant Line Value: WS
  misc_feature: MA Experiment 20000265 PARAMETER Experiment Name: At_Open_Flower_P Parameter: Tissue Value: Closed Flower vs. Whole Plant
  misc_feature: MA Experiment ID: 20000267 Result: Down-regulated in Transcription
  misc_feature: MA Experiment 20000267 PARAMETER Experiment Name: At_Drought_P Parameter: Age (day) Value: 7
  misc_feature: MA Experiment 20000267 PARAMETER Experiment Name: At_Drought_P Parameter: Organism Value: A. thaliana
  misc_feature: MA Experiment 20000267 PARAMETER Experiment Name: At_Drought_P Parameter: Plant Line Value: WS
  misc_feature: MA Experiment 20000267 PARAMETER Experiment Name: At_Drought_P Parameter: Timepoint (hr) Value: 6
  misc_feature: MA Experiment 20000267 PARAMETER Experiment Name: At_Drought_P Parameter: Tissue Value: Whole Plant
  misc_feature: MA Experiment 20000267 PARAMETER Experiment Name: At_Drought_P Parameter: Treatment Value: Drought vs. No Drought
  misc_feature: MA Experiment ID: 20000268 Result: Down-regulated in Transcription
  misc_feature: MA Experiment 20000268 PARAMETER Experiment Name: At_100mM_NaCl__P Parameter: Age (day) Value: 14
  misc_feature: MA Experiment 20000268 PARAMETER Experiment Name: At_100mM_NaCl__P Parameter: Organism Value: A. thaliana
  misc_feature: MA Experiment 20000268 PARAMETER Experiment Name: At_100mM_NaCl__P Parameter: Plant Line Value: WS
  misc_feature: MA Experiment 20000268 PARAMETER Experiment Name: At_100mM_NaCl__P Parameter: Timepoint (hr) Value: 6
  misc_feature: MA Experiment 20000268 PARAMETER Experiment Name: At_100mM_NaCl__P Parameter: Tissue Value: Whole Plant
  misc_feature: MA Experiment 20000268 PARAMETER Experiment Name: At_100mM_NaCl__P Parameter: Treatment Value: 100mM NaCl vs. No Treatment
  misc_feature: MA Experiment ID: 20000286 Result: Down-regulated in Transcription
  misc_feature: MA Experiment 20000286 PARAMETER Experiment Name: At_Open_Flower_P Parameter: Age (day) Value: 21
  misc_feature: MA Experiment 20000286 PARAMETER Experiment Name: At_Open_Flower_P Parameter: Plant Line Value: WS
  misc_feature: MA Experiment 20000286 PARAMETER Experiment Name: At_Open_Flower_P Parameter: Tissue Value: Half Open vs. Whole Plant
  misc_feature: MA Experiment ID: 20000437 Result: Down-regulated in Transcription
  misc_feature: MA Experiment 20000437 PARAMETER Experiment Name: At_Drought_P Parameter: Age (day) Value: 8
  misc_feature: MA Experiment 20000437 PARAMETER Experiment Name: At_Drought_P Parameter: Organism Value: A. thaliana
  misc_feature: MA Experiment 20000437 PARAMETER Experiment Name: At_Drought_P Parameter: Plant Line Value: WS
  misc_feature: MA Experiment 20000437 PARAMETER Experiment Name: At_Drought_P Parameter: Timepoint (hr) Value: 24
  misc_feature: MA Experiment 20000437 PARAMETER Experiment Name: At_Drought_P Parameter: Tissue Value: Whole Plant
  misc_feature: MA Experiment 20000437 PARAMETER Experiment Name: At_Drought_P Parameter: Treatment Value: Drought vs. No Drought
  misc_feature: MA Experiment ID: 20000438 Result: Down-regulated in Transcription
  misc_feature: MA Experiment 20000438 PARAMETER Experiment Name: At_Shoots__P Parameter: Age (day) Value: 14
  misc_feature: MA Experiment 20000438 PARAMETER Experiment Name: At_Shoots__P Parameter: Tissue Value: Shoots vs. Whole Plant
  misc_feature: MA Experiment ID: 20000441 Result: Up-regulated in Transcription
  misc_feature: MA Experiment 20000441 PARAMETER Experiment Name: At_1uM_BR-BRZ__P Parameter: Tissue Value: Shoot Apices
  misc_feature: MA Experiment 20000441 PARAMETER Experiment Name: At_1uM_BR-BRZ__P Parameter: Treatment Value: 1uM BR vs. No Treatment
  misc_feature: MA Experiment ID: 20000445 Result: Up-regulated in Transcription
  misc_feature: MA Experiment 20000445 PARAMETER Experiment Name: At_100uM_NAA__P Parameter: Age (day) Value: 14
  misc_feature: MA Experiment 20000445 PARAMETER Experiment Name: At_100uM_NAA__P Parameter: Organism Value: A. thaliana
  misc_feature: MA Experiment 20000445 PARAMETER Experiment Name: At_100uM_NAA__P Parameter: Plant Line Value: WS
  misc_feature: MA Experiment 20000445 PARAMETER Experiment Name: At_100uM_NAA__P Parameter: Timepoint (hr) Value: 6
  misc_feature: MA Experiment 20000445 PARAMETER Experiment Name: At_100uM_NAA__P Parameter: Tissue Value: Aerial
  misc_feature: MA Experiment 20000445 PARAMETER Experiment Name: At_100uM_NAA__P Parameter: Treatment Value: 100uM NAA vs. No Treatment
  misc_feature: MA Experiment ID: 20000451 Result: Down-regulated in Transcription
  misc_feature: MA Experiment 20000451 PARAMETER Experiment Name: At_CS6879_Shoots-Roots_P Parameter: Age (day) Value: 14
  misc_feature: MA Experiment 20000451 PARAMETER Experiment Name: At_CS6879_Shoots-Roots_P Parameter: Organism Value: A. thaliana
  misc_feature: MA Experiment 20000451 PARAMETER Experiment Name: At_CS6879_Shoots-Roots_P Parameter: Plant Line Value: CS6879 vs. WS
  misc_feature: MA Experiment 20000451 PARAMETER Experiment Name: At_CS6879_Shoots-Roots_P Parameter: Tissue Value: Roots
  misc_feature: MA Experiment ID: 20000452 Result: Down-regulated in Transcription
  misc_feature: MA Experiment 20000452 PARAMETER Experiment Name: At_CS6879_Shoots-Roots_P Parameter: Age (day) Value: 14
  misc_feature: MA Experiment 20000452 PARAMETER Experiment Name: At_CS6879_Shoots-Roots_P Parameter: Organism Value: A. thaliana
  misc_feature: MA Experiment 20000452 PARAMETER Experiment Name: At_CS6879_Shoots-Roots_P Parameter: Plant Line Value: CS6879 vs. WS
  misc_feature: MA Experiment 20000452 PARAMETER Experiment Name: At_CS6879_Shoots-Roots_P Parameter: Tissue Value: Shoots
  misc_feature: MA Experiment ID: 20000573 Result: Up-regulated in Transcription
  misc_feature: MA Experiment 20000573 PARAMETER Experiment Name: At_100uM_ABA_Mutants__P Parameter: Organism Value: A. thaliana
  misc_feature: MA Experiment 20000573 PARAMETER Experiment Name: At_100uM_ABA_Mutants__P Parameter: Plant Line Value: CS22 vs. Ler wt
  misc_feature: MA Experiment 20000573 PARAMETER Experiment Name: At_100uM_ABA_Mutants__P Parameter: Timepoint (hr) Value: N/A
  misc_feature: MA Experiment 20000573 PARAMETER Experiment Name: At_100uM_ABA_Mutants__P Parameter: Tissue Value: Whole Plant
  misc_feature: MA Experiment 20000573 PARAMETER Experiment Name: At_100uM_ABA_Mutants__P Parameter: Treatment Value: None
  misc_feature: MA Experiment ID: 20000574 Result: Up-regulated in Transcription
  misc_feature: MA Experiment 20000574 PARAMETER Experiment Name: At_100uM_ABA_Mutants__P Parameter: Organism Value: A. thaliana
  misc_feature: MA Experiment 20000574 PARAMETER Experiment Name: At_100uM_ABA_Mutants__P Parameter: Plant Line Value: CS23 vs. Ler wt
  misc_feature: MA Experiment 20000574 PARAMETER Experiment Name: At_100uM_ABA_Mutants__P Parameter: Timepoint (hr) Value: N/A
  misc_feature: MA Experiment 20000574 PARAMETER Experiment Name: At_100uM_ABA_Mutants__P Parameter: Tissue Value: Whole Plant
  misc_feature: MA Experiment 20000574 PARAMETER Experiment Name: At_100uM_ABA_Mutants__P Parameter: Treatment Value: None
  misc_feature: MA Experiment ID: 20000606 Result: Up-regulated in Transcription
  misc_feature: MA Experiment 20000606 PARAMETER Experiment Name: At_CS8548_Mutant_P Parameter: Age (day) Value: 14
  misc_feature: MA Experiment 20000606 PARAMETER Experiment Name: At_CS8548_Mutant_P Parameter: Plant Line Value: CS8548 vs. wt
  misc_feature: MA Experiment 20000606 PARAMETER Experiment Name: At_CS8548_Mutant_P Parameter: Tissue Value: Whole Plant
  misc_feature: MA Experiment ID: 20000794 Result: Down-regulated in Transcription
  misc_feature: MA Experiment 20000794 PARAMETER Experiment Name: At_Petals_P Parameter: Age (day) Value: 23-25 days
  misc_feature: MA Experiment 20000794 PARAMETER Experiment Name: At_Petals_P Parameter: Plant Line Value: WS
  misc_feature: MA Experiment 20000794 PARAMETER Experiment Name: At_Petals_P Parameter: Tissue Value: Petals vs. Whole plant
  misc_feature: MA Experiment ID: 20001247 Result: Up-regulated in Transcription
  misc_feature: MA Experiment 20001247 PARAMETER Experiment Name: At_Far-red-induction_P Parameter: Age (day) Value: 7
  misc_feature: MA Experiment 20001247 PARAMETER Experiment Name: At_Far-red-induction_P Parameter: Light Value: Far-red vs. White
  misc_feature: MA Experiment 20001247 PARAMETER Experiment Name: At_Far-red-induction_P Parameter: Organism Value: A. thaliana
  misc_feature: MA Experiment 20001247 PARAMETER Experiment Name: At_Far-red-induction_P Parameter: Plant Line Value: Columbia
  misc_feature: MA Experiment 20001247 PARAMETER Experiment Name: At_Far-red-induction_P Parameter: Timepoint (hr) Value: 1
  misc_feature: MA Experiment 20001247 PARAMETER Experiment Name: At_Far-red-induction_P Parameter: Tissue Value: Whole Plant
  misc_feature: MA Experiment ID: 20001248 Result: Up-regulated in Transcription
  misc_feature: MA Experiment 20001248 PARAMETER Experiment Name: At_Far-red-induction_P Parameter: Age (day) Value: 7
  misc_feature: MA Experiment 20001248 PARAMETER Experiment Name: At_Far-red-induction_P Parameter: Light Value: Far-red vs. White
  misc_feature: MA Experiment 20001248 PARAMETER Experiment Name: At_Far-red-induction_P Parameter: Organism Value: A. thaliana
  misc_feature: MA Experiment 20001248 PARAMETER Experiment Name: At_Far-red-induction_P Parameter: Plant Line Value: Columbia
  misc_feature: MA Experiment 20001248 PARAMETER Experiment Name: At_Far-red-induction_P Parameter: Timepoint (hr) Value: 4
  misc_feature: MA Experiment 20001248 PARAMETER Experiment Name: At_Far-red-induction_P Parameter: Tissue Value: Whole Plant
  misc_feature: MA Experiment ID: 20001554 Result: Down-regulated in Transcription
  misc_feature: MA Experiment 20001554 PARAMETER Experiment Name: At_Drought_Soil_Dry_P Parameter: Age (day) Value: 21
  misc_feature: MA Experiment 20001554 PARAMETER Experiment Name: At_Drought_Soil_Dry_P Parameter: Organism Value: A. thaliana
  misc_feature: MA Experiment 20001554 PARAMETER Experiment Name: At_Drought_Soil_Dry_P Parameter: Plant Line Value: WS
  misc_feature: MA Experiment 20001554 PARAMETER Experiment Name: At_Drought_Soil_Dry_P Parameter: Post Timepoint (hr) Value: None
  misc_feature: MA Experiment 20001554 PARAMETER Experiment Name: At_Drought_Soil_Dry_P Parameter: Post-Treatment Value: None
  misc_feature: MA Experiment 20001554 PARAMETER Experiment Name: At_Drought_Soil_Dry_P Parameter: Timepoint (day) Value: 7
  misc_feature: MA Experiment 20001554 PARAMETER Experiment Name: At_Drought_Soil_Dry_P Parameter: Treatment Value: Drought vs. No Drought
  misc_feature: MA Experiment ID: 20001555 Result: Down-regulated in Transcription
  misc_feature: MA Experiment 20001555 PARAMETER Experiment Name: At_Drought_Soil_Dry_P Parameter: Age (day) Value: 24
  misc_feature: MA Experiment 20001555 PARAMETER Experiment Name: At_Drought_Soil_Dry_P Parameter: Organism Value: A. thaliana
  misc_feature: MA Experiment 20001555 PARAMETER Experiment Name: At_Drought_Soil_Dry_P Parameter: Plant Line Value: WS
  misc_feature: MA Experiment 20001555 PARAMETER Experiment Name: At_Drought_Soil_Dry_P Parameter: Post Timepoint (hr) Value: None
  misc_feature: MA Experiment 20001555 PARAMETER Experiment Name: At_Drought_Soil_Dry_P Parameter: Post-Treatment Value: None
  misc_feature: MA Experiment 20001555 PARAMETER Experiment Name: At_Drought_Soil_Dry_P Parameter: Timepoint (day) Value: 10
  misc_feature: MA Experiment 20001555 PARAMETER Experiment Name: At_Drought_Soil_Dry_P Parameter: Treatment Value: Drought vs. No Drought
  misc_feature: MA Experiment ID: 20001556 Result: Down-regulated in Transcription
  misc_feature: MA Experiment 20001556 PARAMETER Experiment Name: At_Drought_Soil_Dry_P Parameter: Age (day) Value: 26
  misc_feature: MA Experiment 20001556 PARAMETER Experiment Name: At_Drought_Soil_Dry_P Parameter: Organism Value: A. thaliana
  misc_feature: MA Experiment 20001556 PARAMETER Experiment Name: At_Drought_Soil_Dry_P Parameter: Plant Line Value: WS
  misc_feature: MA Experiment 20001556 PARAMETER Experiment Name: At_Drought_Soil_Dry_P Parameter: Post Timepoint (hr) Value: None
  misc_feature: MA Experiment 20001556 PARAMETER Experiment Name: At_Drought_Soil_Dry_P Parameter: Post-Treatment Value: None
  misc_feature: MA Experiment 20001556 PARAMETER Experiment Name: At_Drought_Soil_Dry_P Parameter: Timepoint (day) Value: 12
  misc_feature: MA Experiment 20001556 PARAMETER Experiment Name: At_Drought_Soil_Dry_P Parameter: Treatment Value: Drought vs. No Drought
  misc_feature: MA Experiment ID: 20001560 Result: Down-regulated in Transcription
  misc_feature: MA Experiment 20001560 PARAMETER Experiment Name: At_Drought_Soil_Dry_P Parameter: Age (day) Value: 28
  misc_feature: MA Experiment 20001560 PARAMETER Experiment Name: At_Drought_Soil_Dry_P Parameter: Organism Value: A. thaliana
  misc_feature: MA Experiment 20001560 PARAMETER Experiment Name: At_Drought_Soil_Dry_P Parameter: Plant Line Value: WS
  misc_feature: MA Experiment 20001560 PARAMETER Experiment Name: At_Drought_Soil_Dry_P Parameter: Post Timepoint (hr) Value: None
  misc_feature: MA Experiment 20001560 PARAMETER Experiment Name: At_Drought_Soil_Dry_P Parameter: Post-Treatment Value: None
  misc_feature: MA Experiment 20001560 PARAMETER Experiment Name: At_Drought_Soil_Dry_P Parameter: Timepoint (day) Value: 14
  misc_feature: MA Experiment 20001560 PARAMETER Experiment Name: At_Drought_Soil_Dry_P Parameter: Treatment Value: Drought vs. No Drought
  misc_feature: MA Experiment ID: 20001760 Result: Down-regulated in Transcription
  misc_feature: MA Experiment 20001760 PARAMETER Experiment Name: At_50mM_NH4NO3_L-to-H_P Parameter: Timepoint (hr) Value: 2
  misc_feature: MA Experiment 20001760 PARAMETER Experiment Name: At_50mM_NH4NO3_L-to-H_P Parameter: Tissue Value: Siliques
  misc_feature: MA Experiment 20001760 PARAMETER Experiment Name: At_50mM_NH4NO3_L-to-H_P Parameter: Treatment Value: 50mM NH4NO3 vs 100mM Mannitol
  misc_feature: MA Experiment ID: 20001906 Result: Down-regulated in Transcription
  misc_feature: MA Experiment 20001906 PARAMETER Experiment Name: At_Drought_Reproduction_P Parameter: Age (day) Value: 35
  misc_feature: MA Experiment 20001906 PARAMETER Experiment Name: At_Drought_Reproduction_P Parameter: Organism Value: A. thaliana
  misc_feature: MA Experiment 20001906 PARAMETER Experiment Name: At_Drought_Reproduction_P Parameter: Plant Line Value: WS
  misc_feature: MA Experiment 20001906 PARAMETER Experiment Name: At_Drought_Reproduction_P Parameter: Timepoint (day) Value: 5
  misc_feature: MA Experiment 20001906 PARAMETER Experiment Name: At_Drought_Reproduction_P Parameter: Tissue Value: Siliques
  misc_feature: MA Experiment 20001906 PARAMETER Experiment Name: At_Drought_Reproduction_P Parameter: Treatment Value: Drought vs. No Drought
  misc_feature: MA Experiment ID: 20001907 Result: Down-regulated in Transcription
  misc_feature: MA Experiment 20001907 PARAMETER Experiment Name: At_Drought_Reproduction_P Parameter: Age (day) Value: 37
  misc_feature: MA Experiment 20001907 PARAMETER Experiment Name: At_Drought_Reproduction_P Parameter: Organism Value: A. thaliana
  misc_feature: MA Experiment 20001907 PARAMETER Experiment Name: At_Drought_Reproduction_P Parameter: Plant Line Value: WS
  misc_feature: MA Experiment 20001907 PARAMETER Experiment Name: At_Drought_Reproduction_P Parameter: Timepoint (day) Value: 7
  misc_feature: MA Experiment 20001907 PARAMETER Experiment Name: At_Drought_Reproduction_P Parameter: Tissue Value: Siliques
  misc_feature: MA Experiment 20001907 PARAMETER Experiment Name: At_Drought_Reproduction_P Parameter: Treatment Value: Drought vs. No Drought
  misc_feature: MA Experiment ID: 20001910 Result: Down-regulated in Transcription
  misc_feature: MA Experiment 20001910 PARAMETER Experiment Name: At_Drought_Reproduction_P Parameter: Age (day) Value: 37
  misc_feature: MA Experiment 20001910 PARAMETER Experiment Name: At_Drought_Reproduction_P Parameter: Organism Value: A. thaliana
  misc_feature: MA Experiment 20001910 PARAMETER Experiment Name: At_Drought_Reproduction_P Parameter: Plant Line Value: WS
  misc_feature: MA Experiment 20001910 PARAMETER Experiment Name: At_Drought_Reproduction_P Parameter: Timepoint (day) Value: 7
  misc_feature: MA Experiment 20001910 PARAMETER Experiment Name: At_Drought_Reproduction_P Parameter: Tissue Value: Flowers
  misc_feature: MA Experiment 20001910 PARAMETER Experiment Name: At_Drought_Reproduction_P Parameter: Treatment Value: Drought vs. No Drought
aaacttacagagagacaaatacctataataagccattcataatcttcttgcttcttgttcagaataatggggaatcttttctgttgcgtgcttgtgaagcaatcagatgttgcggtcaaggagagatttggcaaattccaaaaagtacttaatccaggtctccaatttgttccatgggtcatcggtgattacgtcgccggtacactgacccttcgtcttcagcaactcgatgttcagtgtgaaaccaaaacaaaggacaatgtgtttgtgacagtggttgcatccatacaatacagagtcttagctgacaaggcaagtgatgctttttacagactcagcaatccaaccacccaaatcaaagcctacgtctttgatgtgatcagagcatgtgttccaaagctgaacttggacgatgtgttcgagcagaagaatgaaattgccaaatctgtggaagaagagctagacaaagccatgactgcttatggttacgaaatccttcaaaccctaattatcgacattgagcctgatcaacaggttaaacgtgccatgaacgaaatcaacgccgcggcgaggatgagagtggcagcgagcgaaaaagcagaggctgagaaaatcattcagatcaaaagagcagagggtgaagcagagtcaaagtacctgtcgggactcggaatcgctcggcagagacaagcgatcgtggacggtctgagagacagtgttctagggttcgcaggaaacgtgccagggacgtcagcgaaggatgtgttggacatggtgatgatgactcagtactttgacacaatgagagatatcggagcaacttctaaatcctctgcggtgtttatccctcacggtccaggcgccgtctctgacgtggcagcgcagattcgaaatggattattacaggccaacaatgcctcctaatcactcaagtcaaattgtcttggtcgtctctttatatatttttgtatcttcttattaaaaaggtaaatttgacttttaatataatggtgtgcttattgtgatttgtcattatgtttgtacctatctcttttgtgagttgtgtgatagatatactttgtattttttcttaaaagtcaatataaatttctgtttgcg

SEQ ID NO: 103997 - protein, 285 aa, Arabidopsis thaliana; identical to SEQ ID NO: 39563
  peptide (1)..(285): Ceres Seq. ID no. 13614080
  misc_feature (1)..(285): Homolog of NCBI NO: 18395770 NR Description: expressed protein [Arabidopsis thaliana] unknown protein [Arabidopsis thaliana] unknown protein [Arabidopsis thaliana]
  misc_feature (1)..(285): Homolog of NCBI NO: 15241939 NR Description: hypersensitive-induced response protein
  misc_feature (1)..(282): Homolog of NCBI NO: 37535170 NR Description: putative hypersensitive-induced response protein
  misc_feature (1)..(285): Homolog of NCBI NO: 7716470 NR Description: hypersensitive-induced response protein [Zea mays]
  misc_feature (1)..(285): Homolog of NCBI NO: 23345046 NR Description: hypersensitive-induced reaction protein 3
  misc_feature (1)..(282): Homolog of NCBI NO: 7716468 NR Description: hypersensitive-induced response protein [Zea mays]
  misc_feature (1)..(282): Homolog of NCBI NO: 7716466 NR Description: hypersensitive-induced response protein [Zea mays]
  misc_feature (1)..(281): Homolog of NCBI NO: 14150732 NR Description: hypersensitive-induced response protein [Oryza
  misc_feature (1)..(280): Homolog of NCBI NO: 23345042 NR Description: hypersensitive-induced reaction protein 1
  misc_feature (1)..(282): Homolog of NCBI NO: 13194676 NR Description: hypersensitivity-induced response-like protein

SEQ ID NO: 103998 - protein, 150 aa, Arabidopsis thaliana; identical to SEQ ID NO: 39564
  peptide (1)..(150): Ceres Seq. ID no. 13614081
  misc_feature (1)..(150): Homolog of NCBI NO: 18395770 NR Description: expressed protein [Arabidopsis thaliana] unknown protein [Arabidopsis thaliana] unknown protein [Arabidopsis thaliana]
  misc_feature (1)..(150): Homolog of NCBI NO: 15241939 NR Description: hypersensitive-induced response protein
  misc_feature (1)..(147): Homolog of NCBI NO: 37535170 NR Description: putative hypersensitive-induced response protein
  misc_feature (1)..(150): Homolog of NCBI NO: 7716470 NR Description: hypersensitive-induced response protein [Zea mays]
  misc_feature (1)..(150): Homolog of NCBI NO: 23345046 NR Description: hypersensitive-induced reaction protein 3
  misc_feature (1)..(147): Homolog of NCBI NO: 7716468 NR Description: hypersensitive-induced response protein [Zea mays]
  misc_feature (1)..(147): Homolog of NCBI NO: 7716466 NR Description: hypersensitive-induced response protein [Zea mays]
  misc_feature (1)..(146): Homolog of NCBI NO: 14150732 NR Description: hypersensitive-induced response protein [Oryza
  misc_feature (1)..(145): Homolog of NCBI NO: 23345042 NR Description: hypersensitive-induced reaction protein 1
  misc_feature (1)..(147): Homolog of NCBI NO: 13194676 NR Description: hypersensitivity-induced response-like protein

SEQ ID NO: 103999 - DNA, 1127 bp, Arabidopsis thaliana
  misc_feature (1)..(1127): Ceres Seq. ID no. 13614094
  misc_feature: MA Experiment ID: 108474 Result: Down-regulated in Transcription
  misc_feature: MA Experiment 108474 PARAMETER Experiment Name: At_Drought_Flowers_cDNA_P Parameter: Timepoint (hr) Value: null
  misc_feature: MA Experiment 108474 PARAMETER Experiment Name: At_Drought_Flowers_cDNA_P Parameter: Treatment Value: Drought vs. No Drought
  misc_feature: MA Experiment ID: 108501 Result: Up-regulated in Transcription
  misc_feature: MA Experiment 108501 PARAMETER Experiment Name: At_ap2_floral_buds_cDNA_P Parameter: Plant Line Value: ap2 (Ler.)
  misc_feature: MA Experiment 108501 PARAMETER Experiment Name: At_ap2_floral_buds_cDNA_P Parameter: Tissue Value: Closed Flower
  misc_feature: MA Experiment ID: 108595 Result: Up-regulated in Transcription
  misc_feature: MA Experiment 108595 PARAMETER Experiment Name: At_Ler-pi_Ovule_cDNA_P Parameter: Plant Line Value: null
  misc_feature: MA Experiment ID: 20000113 Result: Up-regulated in Transcription
  misc_feature: MA Experiment 20000113 PARAMETER Experiment Name: At_42deg_Heat_cDNA_P Parameter: Temperature (deg C) Value: 42 vs. 22
  misc_feature: MA Experiment 20000113 PARAMETER Experiment Name: At_42deg_Heat_cDNA_P Parameter: Timepoint (hr) Value: 8
  misc_feature: MA Experiment 20000113 PARAMETER Experiment Name: At_42deg_Heat_cDNA_P Parameter: Tissue Value: Aerial
  misc_feature: MA Experiment ID: 20000264 Result: Up-regulated in Transcription
  misc_feature: MA Experiment 20000264 PARAMETER Experiment Name: At_Open_Flower_P Parameter: Age (day) Value: 21
  misc_feature: MA Experiment 20000264 PARAMETER Experiment Name: At_Open_Flower_P Parameter: Plant Line Value: WS
  misc_feature: MA Experiment 20000264 PARAMETER Experiment Name: At_Open_Flower_P Parameter: Tissue Value: Open Flower vs. Whole Plant
  misc_feature: MA Experiment ID: 20000439 Result: Up-regulated in Transcription
  misc_feature: MA Experiment 20000439 PARAMETER Experiment Name: At_Roots__P Parameter: Age (day) Value: 14 vs. 21
  misc_feature: MA Experiment 20000439 PARAMETER Experiment Name: At_Roots__P Parameter: Organism Value: A. thaliana
  misc_feature: MA Experiment 20000439 PARAMETER Experiment Name: At_Roots__P Parameter: Tissue Value: Roots vs. Whole Plant
  misc_feature: MA Experiment ID: 20001451 Result: Up-regulated in Transcription
  misc_feature: MA Experiment 20001451 PARAMETER Experiment Name: At_Far-red-induction_P Parameter: Age (day) Value: 7
  misc_feature: MA Experiment 20001451 PARAMETER Experiment Name: At_Far-red-induction_P Parameter: Light Value: Far-red vs. White
  misc_feature: MA Experiment 20001451 PARAMETER Experiment Name: At_Far-red-induction_P Parameter: Organism Value: A. thaliana
  misc_feature: MA Experiment 20001451 PARAMETER Experiment Name: At_Far-red-induction_P Parameter: Plant Line Value: Columbia
  misc_feature: MA Experiment 20001451 PARAMETER Experiment Name: At_Far-red-induction_P Parameter: Timepoint (hr) Value: 24
  misc_feature: MA Experiment 20001451 PARAMETER Experiment Name: At_Far-red-induction_P Parameter: Tissue Value: Whole Plant
  misc_feature: MA Experiment ID: 20001558 Result: Up-regulated in Transcription
  misc_feature: MA Experiment 20001558 PARAMETER Experiment Name: At_Drought_Soil_Dry_P Parameter: Age (day) Value: 27
  misc_feature: MA Experiment 20001558 PARAMETER Experiment Name: At_Drought_Soil_Dry_P Parameter: Organism Value: A. thaliana
  misc_feature: MA Experiment 20001558 PARAMETER Experiment Name: At_Drought_Soil_Dry_P Parameter: Plant Line Value: WS
  misc_feature: MA Experiment 20001558 PARAMETER Experiment Name: At_Drought_Soil_Dry_P Parameter: Post Timepoint (hr) Value: 6
  misc_feature: MA Experiment 20001558 PARAMETER Experiment Name: At_Drought_Soil_Dry_P Parameter: Post-Treatment Value: Re-Water vs. No Drought
  misc_feature: MA Experiment 20001558 PARAMETER Experiment Name: At_Drought_Soil_Dry_P Parameter: Timepoint (day) Value: 13
  misc_feature: MA Experiment 20001558 PARAMETER Experiment Name: At_Drought_Soil_Dry_P Parameter: Treatment Value: Drought vs. No Drought
  misc_feature: MA Experiment ID: 20001560 Result: Up-regulated in Transcription
  misc_feature: MA Experiment 20001560 PARAMETER Experiment Name: At_Drought_Soil_Dry_P Parameter: Age (day) Value: 28
  misc_feature: MA Experiment 20001560 PARAMETER Experiment Name: At_Drought_Soil_Dry_P Parameter: Organism Value: A. thaliana
  misc_feature: MA Experiment 20001560 PARAMETER Experiment Name: At_Drought_Soil_Dry_P Parameter: Plant Line Value: WS
  misc_feature: MA Experiment 20001560 PARAMETER Experiment Name: At_Drought_Soil_Dry_P Parameter: Post Timepoint (hr) Value: None
  misc_feature: MA Experiment 20001560 PARAMETER Experiment Name: At_Drought_Soil_Dry_P Parameter: Post-Treatment Value: None
  misc_feature: MA Experiment 20001560 PARAMETER Experiment Name: At_Drought_Soil_Dry_P Parameter: Timepoint (day) Value: 14
  misc_feature: MA Experiment 20001560 PARAMETER Experiment Name: At_Drought_Soil_Dry_P Parameter: Treatment Value: Drought vs. No Drought
  misc_feature: MA Experiment ID: 20001911 Result: Down-regulated in Transcription
  misc_feature: MA Experiment 20001911 PARAMETER Experiment Name: At_Drought_Reproduction_P Parameter: Age (day) Value: 40
  misc_feature: MA Experiment 20001911 PARAMETER Experiment Name: At_Drought_Reproduction_P Parameter: Organism Value: A. thaliana
  misc_feature: MA Experiment 20001911 PARAMETER Experiment Name: At_Drought_Reproduction_P Parameter: Plant Line Value: WS
  misc_feature: MA Experiment 20001911 PARAMETER Experiment Name: At_Drought_Reproduction_P Parameter: Timepoint (day) Value: 10
  misc_feature: MA Experiment 20001911 PARAMETER Experiment Name: At_Drought_Reproduction_P Parameter: Tissue Value: Flowers
  misc_feature: MA Experiment 20001911 PARAMETER Experiment Name: At_Drought_Reproduction_P Parameter: Treatment Value: Drought vs. No Drought
atattttcattgattttgcatattaatgcatatgttttcataaaaaaagaaaaacgagtgtaaagttattgatagtttctgttacttattaatttttaaggttatgtgtattattaccaattggaggactatatagtcgcaagtctcaaccctataaaagaaaacattcgtcgatcatcttcccgcctcgagtatctctctctctctctctcttctctgttttctttattgattgcatagacaaaaatacacacatacacaacagaaagaaagatggagacgacgatgaagaagaaagggagagtgaaagcgacaataacgtcacagaaagaagaagaaggaacagtgagaaaaggaccttggactatggaagaagatttcatcctctttaattacatccttaatcatggtgaaggtctttggaactctgtcgccaaagcctctggtctaaaacgtactggaaaaagttgtcggctccggtggctgaactatctccgaccagatgtgcggcgagggaacataaccgaagaagaacagcttttgatcattcagcttcatgctaagcttggaaacaggtggtcgaagattgcgaagcatcttccgggaagaacggacaacgagataaagaacttctggaggacaaagattcagagacacatgaaagtgtcatcggaaaatatgatgaatcatcaacatcattgttcgggaaactcacagagctcggggatgacgacgcaaggcagctccggcaaagccatagacacggctgagagcttctctcaggcgaagacgacgacgtttaatgtggtggaacaacagtcaaacgagaattactggaacgttgaagatctgtggcccgtccacttgcttaatggtgaccaccatgtgatttaagatatatatatagacctcctatacatttatatgccccagctgggtttttttgtatggtacgttatttggtttttctattgctgaaatgtcgttgcatttaatttacatacgaaaagtgcattaaatcattaaatcttcaatacatatggaggtggtgtttgagtaacttctggtcgttaaagcatatatactactgtactctttttttttctttcaaattgttgttgtttttg

SEQ ID NO: 104000 - protein, 206 aa, Arabidopsis thaliana; identical to SEQ ID NO: 38135
  peptide (1)..(206): Ceres Seq. ID no. 13614095
  misc_feature (27)..(74): Pfam Name: Myb-like DNA-binding domain Pfam Description: Myb-like DNA-binding domain
  misc_feature (1)..(206): Homolog of NCBI NO: 15232137 NR Description: myb family transcription factor [Arabidopsis >gi|6016712|gb|AAF01538.1|AC009325_8 putative transcription [Arabidopsis thaliana] >gi|26451234|dbj|BAC42719.1| putative
  misc_feature (1)..(206): Homolog of NCBI NO: 21618026 NR Description: putative transcription factor [Arabidopsis
  misc_feature (89)..(206): Homolog of NCBI NO: 11358545 NR Description: myb-related transcription factor MYB57 [imported] Arabidopsis thaliana (fragment) >gi|3941476|gb|AAC83614.1|
  misc_feature (25)..(202): Homolog of NCBI NO: 82306 NR Description: myb-related protein 305 - garden snapdragon
  misc_feature (17)..(202): Homolog of NCBI NO: 40643882 NR Description: MYB8 protein [Gerbera hybrid cv. 'Terra Regina']
  misc_feature (25)..(200): Homolog of NCBI NO: 82311 NR Description: myb-related protein 340 - garden snapdragon
  misc_feature (12)..(204): Homolog of NCBI NO: 7438338 NR Description: Myb26 protein - garden pea
  misc_feature (5)..(174): Homolog of NCBI NO: 30688935 NR Description: myb family transcription factor (ATMYB3) thaliana] >gi|26451911|dbj|BAC43048.1| putative myb family
  misc_feature (22)..(187): Homolog of NCBI NO: 15242669 NR Description: myb family transcription factor [Arabidopsis >gi|5823307|gb|AAD53092.1|AF175987_1 putative transcription [Arabidopsis thaliana] >gi|10178145|dbj|BAB11590.1| transcription
  misc_feature (22)..(187): Homolog of NCBI NO: 21554734 NR Description: putative transcription factor MYB24 [Arabidopsis

SEQ ID NO: 104001 - protein, 202 aa, Arabidopsis thaliana; identical to SEQ ID NO: 38136
  peptide (1)..(202): Ceres Seq. ID no. 13614096
  misc_feature (23)..(70): Pfam Name: Myb-like DNA-binding domain Pfam Description: Myb-like DNA-binding domain
  misc_feature (1)..(202): Homolog of NCBI NO: 15232137 NR Description: myb family transcription factor [Arabidopsis >gi|6016712|gb|AAF01538.1|AC009325_8 putative transcription [Arabidopsis thaliana] >gi|26451234|dbj|BAC42719.1| putative
  misc_feature (1)..(202): Homolog of NCBI NO: 21618026 NR Description: putative transcription factor [Arabidopsis
  misc_feature (85)..(202): Homolog of NCBI NO: 11358545 NR Description: myb-related transcription factor MYB57 [imported] Arabidopsis thaliana (fragment) >gi|3941476|gb|AAC83614.1|
  misc_feature (21)..(198): Homolog of NCBI NO: 82306 NR Description: myb-related protein 305 - garden snapdragon
  misc_feature (13)..(198): Homolog of NCBI NO: 40643882 NR Description: MYB8 protein [Gerbera hybrid cv. 'Terra Regina']
  misc_feature (21)..(196): Homolog of NCBI NO: 82311 NR Description: myb-related protein 340 - garden snapdragon
  misc_feature (8)..(200): Homolog of NCBI NO: 7438338 NR Description: Myb26 protein - garden pea
  misc_feature (1)..(170): Homolog of NCBI NO: 30688935 NR Description: myb family transcription factor (ATMYB3) thaliana] >gi|26451911|dbj|BAC43048.1| putative myb family
  misc_feature (18)..(183): Homolog of NCBI NO: 15242669 NR Description: myb family transcription factor [Arabidopsis >gi|5823307|gb|AAD53092.1|AF175987_1 putative transcription [Arabidopsis thaliana] >gi|10178145|dbj|BAB11590.1| transcription
  misc_feature (18)..(183): Homolog of NCBI NO: 21554734 NR Description: putative transcription factor MYB24 [Arabidopsis

SEQ ID NO: 104002 - protein, 175 aa, Arabidopsis thaliana; identical to SEQ ID NO: 38137
  peptide (1)..(175): Ceres Seq. ID no. 13614097
  misc_feature (1)..(43): Pfam Name: Myb-like DNA-binding domain Pfam Description: Myb-like DNA-binding domain
  misc_feature (1)..(175): Homolog of NCBI NO: 15232137 NR Description: myb family transcription factor [Arabidopsis >gi|6016712|gb|AAF01538.1|AC009325_8 putative transcription [Arabidopsis thaliana] >gi|26451234|dbj|BAC42719.1| putative
  misc_feature (1)..(175): Homolog of NCBI NO: 21618026 NR Description: putative transcription factor [Arabidopsis
  misc_feature (58)..(175): Homolog of NCBI NO: 11358545 NR Description: myb-related transcription factor MYB57 [imported] Arabidopsis thaliana (fragment) >gi|3941476|gb|AAC83614.1|
  misc_feature (1)..(171): Homolog of NCBI NO: 82306 NR Description: myb-related protein 305 - garden snapdragon
  misc_feature (1)..(171): Homolog of NCBI NO: 40643882 NR Description: MYB8 protein [Gerbera hybrid cv. 'Terra Regina']
  misc_feature (1)..(169): Homolog of NCBI NO: 82311 NR Description: myb-related protein 340 - garden snapdragon
  misc_feature (1)..(173): Homolog of NCBI NO: 7438338 NR Description: Myb26 protein - garden pea
  misc_feature (1)..(143): Homolog of NCBI NO: 30688935 NR Description: myb family transcription factor (ATMYB3) thaliana] >gi|26451911|dbj|BAC43048.1| putative myb family
  misc_feature (1)..(156): Homolog of NCBI NO: 15242669 NR Description: myb family transcription factor [Arabidopsis >gi|5823307|gb|AAD53092.1|AF175987_1 putative transcription [Arabidopsis thaliana] >gi|10178145|dbj|BAB11590.1| transcription
  misc_feature (1)..(156): Homolog of NCBI NO: 21554734 NR Description: putative transcription factor MYB24 [Arabidopsis

SEQ ID NO: 104003 - DNA, 1422 bp, Arabidopsis thaliana
  misc_feature (1)..(1422): Ceres Seq. ID no. 13614098
  misc_feature: MA Experiment ID: 108574 Result: Up-regulated in Transcription
  misc_feature: MA Experiment 108574 PARAMETER Experiment Name: At_Wounding__cDNA_P Parameter: Timepoint (hr) Value: 1
  misc_feature: MA Experiment 108574 PARAMETER Experiment Name: At_Wounding__cDNA_P Parameter: Tissue Value: Aerial
  misc_feature: MA Experiment 108574 PARAMETER Experiment Name: At_Wounding__cDNA_P Parameter: Treatment Value: Wounding vs. No Wounding
  misc_feature: MA Experiment ID: 108577 Result: Up-regulated in Transcription
  misc_feature: MA Experiment 108577 PARAMETER Experiment Name: At_42deg_Heat_cDNA_P Parameter: Temperature (deg C) Value: 42 vs. 22
  misc_feature: MA Experiment 108577 PARAMETER Experiment Name: At_42deg_Heat_cDNA_P Parameter: Timepoint (hr) Value: 6
  misc_feature: MA Experiment 108577 PARAMETER Experiment Name: At_42deg_Heat_cDNA_P Parameter: Tissue Value: Aerial
  misc_feature: MA Experiment ID: 108579 Result: Up-regulated in Transcription
  misc_feature: MA Experiment 108579 PARAMETER Experiment Name: At_4deg_Cold_cDNA_P Parameter: Temperature (deg C) Value: 4 vs. 22
  misc_feature: MA Experiment 108579 PARAMETER Experiment Name: At_4deg_Cold_cDNA_P Parameter: Timepoint (hr) Value: 6
  misc_feature: MA Experiment 108579 PARAMETER Experiment Name: At_4deg_Cold_cDNA_P Parameter: Tissue Value: Aerial
  misc_feature: MA Experiment ID: 108595 Result: Down-regulated in Transcription
  misc_feature: MA Experiment 108595 PARAMETER Experiment Name: At_Ler-pi_Ovule_cDNA_P Parameter: Plant Line Value: null
  misc_feature: MA Experiment ID: 20000071 Result: Down-regulated in Transcription
  misc_feature: MA Experiment 20000071 PARAMETER Experiment Name: At_100uM_ABA_Mutants_cDNA_P Parameter: Plant Line Value: CS8104
  misc_feature: MA Experiment 20000071 PARAMETER Experiment Name: At_100uM_ABA_Mutants_cDNA_P Parameter: Timepoint (hr) Value: 6
  misc_feature: MA Experiment 20000071 PARAMETER Experiment Name: At_100uM_ABA_Mutants_cDNA_P Parameter: Tissue Value: Aerial
  misc_feature: MA Experiment 20000071 PARAMETER Experiment Name: At_100uM_ABA_Mutants_cDNA_P Parameter: Treatment Value: 100uM ABA vs. No Treatment
  misc_feature: MA Experiment ID: 20000086 Result: Down-regulated in Transcription
  misc_feature: MA Experiment 20000086 PARAMETER Experiment Name: At_100uM_ABA_Mutants_cDNA_P Parameter: Plant Line Value: CS22
  misc_feature: MA Experiment 20000086 PARAMETER Experiment Name: At_100uM_ABA_Mutants_cDNA_P Parameter: Timepoint (hr) Value: 6
  misc_feature: MA Experiment 20000086 PARAMETER Experiment Name: At_100uM_ABA_Mutants_cDNA_P Parameter: Tissue Value: Aerial
  misc_feature: MA Experiment 20000086 PARAMETER Experiment Name: At_100uM_ABA_Mutants_cDNA_P Parameter: Treatment Value: 100uM ABA vs. No Treatment
  misc_feature: MA Experiment ID: 20000087 Result: Down-regulated in Transcription
  misc_feature: MA Experiment 20000087 PARAMETER Experiment Name: At_100uM_ABA_Mutants_cDNA_P Parameter: Plant Line Value: WS
  misc_feature: MA Experiment 20000087 PARAMETER Experiment Name: At_100uM_ABA_Mutants_cDNA_P Parameter: Timepoint (hr) Value: 6
  misc_feature: MA Experiment 20000087 PARAMETER Experiment Name: At_100uM_ABA_Mutants_cDNA_P Parameter: Tissue Value: Aerial
  misc_feature: MA Experiment 20000087 PARAMETER Experiment Name: At_100uM_ABA_Mutants_cDNA_P Parameter: Treatment Value: 100uM ABA vs. No Treatment
  misc_feature: MA Experiment ID: 20000088 Result: Down-regulated in Transcription
  misc_feature: MA Experiment 20000088 PARAMETER Experiment Name: At_100uM_ABA_Mutants_cDNA_P Parameter: Plant Line Value: Landsberg
  misc_feature: MA Experiment 20000088 PARAMETER Experiment Name: At_100uM_ABA_Mutants_cDNA_P Parameter: Timepoint (hr) Value: 6
  misc_feature: MA Experiment 20000088 PARAMETER Experiment Name: At_100uM_ABA_Mutants_cDNA_P Parameter: Tissue Value: Aerial
  misc_feature: MA Experiment 20000088 PARAMETER Experiment Name: At_100uM_ABA_Mutants_cDNA_P Parameter: Treatment Value: 100uM ABA vs. No Treatment
  misc_feature: MA Experiment ID: 20000089 Result: Down-regulated in Transcription
  misc_feature: MA Experiment ID: 20000090 Result: Down-regulated in Transcription
  misc_feature: MA Experiment ID: 20000111 Result: Up-regulated in Transcription
  misc_feature: MA Experiment 20000111 PARAMETER Experiment Name: At_42deg_Heat_cDNA_P Parameter: Temperature (deg C) Value: 42 vs. 22
  misc_feature: MA Experiment 20000111 PARAMETER Experiment Name: At_42deg_Heat_cDNA_P Parameter: Timepoint (hr) Value: 6
  misc_feature: MA Experiment 20000111 PARAMETER Experiment Name: At_42deg_Heat_cDNA_P Parameter: Tissue Value: Aerial
  misc_feature: MA Experiment ID: 20000173 Result: Up-regulated in Transcription
  misc_feature: MA Experiment 20000173 PARAMETER Experiment Name: At_42deg_Heat_P Parameter: Age (day) Value: 14
  misc_feature: MA Experiment 20000173 PARAMETER Experiment Name: At_42deg_Heat_P Parameter: Organism Value: A. thaliana
  misc_feature: MA Experiment 20000173 PARAMETER Experiment Name: At_42deg_Heat_P Parameter: Plant Line Value: WS
  misc_feature: MA Experiment 20000173 PARAMETER Experiment Name: At_42deg_Heat_P Parameter: Temperature (deg C) Value: 42 vs. 22
  misc_feature: MA Experiment 20000173 PARAMETER Experiment Name: At_42deg_Heat_P Parameter: Timepoint (hr) Value: 6
  misc_feature: MA Experiment 20000173 PARAMETER Experiment Name: At_42deg_Heat_P Parameter: Tissue Value: Aerial
  misc_feature: MA Experiment ID: 20000184 Result: Up-regulated in Transcription
  misc_feature: MA Experiment 20000184 PARAMETER Experiment Name: At_Shoots__P Parameter: Age (day) Value: 7
  misc_feature: MA Experiment 20000184 PARAMETER Experiment Name: At_Shoots__P Parameter: Tissue Value: Shoots vs. Whole Plant
  misc_feature: MA Experiment ID: 20000213 Result: Up-regulated in Transcription
  misc_feature: MA Experiment 20000213 PARAMETER Experiment Name: At_4deg_Cold_P Parameter: Timepoint (hr) Value: 2
  misc_feature: MA Experiment ID: 20000234 Result: Up-regulated in Transcription
  misc_feature: MA Experiment 20000234 PARAMETER Experiment Name: At_Siliques_P Parameter: Age (day) Value: 21
  misc_feature: MA Experiment 20000234 PARAMETER Experiment Name: At_Siliques_P Parameter: Organism Value: A. thaliana
  misc_feature: MA Experiment 20000234 PARAMETER Experiment Name: At_Siliques_P Parameter: Plant Line Value: WS
  misc_feature: MA Experiment 20000234 PARAMETER Experiment Name: At_Siliques_P Parameter: Tissue Value: Less Than 5mm Siliques vs. Whole Plant
  misc_feature: MA Experiment ID: 20000235 Result: Up-regulated in Transcription
  misc_feature: MA Experiment 20000235 PARAMETER Experiment Name: At_Siliques_P Parameter: Age (day) Value: 21
  misc_feature: MA Experiment 20000235 PARAMETER Experiment Name: At_Siliques_P Parameter: Organism Value: A. thaliana
  misc_feature: MA Experiment 20000235 PARAMETER Experiment Name: At_Siliques_P Parameter: Plant Line Value: WS
  misc_feature: MA Experiment 20000235 PARAMETER Experiment Name: At_Siliques_P Parameter: Tissue Value: 5-10mm Siliques vs. Whole Plant
  misc_feature: MA Experiment ID: 20000264 Result: Up-regulated in Transcription
  misc_feature: MA Experiment 20000264 PARAMETER Experiment Name: At_Open_Flower_P Parameter: Age (day) Value: 21
  misc_feature: MA Experiment 20000264 PARAMETER Experiment Name: At_Open_Flower_P Parameter: Plant Line Value: WS
  misc_feature: MA Experiment 20000264 PARAMETER Experiment Name: At_Open_Flower_P Parameter: Tissue Value: Open Flower vs. Whole Plant
  misc_feature: MA Experiment ID: 20000437 Result: Down-regulated in Transcription
  misc_feature: MA Experiment 20000437 PARAMETER Experiment Name: At_Drought_P Parameter: Age (day) Value: 8
  misc_feature: MA Experiment 20000437 PARAMETER Experiment Name: At_Drought_P Parameter: Organism Value: A. thaliana
  misc_feature: MA Experiment 20000437 PARAMETER Experiment Name: At_Drought_P Parameter: Plant Line Value: WS
  misc_feature: MA Experiment 20000437 PARAMETER Experiment Name: At_Drought_P Parameter: Timepoint (hr) Value: 24
  misc_feature: MA Experiment 20000437 PARAMETER Experiment Name: At_Drought_P Parameter: Tissue Value: Whole Plant
  misc_feature: MA Experiment 20000437 PARAMETER Experiment Name: At_Drought_P Parameter: Treatment Value: Drought vs. No Drought
  misc_feature: MA Experiment ID: 20000438 Result: Up-regulated in Transcription
  misc_feature: MA Experiment 20000438 PARAMETER Experiment Name: At_Shoots__P Parameter: Age (day) Value: 14
  misc_feature: MA Experiment 20000438 PARAMETER Experiment Name: At_Shoots__P Parameter: Tissue Value: Shoots vs. Whole Plant
  misc_feature: MA Experiment ID: 20000495 Result: Down-regulated in Transcription
  misc_feature: MA Experiment 20000495 PARAMETER Experiment Name: At_Guard_Cells_P Parameter: Harvest Date Value: 8/2/2002
  misc_feature: MA Experiment 20000495 PARAMETER Experiment Name: At_Guard_Cells_P Parameter: Organism Value: A. thaliana
  misc_feature: MA Experiment 20000495 PARAMETER Experiment Name: At_Guard_Cells_P Parameter: Tissue Value: Guard Cells vs. Leaves
  misc_feature: MA Experiment ID: 20000573 Result: Down-regulated in Transcription
  misc_feature: MA Experiment 20000573 PARAMETER Experiment Name: At_100uM_ABA_Mutants__P Parameter: Organism Value: A. thaliana
  misc_feature: MA Experiment 20000573 PARAMETER Experiment Name: At_100uM_ABA_Mutants__P Parameter: Plant Line Value: CS22 vs. Ler wt
  misc_feature: MA Experiment 20000573 PARAMETER Experiment Name: At_100uM_ABA_Mutants__P Parameter: Timepoint (hr) Value: N/A
  misc_feature: MA Experiment 20000573 PARAMETER Experiment Name: At_100uM_ABA_Mutants__P Parameter: Tissue Value: Whole Plant
  misc_feature: MA Experiment 20000573 PARAMETER Experiment Name: At_100uM_ABA_Mutants__P Parameter: Treatment Value: None
  misc_feature: MA Experiment ID: 20001248 Result: Down-regulated in Transcription
  misc_feature: MA Experiment 20001248 PARAMETER Experiment Name: At_Far-red-induction_P Parameter: Age (day) Value: 7
  misc_feature: MA Experiment 20001248 PARAMETER Experiment Name: At_Far-red-induction_P Parameter: Light Value: Far-red vs. White
  misc_feature: MA Experiment 20001248 PARAMETER Experiment Name: At_Far-red-induction_P Parameter: Organism Value: A. thaliana
  misc_feature: MA Experiment 20001248 PARAMETER Experiment Name: At_Far-red-induction_P Parameter: Plant Line Value: Columbia
  misc_feature: MA Experiment 20001248 PARAMETER Experiment Name: At_Far-red-induction_P Parameter: Timepoint (hr) Value: 4
  misc_feature: MA Experiment 20001248 PARAMETER Experiment Name: At_Far-red-induction_P Parameter: Tissue Value: Whole Plant
  misc_feature: MA Experiment ID: 20001555 Result: Down-regulated in Transcription
  misc_feature: MA Experiment 20001555 PARAMETER Experiment Name: At_Drought_Soil_Dry_P Parameter: Age (day) Value: 24
  misc_feature: MA Experiment 20001555 PARAMETER Experiment Name: At_Drought_Soil_Dry_P Parameter: Organism Value: A. thaliana
  misc_feature: MA Experiment 20001555 PARAMETER Experiment Name: At_Drought_Soil_Dry_P Parameter: Plant Line Value: WS
  misc_feature: MA Experiment 20001555 PARAMETER Experiment Name: At_Drought_Soil_Dry_P Parameter: Post Timepoint (hr) Value: None
  misc_feature: MA Experiment 20001555 PARAMETER Experiment Name: At_Drought_Soil_Dry_P Parameter: Post-Treatment Value: None
  misc_feature: MA Experiment 20001555 PARAMETER Experiment Name: At_Drought_Soil_Dry_P Parameter: Timepoint (day) Value: 10
  misc_feature: MA Experiment 20001555 PARAMETER Experiment Name: At_Drought_Soil_Dry_P Parameter: Treatment Value: Drought vs. No Drought
  misc_feature: MA Experiment ID: 20001556 Result: Down-regulated in Transcription
  misc_feature: MA Experiment 20001556 PARAMETER Experiment Name: At_Drought_Soil_Dry_P Parameter: Age (day) Value: 26
  misc_feature: MA Experiment 20001556 PARAMETER Experiment Name: At_Drought_Soil_Dry_P Parameter: Organism Value: A. thaliana
  misc_feature: MA Experiment 20001556 PARAMETER Experiment Name: At_Drought_Soil_Dry_P Parameter: Plant Line Value: WS
  misc_feature: MA Experiment 20001556 PARAMETER Experiment Name: At_Drought_Soil_Dry_P Parameter: Post Timepoint (hr) Value: None
  misc_feature: MA Experiment 20001556 PARAMETER Experiment Name: At_Drought_Soil_Dry_P Parameter: Post-Treatment Value: None
  misc_feature: MA Experiment 20001556 PARAMETER Experiment Name: At_Drought_Soil_Dry_P Parameter: Timepoint (day) Value: 12
  misc_feature: MA Experiment 20001556 PARAMETER Experiment Name: At_Drought_Soil_Dry_P Parameter: Treatment Value: Drought vs. No Drought
  misc_feature: MA Experiment ID: 20001557 Result: Down-regulated in Transcription
  misc_feature: MA Experiment 20001557 PARAMETER Experiment Name: At_Drought_Soil_Dry_P Parameter: Age (day) Value: 27
  misc_feature: MA Experiment 20001557 PARAMETER Experiment Name: At_Drought_Soil_Dry_P Parameter: Organism Value: A. thaliana
  misc_feature: MA Experiment 20001557 PARAMETER Experiment Name: At_Drought_Soil_Dry_P Parameter: Plant Line Value: WS
  misc_feature: MA Experiment 20001557 PARAMETER Experiment Name: At_Drought_Soil_Dry_P Parameter: Post Timepoint (hr) Value: 3
  misc_feature: MA Experiment 20001557 PARAMETER Experiment Name: At_Drought_Soil_Dry_P Parameter: Post-Treatment Value: Re-Water vs. No Drought
  misc_feature: MA Experiment 20001557 PARAMETER Experiment Name: At_Drought_Soil_Dry_P Parameter: Timepoint (day) Value: 13
  misc_feature: MA Experiment 20001557 PARAMETER Experiment Name: At_Drought_Soil_Dry_P Parameter: Treatment Value: Drought vs. No Drought
  misc_feature: MA Experiment ID: 20001904 Result: Down-regulated in Transcription
  misc_feature: MA Experiment 20001904 PARAMETER Experiment Name: At_Drought_Reproduction_P Parameter: Age (day) Value: 37
  misc_feature: MA Experiment 20001904 PARAMETER Experiment Name: At_Drought_Reproduction_P Parameter: Organism Value: A. thaliana
  misc_feature: MA Experiment 20001904 PARAMETER Experiment Name: At_Drought_Reproduction_P Parameter: Plant Line Value: WS
  misc_feature: MA Experiment 20001904 PARAMETER Experiment Name: At_Drought_Reproduction_P Parameter: Timepoint (day) Value: 7
  misc_feature: MA Experiment 20001904 PARAMETER Experiment Name: At_Drought_Reproduction_P Parameter: Tissue Value: Rosettes
  misc_feature: MA Experiment 20001904 PARAMETER Experiment Name: At_Drought_Reproduction_P Parameter: Treatment Value: Drought vs. No Drought
  misc_feature: MA Experiment ID: 20001907 Result: Down-regulated in Transcription
  misc_feature: MA Experiment 20001907 PARAMETER Experiment Name: At_Drought_Reproduction_P Parameter: Age (day) Value: 37
  misc_feature: MA Experiment 20001907 PARAMETER Experiment Name: At_Drought_Reproduction_P Parameter: Organism Value: A. thaliana
  misc_feature: MA Experiment 20001907 PARAMETER Experiment Name: At_Drought_Reproduction_P Parameter: Plant Line Value: WS
  misc_feature: MA Experiment 20001907 PARAMETER Experiment Name: At_Drought_Reproduction_P Parameter: Timepoint (day) Value: 7
  misc_feature: MA Experiment 20001907 PARAMETER Experiment Name: At_Drought_Reproduction_P Parameter: Tissue Value: Siliques
  misc_feature: MA Experiment 20001907 PARAMETER Experiment Name: At_Drought_Reproduction_P Parameter: Treatment Value: Drought vs. No Drought
ttacatgaaaatgaggaggtagactcatgtaacataactcttaccaatagaggaagaagaaaaagttagcaagagtcggttacttgtgagaaattccaacaaatgccggaggatttatgcacatcttggagcatctgataagaggaaaaaattatgttcgctctcacatttctaaatccaaatccaagacttccatctccattgttccttgccaagtctactcctgaatcagcgttgagcagaagaagcagagctttttcatcttctaactcttatccttggagaccgaaccttagatttaatggcttcaagctcaagtcagctacagttccggagaatgtggaaggaggagatttggaatctggaagtttggttaaagggttgaagctaggaggcatgtttggagtttggtaccttctcaatatctactacaacattttcaacaaacaggtacttagggtttatccatatccagcgactgtaacagcatttcaattagggtgtggaacgttgatgattgctataatgtggctccttaaactccatccacgccccaaattttctccttctcagtttacggtgatcgtacaactagcagtagctcacacgttagggaacttgttaacaaatgtgagcttaggaagagtaaatgtctctttcacccacactatcaaagcaatggagcctttcttcaccgtcttgctttctgttctcttgctcggtgagtggccgagtctgtggattgtttgttcgttgttacctattgtcgctggagtctctttagcatctttcacagaagcttctttcaattggattggtttctgcagtgcaatggcttctaatgtgacgaatcaatcacgcaatgtcctcagtaaaaaattcatggttggaaaggacgctttggacaacatcaaccttttctctataataaccattatctcctttatcttactggttcctttagcaatcctcatcgatgggttcaaggttactccttcgcatttacaagtagcaacaagccagggtttgtcggtaaaagagttttgcatcatgtctctacttgctggtgtttgcttgcatagctaccaacaggtatcgtatatgatattggagatggtgtctccagtaacacactctgtagggaactgcgtgaagcgtgtggtggttattacatcatccattcttttcttcaaaactccagtctcacctcttaactctataggtaccgcgactgcactagctggagtatatttgtacagcagagccaaacgagtccaagtcaaaccaaatccaaaaatgtcttgaattttgtatatagaagctcttagtttattatttatgcgaaaaatgttgatatttttgttcatccatgtcgtttttacatgacactattaacttttgttaaattcaactaatctcatt

SEQ ID NO: 104004 - protein, 383 aa, Arabidopsis thaliana; identical to SEQ ID NO: 41149
  peptide (1)..(383): Ceres Seq. ID no. 13614099
  misc_feature (88)..(213): Pfam Name: Integral membrane protein DUF6 Pfam Description: Integral membrane protein DUF6
  misc_feature (1)..(383): Homolog of NCBI NO: 18395855 NR Description: triose/phosphate translocator, putative thaliana] >gi|25083416|gb|AAN72072.1| putative translocator [Arabidopsis thaliana] >gi|30725606|gb|AAP37825.1|
  misc_feature (1)..(383): Homolog of NCBI NO: 21537050 NR Description: putative phosphate/phosphoenolpyruvate
  misc_feature (1)..(383): Homolog of NCBI NO: 6016714 NR Description: putative phosphate/phosphoenolpyruvate
  misc_feature (7)..(381): Homolog of NCBI NO: 15242801 NR Description: triose phosphate/phosphate translocator, putative thaliana] >gi|19423928|gb|AAL87271.1| putative translocator precursor protein [Arabidopsis thaliana]
  misc_feature (42)..(381): Homolog of NCBI NO: 7489171 NR Description: phosphate/phosphoenolpyruvate translocator
  misc_feature (7)..(381): Homolog of NCBI NO: 1778141 NR Description: phosphate/phosphoenolpyruvate translocator
  misc_feature (69)..(381): Homolog of NCBI NO: 29647427 NR Description: putative phosphoenolpyruvate/phosphate
  misc_feature (7)..(381): Homolog of NCBI NO: 21554233 NR Description: phosphate/phosphoenolpyruvate translocator
  misc_feature (7)..(381): Homolog of NCBI NO: 7546829 NR Description: phosphate/phosphoenolpyruvate translocator
  misc_feature (56)..(381): Homolog of NCBI NO: 7489170 NR Description: phosphate/phosphoenolpyruvate translocator

SEQ ID NO: 104005 - protein, 302 aa, Arabidopsis thaliana; identical to SEQ ID NO: 41150
  peptide (1)..(302): Ceres Seq. ID no. 13614100
  misc_feature (7)..(132): Pfam Name: Integral membrane protein DUF6 Pfam Description: Integral membrane protein DUF6
  misc_feature (1)..(302): Homolog of NCBI NO: 18395855 NR Description: triose/phosphate translocator, putative thaliana] >gi|25083416|gb|AAN72072.1| putative translocator [Arabidopsis thaliana] >gi|30725606|gb|AAP37825.1|
  misc_feature (1)..(302): Homolog of NCBI NO: 21537050 NR Description: putative phosphate/phosphoenolpyruvate
  misc_feature (1)..(302): Homolog of NCBI NO: 6016714 NR Description: putative phosphate/phosphoenolpyruvate
  misc_feature (1)..(300): Homolog of NCBI NO: 15242801 NR Description: triose phosphate/phosphate translocator, putative thaliana] >gi|19423928|gb|AAL87271.1| putative translocator precursor protein [Arabidopsis thaliana]
  misc_feature (1)..(300): Homolog of NCBI NO: 7489171 NR Description: phosphate/phosphoenolpyruvate translocator
  misc_feature (1)..(300): Homolog of NCBI NO: 1778141 NR Description: phosphate/phosphoenolpyruvate translocator
  misc_feature (1)..(300): Homolog of NCBI NO: 29647427 NR Description: putative phosphoenolpyruvate/phosphate
  misc_feature (1)..(300): Homolog of NCBI NO: 21554233 NR Description: phosphate/phosphoenolpyruvate translocator
  misc_feature (1)..(300): Homolog of NCBI NO: 7546829 NR Description: phosphate/phosphoenolpyruvate translocator
  misc_feature (1)..(300): Homolog of NCBI NO: 7489170 NR Description: phosphate/phosphoenolpyruvate translocator

SEQ ID NO: 104006 - protein, 263 aa, Arabidopsis thaliana; identical to SEQ ID NO: 41151
  peptide (1)..(263): Ceres Seq. ID no. 13614101
  misc_feature (1)..(93): Pfam Name: Integral membrane protein DUF6 Pfam Description: Integral membrane protein DUF6
  misc_feature (1)..(263): Homolog of NCBI NO: 18395855 NR Description: triose/phosphate translocator, putative thaliana] >gi|25083416|gb|AAN72072.1| putative translocator [Arabidopsis thaliana] >gi|30725606|gb|AAP37825.1|
  misc_feature (1)..(263): Homolog of NCBI NO: 21537050 NR Description: putative phosphate/phosphoenolpyruvate
  misc_feature (1)..(263): Homolog of NCBI NO: 6016714 NR Description: putative phosphate/phosphoenolpyruvate
  misc_feature (1)..(261): Homolog of NCBI NO: 15242801 NR Description: triose phosphate/phosphate translocator, putative thaliana] >gi|19423928|gb|AAL87271.1| putative translocator precursor protein [Arabidopsis thaliana]
  misc_feature (1)..(261): Homolog of NCBI NO: 7489171 NR Description: phosphate/phosphoenolpyruvate translocator
  misc_feature (1)..(261): Homolog of NCBI NO: 1778141 NR Description: phosphate/phosphoenolpyruvate translocator
  misc_feature (1)..(261): Homolog of NCBI NO: 29647427 NR Description: putative phosphoenolpyruvate/phosphate
  misc_feature (1)..(261): Homolog of NCBI NO: 21554233 NR Description: phosphate/phosphoenolpyruvate translocator
  misc_feature (1)..(261): Homolog of NCBI NO: 7546829 NR Description: phosphate/phosphoenolpyruvate translocator
  misc_feature (1)..(261): Homolog of NCBI NO: 7489170 NR Description: phosphate/phosphoenolpyruvate translocator

SEQ ID NO: 104007 - DNA, 1249 bp, Arabidopsis thaliana
  misc_feature (1)..(1249): Ceres Seq. ID no. 13614110
  misc_feature: MA Experiment ID: 108461 Result: Up-regulated in Transcription
  misc_feature: MA Experiment 108461 PARAMETER Experiment Name: At_Germinating_Seeds_cDNA_P Parameter: Age (day) Value: 1 vs. 0
  misc_feature: MA Experiment 108461 PARAMETER Experiment Name: At_Germinating_Seeds_cDNA_P Parameter: Tissue Value: Germinating Seeds
  misc_feature: MA Experiment ID: 108463 Result: Up-regulated in Transcription
  misc_feature: MA Experiment 108463 PARAMETER Experiment Name: At_Germinating_Seeds_cDNA_P Parameter: Age (day) Value: 3 vs. 0
  misc_feature: MA Experiment 108463 PARAMETER Experiment Name: At_Germinating_Seeds_cDNA_P Parameter: Tissue Value: Germinating Seeds
  misc_feature: MA Experiment ID: 108577 Result: Down-regulated in Transcription
  misc_feature: MA Experiment 108577 PARAMETER Experiment Name: At_42deg_Heat_cDNA_P Parameter: Temperature (deg C) Value: 42 vs. 22
  misc_feature: MA Experiment 108577 PARAMETER Experiment Name: At_42deg_Heat_cDNA_P Parameter: Timepoint (hr) Value: 6
  misc_feature: MA Experiment 108577 PARAMETER Experiment Name: At_42deg_Heat_cDNA_P Parameter: Tissue Value: Aerial
  misc_feature: MA Experiment ID: 20000069 Result: Up-regulated in Transcription
  misc_feature: MA Experiment 20000069 PARAMETER Experiment Name: At_100uM_ABA_Mutants_cDNA_P Parameter: Plant Line Value: CS23
  misc_feature: MA Experiment 20000069 PARAMETER Experiment Name: At_100uM_ABA_Mutants_cDNA_P Parameter: Timepoint (hr) Value: 6
  misc_feature: MA Experiment 20000069 PARAMETER Experiment Name: At_100uM_ABA_Mutants_cDNA_P Parameter: Tissue Value: Aerial
  misc_feature: MA Experiment 20000069 PARAMETER Experiment Name: At_100uM_ABA_Mutants_cDNA_P Parameter: Treatment Value: 100uM ABA vs. No Treatment
  misc_feature: MA Experiment ID: 20000111 Result: Down-regulated in Transcription
  misc_feature: MA Experiment 20000111 PARAMETER Experiment Name: At_42deg_Heat_cDNA_P Parameter: Temperature (deg C) Value: 42 vs. 22
  misc_feature: MA Experiment 20000111 PARAMETER Experiment Name: At_42deg_Heat_cDNA_P Parameter: Timepoint (hr) Value: 6
  misc_feature: MA Experiment 20000111 PARAMETER Experiment Name: At_42deg_Heat_cDNA_P Parameter: Tissue Value: Aerial
  misc_feature: MA Experiment ID: 20000113 Result: Down-regulated in Transcription
  misc_feature: MA Experiment 20000113 PARAMETER Experiment Name: At_42deg_Heat_cDNA_P Parameter: Temperature (deg C) Value: 42 vs. 22
  misc_feature: MA Experiment 20000113 PARAMETER Experiment Name: At_42deg_Heat_cDNA_P Parameter: Timepoint (hr) Value: 8
  misc_feature: MA Experiment 20000113 PARAMETER Experiment Name: At_42deg_Heat_cDNA_P Parameter: Tissue Value: Aerial
  misc_feature: MA Experiment ID: 20000179 Result: Up-regulated in Transcription
  misc_feature: MA Experiment 20000179 PARAMETER Experiment Name: At_Germinating_Seeds_P Parameter: Age (hr) Value: 6 vs. 0
  misc_feature: MA Experiment 20000179 PARAMETER Experiment Name: At_Germinating_Seeds_P Parameter: Tissue Value: Germinating Seeds
  misc_feature: MA Experiment ID: 20000180 Result: Up-regulated in Transcription
  misc_feature: MA Experiment 20000180 PARAMETER Experiment Name: At_Germinating_Seeds_P Parameter: Age (hr) Value: 24 vs. 0
  misc_feature: MA Experiment 20000180 PARAMETER Experiment Name: At_Germinating_Seeds_P Parameter: Tissue Value: Germinating Seeds
  misc_feature: MA Experiment ID: 20000214 Result: Down-regulated in Transcription
  misc_feature: MA Experiment 20000214 PARAMETER Experiment Name: At_4deg_Cold_P Parameter: Timepoint (hr) Value: 6
  misc_feature: MA Experiment ID: 20000227 Result: Up-regulated in Transcription
  misc_feature: MA Experiment 20000227 PARAMETER Experiment Name: At_Root-Tips-vs-Tops_P Parameter: Tissue Value: Root Tips vs. Root Tops
accctctgttttgtttctccccaatcaaaaatctcaatcccaatcacttcgcttctaatcttaaagcctttaatttagtcttcgagccctctaatggcggatcagagcaaaaacactccagagatcttcgagctcaacaatggcaccatgcaggtcaagatctcaaactacggcaccaccatcacctctttgtctgttcccgacaagaacgggaaactgggggatgtagttctcggattcgactcggtggatccatatgtgaaagggcttgcaccatactttgggtgcattgttggtcgtgtggcaaatcggatcaaggagggaaaattcagtctcaatggagttaactacactttgcctatcaacaagcctcctaatagtctccacggtggtaacaagggtttcgataagaagatatgggaagttgcagggcacaagagagacggcgaaaaacctttcatcactttcaaatatcacagtgccgatggagaagaaggttaccctggtgcggtttctgtcacggcgacatacactctcacgtcagccacgacaatgagacttgacatggaagctgttccagagaacaaagatactcccatcaacttagctcaacatacatactggaacttagcaggtcatgactcaggaaacattctagaccataagattcagatatgggggtctcatatcacgccggttgacgaatacacagttcctacaggagagatcttgcctgtaaagggaactcctttcgatttcactgaggagaagcggataggcgagtctattggagaggttggtatcggatacgatcataactacgtgttggactgtcctgatcaagagaaggaggggctgaaacacgcagcgaagctcagtgatgctgctagctcaagggtactgaacttgtggaccaatgtgccgggaatgcagttttataccgggaactatgtgaatggagtggttgggaaagggaatgcggtttacgggaaacatgcgggtgtgtgccttgagacgcagggattcccgaacgcgattaaccagtcgaatttcccgtctgttgtggttaaggctggtgagaagtacaatcacacgatgctgtttgagttttcagcttgagtttatagatggacgttttaggtgttagatgatgggaataaagggccggttcatttgattcactgggctggaaaaagagtgattttaattttatctctttgggggagaataataaaaccaaactgtttac

SEQ ID NO: 104008 - protein, 341 aa, Arabidopsis thaliana; identical to SEQ ID NO: 26038
  peptide (1)..(341): Ceres Seq. ID no. 13614111
  misc_feature (10)..(338): Pfam Name: Aldose 1-epimerase Pfam Description: Aldose 1-epimerase
  misc_feature (1)..(341): Homolog of NCBI NO: 30684727 NR Description: aldose 1-epimerase family [Arabidopsis thaliana]
  misc_feature (19)..(341): Homolog of NCBI NO: 14532616 NR Description: putative aldose 1-epimerase [Arabidopsis thaliana]
  misc_feature (10)..(341): Homolog of NCBI NO: 37531218 NR Description: putative aldose 1-epimerase - like protein [Oryza
  misc_feature (1)..(341): Homolog of NCBI NO: 15228261 NR Description: aldose 1-epimerase family [Arabidopsis thaliana]
  misc_feature (1)..(341): Homolog of NCBI NO: 21537069 NR Description: aldose 1-epimerase-like protein [Arabidopsis
  misc_feature (11)..(340): Homolog of NCBI NO: 7430313 NR Description: probable aldose 1-epimerase (EC 5.1.3.3) - common
  misc_feature (11)..(340): Homolog of NCBI NO: 15824567 NR Description: non-cell-autonomous protein pathway2;
  misc_feature (3)..(340): Homolog of NCBI NO: 15242223 NR Description: aldose 1-epimerase family [Arabidopsis thaliana]
  misc_feature (11)..(340): Homolog of NCBI NO: 15824565 NR Description: non-cell-autonomous protein pathway1;
  misc_feature (6)..(340): Homolog of NCBI NO: 40882679 NR Description: putative aldose 1-epimerase [Oryza sativa

SEQ ID NO: 104009 - protein, 323 aa, Arabidopsis thaliana; identical to SEQ ID NO: 26039
  peptide (1)..(323): Ceres Seq. ID no. 13614112
  misc_feature (1)..(320): Pfam Name: Aldose 1-epimerase Pfam Description: Aldose 1-epimerase
  misc_feature (1)..(323): Homolog of NCBI NO: 30684727 NR Description: aldose 1-epimerase family [Arabidopsis thaliana]
  misc_feature (1)..(323): Homolog of NCBI NO: 14532616 NR Description: putative aldose 1-epimerase [Arabidopsis thaliana]
  misc_feature (1)..(323): Homolog of NCBI NO: 37531218 NR Description: putative aldose 1-epimerase - like protein [Oryza
  misc_feature (1)..(323): Homolog of NCBI NO: 15228261 NR Description: aldose 1-epimerase family [Arabidopsis thaliana]
  misc_feature (1)..(323): Homolog of NCBI NO: 21537069 NR Description: aldose 1-epimerase-like protein [Arabidopsis
  misc_feature (1)..(322): Homolog of NCBI NO: 7430313 NR Description: probable aldose 1-epimerase (EC 5.1.3.3) - common
  misc_feature (1)..(322): Homolog of NCBI NO: 15824567 NR Description: non-cell-autonomous protein pathway2;
  misc_feature (1)..(322): Homolog of NCBI NO: 15242223 NR Description: aldose 1-epimerase family [Arabidopsis thaliana]
  misc_feature (1)..(322): Homolog of NCBI NO: 15824565 NR Description: non-cell-autonomous protein pathway1;
  misc_feature (1)..(322): Homolog of NCBI NO: 40882679 NR Description: putative aldose 1-epimerase [Oryza sativa

SEQ ID NO: 104010 - protein, 188 aa, Arabidopsis thaliana; identical to SEQ ID NO: 26040
  peptide (1)..(188): Ceres Seq. ID no. 13614113
  misc_feature (1)..(185): Pfam Name: Aldose 1-epimerase Pfam Description: Aldose 1-epimerase
  misc_feature (1)..(188): Homolog of NCBI NO: 30684727 NR Description: aldose 1-epimerase family [Arabidopsis thaliana]
  misc_feature (1)..(188): Homolog of NCBI NO: 14532616 NR Description: putative aldose 1-epimerase [Arabidopsis thaliana]
  misc_feature (1)..(188): Homolog of NCBI NO: 37531218 NR Description: putative aldose 1-epimerase - like protein [Oryza
  misc_feature (1)..(188): Homolog of NCBI NO: 15228261 NR Description: aldose 1-epimerase family [Arabidopsis thaliana]
  misc_feature (1)..(188): Homolog of NCBI NO: 21537069 NR Description: aldose 1-epimerase-like protein [Arabidopsis
  misc_feature (1)..(187): Homolog of NCBI NO: 7430313 NR Description: probable aldose 1-epimerase (EC 5.1.3.3) - common
  misc_feature (1)..(187): Homolog of NCBI NO: 15824567 NR Description: non-cell-autonomous protein pathway2;
  misc_feature (1)..(187): Homolog of NCBI NO: 15242223 NR Description: aldose 1-epimerase family [Arabidopsis thaliana]
  misc_feature (1)..(187): Homolog of NCBI NO: 15824565 NR Description: non-cell-autonomous protein pathway1;
  misc_feature (1)..(187): Homolog of NCBI NO: 40882679 NR Description: putative aldose 1-epimerase [Oryza sativa

SEQ ID NO: 104011 - DNA, 1510 bp, Arabidopsis thaliana
  misc_feature (1)..(1510): Ceres Seq. ID no. 13614118
  misc_feature: MA Experiment ID: 108434 Result: Up-regulated in Transcription
  misc_feature: MA Experiment 108434 PARAMETER Experiment Name: At_Root_Tips_cDNA_P Parameter: Tissue Value: Root Tips
  misc_feature: MA Experiment ID: 20000234 Result: Up-regulated in Transcription
  misc_feature: MA Experiment 20000234 PARAMETER Experiment Name: At_Siliques_P Parameter: Age (day) Value: 21
  misc_feature: MA Experiment 20000234 PARAMETER Experiment Name: At_Siliques_P Parameter: Organism Value: A. thaliana
  misc_feature: MA Experiment 20000234 PARAMETER Experiment Name: At_Siliques_P Parameter: Plant Line Value: WS
  misc_feature: MA Experiment 20000234 PARAMETER Experiment Name: At_Siliques_P Parameter: Tissue Value: Less Than 5mm Siliques vs. Whole Plant
  misc_feature: MA Experiment ID: 20000264 Result: Up-regulated in Transcription
  misc_feature: MA Experiment 20000264 PARAMETER Experiment Name: At_Open_Flower_P Parameter: Age (day) Value: 21
  misc_feature: MA Experiment 20000264 PARAMETER Experiment Name: At_Open_Flower_P Parameter: Plant Line Value: WS
  misc_feature: MA Experiment 20000264 PARAMETER Experiment Name: At_Open_Flower_P Parameter: Tissue Value: Open Flower vs. Whole Plant
ctctgtgtcgcctgaagtgataacattctcattattcacccaaggagagagatcggagctaaaaagccatctctcgccggaaaatttctcagttttcttattaccttagccacagacaacaagacgacagaggaatctaatcttagccccctttcctctctgtctctctctatatctctgtctttaggctttgagatatcttcaacacgaagctttttgcttcttttttttatctctttaaaaaattccagccaatggttcgaatccaatagtagcttcaaaggtcatggatttagtcaggggtttgtggaggaaacatagaaggaagattttggtgacgacgacttgtttgggaagtgggtatttgctctataaactatacaatgcccatactcgtaagctcgctgatttggaacgagagcttgctaatgagcgtgaaaacgacgagatcatcaaaacccaaatgaaggcacatttcgataacattcagatgattgctgatactactacattgcctcacgcaattcatcacttgagtagtcgtgtagttgaagagattgatgtctcgagtattatggataagctaagcaaaggcaaaggaatattgattccttctgagaagcttcaactctggaatgagctcaaaattttgagtttcacgagaatggtcttgtccctttggtcggtcactatgcttagtttgtacattagggttcaagtcaatattttgggcagacatttatatatcgacactgctagaggtcttgggagctcccatttacttgacgaactagatctcatagagagagatgatgaacaaaagtttttgacaagcgctgattttcttgcgaccagtggcatgccgagtttgatttctaacatgcagaacgcagtgaaagaagttctcaagggaaagcagttaaaggatgtgttaaccacaagtgctcttcgagaaactgtgatgcggattctcgatgtgtttatgagcacaggaagtccacaccactgggtagattatctaatgatgtcccaagacgcaaccactgatgtttcctcttctgatgcaactgttaccaagtttcatctactcataaccgagacacgggaagtactcacaagcaatgatttttcaaatgtagcagagatctcactcaagtgttgtgccgttgcgttagtagaggagatggaaacgcagaccggtctggccacagggatgcaattggcaaagctattaccacagattgagaaaaccatgccggagatttcagctgagccggagaagaaccggttcttgcaactcatccgagatttgcctgaagttaaactcttttttactcttttatacgcaaatatgcctcagtagcattattaaaccccattgccaaaaattgtttcctgatcactttttatcatatgtttcgatttacttcaaaatagtaaaaccaaacatctctagaataattgttcaatatctatatcaaatcatttactaatatagtaatattgcagc

SEQ ID NO: 104012 - protein, 358 aa, Arabidopsis thaliana
  peptide (1)..(358): Ceres Seq. ID no. 13614119
  misc_feature (11)..(62): Pfam Name: Peroxin-3 Pfam Description: Peroxin-3
  misc_feature (1)..(358): Homolog of NCBI NO: 18401790 NR Description: expressed protein [Arabidopsis thaliana]
  misc_feature (1)..(358): Homolog of NCBI NO: 21554142 NR Description: unknown [Arabidopsis thaliana]
  misc_feature (1)..(358): Homolog of NCBI NO: 22330115 NR Description: expressed protein [Arabidopsis thaliana] At1g48640/F11I4_17 [Arabidopsis thaliana]
  misc_feature (55)..(345): Homolog of NCBI NO: 12597815 NR Description: lysine and histidine specific transporter,
  misc_feature (10)..(62): Homolog of NCBI NO: 12597815 NR Description: lysine and histidine specific transporter,
  misc_feature (55)..(334): Homolog of NCBI NO: 12321594 NR Description: hypothetical protein, 3' partial [Arabidopsis
  misc_feature (10)..(62): Homolog of NCBI NO: 12321594 NR Description: hypothetical protein, 3' partial [Arabidopsis
  misc_feature (167)..(358): Homolog of NCBI NO: 9294071 NR Description: gene_id:MRC8.15~unknown protein [Arabidopsis
  misc_feature (9)..(353): Homolog of NCBI NO: 28278477 NR Description: Similar to peroxisomal biogenesis factor 3 [Danio
  misc_feature (3)..(300): Homolog of NCBI NO: 12230450 NR Description: Peroxisomal assembly protein PEX3 (Peroxin-3)
MDLVRGLWRKHRRKILVTTTCLGSGYLLYKLYNAHTRKLADLERELANERENDEIIKTQMKAHFDNIQMIADTTTLPHAIHHLSSRVVEEIDVSSIMDKLSKGKGILIPSEKLQLWNELKILSFTRMVLSLWSVTMLSLYIRVQVNILGRHLYIDTARGLGSSHLLDELDLIERDDEQKFLTSADFLATSGMPSLISNMQNAVKEVLKGKQLKDVLTTSALRETVMRILDVFMSTGSPHHWVDYLMMSQDATTDVSSSDATVTKFHLLITETREVLTSNDFSNVAEISLKCCAVALVEEMETQTGLATGMQLAKLLPQIEKTMPEISAEPEKNRFLQLIRDLPEVKLFFTLLYANMPQ

SEQ ID NO: 104013 - protein, 299 aa, Arabidopsis thaliana
  peptide (1)..(299): Ceres Seq. ID no. 13614120
  misc_feature (1)..(286): Pfam Name: Peroxin-3 Pfam Description: Peroxin-3
  misc_feature (1)..(299): Homolog of NCBI NO: 18401790 NR Description: expressed protein [Arabidopsis thaliana]
  misc_feature (1)..(299): Homolog of NCBI NO: 21554142 NR Description: unknown [Arabidopsis thaliana]
  misc_feature (1)..(299): Homolog of NCBI NO: 22330115 NR Description: expressed protein [Arabidopsis thaliana] At1g48640/F11I4_17 [Arabidopsis thaliana]
  misc_feature (1)..(286): Homolog of NCBI NO: 12597815 NR Description: lysine and histidine specific transporter,
  misc_feature (1)..(275): Homolog of NCBI NO: 12321594 NR Description: hypothetical protein, 3' partial [Arabidopsis
  misc_feature (108)..(299): Homolog of NCBI NO: 9294071 NR Description: gene_id:MRC8.15~unknown protein [Arabidopsis
  misc_feature (1)..(294): Homolog of NCBI NO: 28278477 NR Description: Similar to peroxisomal biogenesis factor 3 [Danio
  misc_feature (1)..(241): Homolog of NCBI NO: 12230450 NR Description: Peroxisomal assembly protein PEX3 (Peroxin-3)
  misc_feature (1)..(241): Homolog of NCBI NO: 4505727 NR Description: peroxisomal biogenesis factor 3 [Homo sapiens]
  misc_feature (1)..(241): Homolog of NCBI NO: 9910484 NR Description: peroxisomal biogenesis factor 3; peroxisomal protein 3 [Mus musculus] >gi|9087165|sp|Q9QXY9|PEX3_MOUSE
MKAHFDNIQMIADTTTLPHAIHHLSSRVVEEIDVSSIMDKLSKGKGILIPSEKLQLWNELKILSFTRMVLSLWSVTMLSLYIRVQVNILGRHLYIDTARGLGSSHLLDELDLIERDDEQKFLTSADFLATSGMPSLISNMQNAVKEVLKGKQLKDVLTTSALRETVMRILDVFMSTGSPHHWVDYLMMSQDATTDVSSSDATVTKFHLLITETREVLTSNDFSNVAEISLKCCAVALVEEMETQTGLATGMQLAKLLPQIEKTMPEISAEPEKNRFLQLIRDLPEVKLFFTLLYANMPQ

SEQ ID NO: 104014 - protein, 290 aa, Arabidopsis thaliana
  peptide (1)..(290): Ceres Seq. ID no. 13614121
  misc_feature (1)..(277): Pfam Name: Peroxin-3 Pfam Description: Peroxin-3
  misc_feature (1)..(290): Homolog of NCBI NO: 18401790 NR Description: expressed protein [Arabidopsis thaliana]
  misc_feature (1)..(290): Homolog of NCBI NO: 21554142 NR Description: unknown [Arabidopsis thaliana]
  misc_feature (1)..(290): Homolog of NCBI NO: 22330115 NR Description: expressed protein [Arabidopsis thaliana] At1g48640/F11I4_17 [Arabidopsis thaliana]
  misc_feature (1)..(277): Homolog of NCBI NO: 12597815 NR Description: lysine and histidine specific transporter,
  misc_feature (1)..(266): Homolog of NCBI NO: 12321594 NR Description: hypothetical protein, 3' partial [Arabidopsis
  misc_feature (99)..(290): Homolog of NCBI NO: 9294071 NR Description: gene_id:MRC8.15~unknown protein [Arabidopsis
  misc_feature (1)..(285): Homolog of NCBI NO: 28278477 NR Description: Similar to peroxisomal biogenesis factor 3 [Danio
  misc_feature (1)..(232): Homolog of NCBI NO: 12230450 NR Description: Peroxisomal assembly protein PEX3 (Peroxin-3)
  misc_feature (1)..(232): Homolog of NCBI NO: 4505727 NR Description: peroxisomal biogenesis factor 3 [Homo sapiens]
  misc_feature (1)..(232): Homolog of NCBI NO: 9910484 NR Description: peroxisomal biogenesis factor 3; peroxisomal protein 3 [Mus musculus] >gi|9087165|sp|Q9QXY9|PEX3_MOUSE
MIADTTTLPHAIHHLSSRVVEEIDVSSIMDKLSKGKGILIPSEKLQLWNELKILSFTRMVLSLWSVTMLSLYIRVQVNILGRHLYIDTARGLGSSHLLDELDLIERDDEQKFLTSADFLATSGMPSLISNMQNAVKEVLKGKQLKDVLTTSALRETVMRILDVFMSTGSPHHWVDYLMMSQDATTDVSSSDATVTKFHLLITETREVLTSNDFSNVAEISLKCCAVALVEEMETQTGLATGMQLAKLLPQIEKTMPEISAEPEKNRFLQLIRDLPEVKLFFTLLYANMPQ

SEQ ID NO: 104015 - DNA, 1934 bp, Arabidopsis thaliana
  misc_feature (1)..(1934): Ceres Seq. ID no. 13614122
  misc_feature: MA Experiment ID: 108434 Result: Up-regulated in Transcription
  misc_feature: MA Experiment 108434 PARAMETER Experiment Name: At_Root_Tips_cDNA_P Parameter: Tissue Value: Root Tips
  misc_feature: MA Experiment ID: 108461 Result: Down-regulated in Transcription
  misc_feature: MA Experiment 108461 PARAMETER Experiment Name: At_Germinating_Seeds_cDNA_P Parameter: Age (day) Value: 1 vs. 0
  misc_feature: MA Experiment 108461 PARAMETER Experiment Name: At_Germinating_Seeds_cDNA_P Parameter: Tissue Value: Germinating Seeds
  misc_feature: MA Experiment ID: 108462 Result: Down-regulated in Transcription
  misc_feature: MA Experiment 108462 PARAMETER Experiment Name: At_Germinating_Seeds_cDNA_P Parameter: Age (day) Value: 2 vs. 0
  misc_feature: MA Experiment 108462 PARAMETER Experiment Name: At_Germinating_Seeds_cDNA_P Parameter: Tissue Value: Germinating Seeds
  misc_feature: MA Experiment ID: 108463 Result: Down-regulated in Transcription
  misc_feature: MA Experiment 108463 PARAMETER Experiment Name: At_Germinating_Seeds_cDNA_P Parameter: Age (day) Value: 3 vs. 0
  misc_feature: MA Experiment 108463 PARAMETER Experiment Name: At_Germinating_Seeds_cDNA_P Parameter: Tissue Value: Germinating Seeds
  misc_feature: MA Experiment ID: 108464 Result: Down-regulated in Transcription
  misc_feature: MA Experiment 108464 PARAMETER Experiment Name: At_Germinating_Seeds_cDNA_P Parameter: Age (day) Value: 4 vs. 0
  misc_feature: MA Experiment 108464 PARAMETER Experiment Name: At_Germinating_Seeds_cDNA_P Parameter: Tissue Value: Germinating Seeds
  misc_feature: MA Experiment ID: 108569 Result: Up-regulated in Transcription
  misc_feature: MA Experiment 108569 PARAMETER Experiment Name: At_0.001%_MeJA__cDNA_P Parameter: Timepoint (hr) Value: 6
  misc_feature: MA Experiment 108569 PARAMETER Experiment Name: At_0.001%_MeJA__cDNA_P Parameter: Tissue Value: Aerial
  misc_feature: MA Experiment 108569 PARAMETER Experiment Name: At_0.001%_MeJA__cDNA_P Parameter: Treatment Value: 0.001% MeJA vs. No Treatment
  misc_feature: MA Experiment ID: 108595 Result: Down-regulated in Transcription
  misc_feature: MA Experiment 108595 PARAMETER Experiment Name: At_Ler-pi_Ovule_cDNA_P Parameter: Plant Line Value: null
  misc_feature: MA Experiment ID: 20000224 Result: Down-regulated in Transcription
  misc_feature: MA Experiment ID: 20000227 Result: Up-regulated in Transcription
  misc_feature: MA Experiment 20000227 PARAMETER Experiment Name: At_Root-Tips-vs-Tops_P Parameter: Tissue Value: Root Tips vs. Root Tops
  misc_feature: MA Experiment ID: 20000437 Result: Down-regulated in Transcription
  misc_feature: MA Experiment 20000437 PARAMETER Experiment Name: At_Drought_P Parameter: Age (day) Value: 8
  misc_feature: MA Experiment 20000437 PARAMETER Experiment Name: At_Drought_P Parameter: Organism Value: A. thaliana
  misc_feature: MA Experiment 20000437 PARAMETER Experiment Name: At_Drought_P Parameter: Plant Line Value: WS
  misc_feature: MA Experiment 20000437 PARAMETER Experiment Name: At_Drought_P Parameter: Timepoint (hr) Value: 24
  misc_feature: MA Experiment 20000437 PARAMETER Experiment Name: At_Drought_P Parameter: Tissue Value: Whole Plant
  misc_feature: MA Experiment 20000437 PARAMETER Experiment Name: At_Drought_P Parameter: Treatment Value: Drought vs. No Drought
  misc_feature: MA Experiment ID: 20000452 Result: Down-regulated in Transcription
  misc_feature: MA Experiment 20000452 PARAMETER Experiment Name: At_CS6879_Shoots-Roots_P Parameter: Age (day) Value: 14
  misc_feature: MA Experiment 20000452 PARAMETER Experiment Name: At_CS6879_Shoots-Roots_P Parameter: Organism Value: A. thaliana
  misc_feature: MA Experiment 20000452 PARAMETER Experiment Name: At_CS6879_Shoots-Roots_P Parameter: Plant Line Value: CS6879 vs. WS
  misc_feature: MA Experiment 20000452 PARAMETER Experiment Name: At_CS6879_Shoots-Roots_P Parameter: Tissue Value: Shoots
  misc_feature: MA Experiment ID: 20001557 Result: Up-regulated in Transcription
  misc_feature: MA Experiment 20001557 PARAMETER Experiment Name: At_Drought_Soil_Dry_P Parameter: Age (day) Value: 27
  misc_feature: MA Experiment 20001557 PARAMETER Experiment Name: At_Drought_Soil_Dry_P Parameter: Organism Value: A. thaliana
  misc_feature: MA Experiment 20001557 PARAMETER Experiment Name: At_Drought_Soil_Dry_P Parameter: Plant Line Value: WS
  misc_feature: MA Experiment 20001557 PARAMETER Experiment Name: At_Drought_Soil_Dry_P Parameter: Post Timepoint (hr) Value: 3
  misc_feature: MA Experiment 20001557 PARAMETER Experiment Name: At_Drought_Soil_Dry_P Parameter: Post-Treatment Value: Re-Water vs. No Drought
  misc_feature: MA Experiment 20001557 PARAMETER Experiment Name: At_Drought_Soil_Dry_P Parameter: Timepoint (day) Value: 13
  misc_feature: MA Experiment 20001557 PARAMETER Experiment Name: At_Drought_Soil_Dry_P Parameter: Treatment Value: Drought vs. No Drought
agaacactcttgtcacacttccatttagggttttctgcaaatttctccgttcgagatcaattccgtcgagatctcaagctctctcactcgtagtaaaaaaatggcggcggtagcggcaccaatggcttcgaagccccgtggatctaaagctgaatcgttcgtagacaacaagcggagagaagatatccgattcgcgaacatcaactctgctcgagcagtctctgacgccgtccgtactagtttgggaccgaaaggaatggacaagatgatttccacggcgaacggagaggtaatcattactaacgatggagctacgatccttaacaagatggaggttttgcagccagcggcgaagatgttagtcgagctttccaaatctcaagattcagccgccggagatggtaccacaactgtcgtagtaatcgccggtgcgcttctcaaggagtgtcaatcgcttctcacaaacgggatccaccctactgtcatttcagattcgcttcacaaggcgtgtggtaaggcgatcgatattttgactgccatggctgttccagtggagctcactgatagagattcacttgtgaaatctgcgagcacatcgcttaacagtaaggttgttagtcagtactctacattgcttgctcctttagctgtagatgcggttctctctgttatagatccggaaaagcctgagattgtggatttgcgtgatattaagattgttaagaagcttggtgggactgtggatgatacacatactgtgaaaggtttggtttttgataagaaggttagccgtgctgctggtggaccgactcgtgtggagaatgctaagattgctgtgattcagttccagatctcacctcctaagactgatatcgagcagagtattgttgtctctgattatactcagatggataggatcttgaaagaagagaggaattacatattggggatgattaagaagatcaaagcaactggttgcaatgtgttgttgattcagaagagtattttgagggatgcagtgactgatctatctcttcactatttggccaaagctaagattatggttattaaggatgttgagagagatgagattgaatttgtcaccaagacattgaactgcttgcctatcgccaatattgagcatttcagagctgagaagcttggccatgctgatcttgttgaggaggcctcccttggagatggaaagattttgaagatcactggtatcaaggacatggggagaactacatctgttctagttcgtggctccaaccagcttgttctagatgaagctgaaaggagtttacatgatgccttgtgtgtggttaggtgtctagtgagcaaaaggtttttgattgcaggaggtggtgcaccagagattgagctctcaaggcagctcggtgcttgggctaaggtgctacatgggatggaaggttactgtgtgaagtcttttgctgaagctctcgaagttattccttacacactagccgagaatgcagggttaaaccctatcgccattgtgactgaactcaggaacaagcatgctcaaggggaaatcaacgcagggatcaatgtgaggaaaggacagatcactaacatcttggaggaaaatgttgttcagcctctgcttgtgagtaccagtgcgatcactttagcaactgaatgcgttaggatgattttgaagattgatgacatcgtaactgtgaggtagtgtggtagtttctttcaaaacaggtcccagaacacttctattgctctatctaagcttttgtttcgtttttttcatgtgttgtgcttgcacaatggttttgaacttagactcccttttcttgcaacatgtgctattgcagttaagtggctttatttgtggtttagtgcgattgtatttctttctagtgacttgtgatatcaagatctctcagttttttttgttt

SEQ ID NO: 104016 - protein, 536 aa, Arabidopsis thaliana; identical to SEQ ID NO: 27963
  peptide (1)..(536): Ceres Seq. ID no. 13614123
  misc_feature (40)..(536): Pfam Name: TCP-1/cpn60 chaperonin family Pfam Description: TCP-1/cpn60 chaperonin family
  misc_feature (1)..(536): Homolog of NCBI NO: 15229595 NR Description: chaperonin, putative [Arabidopsis thaliana]
  misc_feature (1)..(536): Homolog of NCBI NO: 21595439 NR Description: chaperonin subunit, putative [Arabidopsis

SEQ ID NO: 104017 - protein, 529 aa, Arabidopsis thaliana; identical to SEQ ID NO: 27964
  peptide (1)..(529): Ceres Seq. ID no. 13614124
  misc_feature (33)..(529): Pfam Name: TCP-1/cpn60 chaperonin family Pfam Description: TCP-1/cpn60 chaperonin family
  misc_feature (1)..(529): Homolog of NCBI NO: 15229595 NR Description: chaperonin, putative [Arabidopsis thaliana]
  misc_feature (1)..(529): Homolog of NCBI NO: 21595439 NR Description: chaperonin subunit, putative [Arabidopsis

SEQ ID NO: 104018 - protein, 484 aa, Arabidopsis thaliana; identical to SEQ ID NO: 27965
  peptide (1)..(484): Ceres Seq. ID no. 13614125
  misc_feature (1)..(484): Pfam Name: TCP-1/cpn60 chaperonin family Pfam Description: TCP-1/cpn60 chaperonin family
  misc_feature (1)..(484): Homolog of NCBI NO: 15229595 NR Description: chaperonin, putative [Arabidopsis thaliana]
  misc_feature (1)..(484): Homolog of NCBI NO: 21595439 NR Description: chaperonin subunit, putative [Arabidopsis

SEQ ID NO: 104019 - DNA, 1208 bp, Arabidopsis thaliana
  misc_feature (1)..(1208): Ceres Seq. ID no. 13614130
  misc_feature: MA Experiment ID: 20000264 Result: Up-regulated in Transcription
  misc_feature: MA Experiment 20000264 PARAMETER Experiment Name: At_Open_Flower_P Parameter: Age (day) Value: 21
  misc_feature: MA Experiment 20000264 PARAMETER Experiment Name: At_Open_Flower_P Parameter: Plant Line Value: WS
  misc_feature: MA Experiment 20000264 PARAMETER Experiment Name: At_Open_Flower_P Parameter: Tissue Value: Open Flower vs. Whole Plant
  misc_feature: MA Experiment ID: 20000265 Result: Up-regulated in Transcription
  misc_feature: MA Experiment 20000265 PARAMETER Experiment Name: At_Open_Flower_P Parameter: Age (day) Value: 21
  misc_feature: MA Experiment 20000265 PARAMETER Experiment Name: At_Open_Flower_P Parameter: Plant Line Value: WS
  misc_feature: MA Experiment 20000265 PARAMETER Experiment Name: At_Open_Flower_P Parameter: Tissue Value: Closed Flower vs. Whole Plant
  misc_feature: MA Experiment ID: 20000286 Result: Up-regulated in Transcription
  misc_feature: MA Experiment 20000286 PARAMETER Experiment Name: At_Open_Flower_P Parameter: Age (day) Value: 21
  misc_feature: MA Experiment 20000286 PARAMETER Experiment Name: At_Open_Flower_P Parameter: Plant Line Value: WS
  misc_feature: MA Experiment 20000286 PARAMETER Experiment Name: At_Open_Flower_P Parameter: Tissue Value: Half Open vs. Whole Plant
  misc_feature: MA Experiment ID: 20000794 Result: Up-regulated in Transcription
  misc_feature: MA Experiment 20000794 PARAMETER Experiment Name: At_Petals_P Parameter: Age (day) Value: 23-25 days
  misc_feature: MA Experiment 20000794 PARAMETER Experiment Name: At_Petals_P Parameter: Plant Line Value: WS
  misc_feature: MA Experiment 20000794 PARAMETER Experiment Name: At_Petals_P Parameter: Tissue Value: Petals vs. Whole plant
  misc_feature: MA Experiment ID: 20001910 Result: Up-regulated in Transcription
  misc_feature: MA Experiment 20001910 PARAMETER Experiment Name: At_Drought_Reproduction_P Parameter: Age (day) Value: 37
  misc_feature: MA Experiment 20001910 PARAMETER Experiment Name: At_Drought_Reproduction_P Parameter: Organism Value: A. thaliana
  misc_feature: MA Experiment 20001910 PARAMETER Experiment Name: At_Drought_Reproduction_P Parameter: Plant Line Value: WS
  misc_feature: MA Experiment 20001910 PARAMETER Experiment Name: At_Drought_Reproduction_P Parameter: Timepoint (day) Value: 7
  misc_feature: MA Experiment 20001910 PARAMETER Experiment Name: At_Drought_Reproduction_P Parameter: Tissue Value: Flowers
  misc_feature: MA Experiment 20001910 PARAMETER Experiment Name: At_Drought_Reproduction_P Parameter: Treatment Value: Drought vs. No Drought
  misc_feature: MA Experiment ID: 20001911 Result: Up-regulated in Transcription
  misc_feature: MA Experiment 20001911 PARAMETER Experiment Name: At_Drought_Reproduction_P Parameter: Age (day) Value: 40
  misc_feature: MA Experiment 20001911 PARAMETER Experiment Name: At_Drought_Reproduction_P Parameter: Organism Value: A. thaliana
  misc_feature: MA Experiment 20001911 PARAMETER Experiment Name: At_Drought_Reproduction_P Parameter: Plant Line Value: WS
  misc_feature: MA Experiment 20001911 PARAMETER Experiment Name: At_Drought_Reproduction_P Parameter: Timepoint (day) Value: 10
  misc_feature: MA Experiment 20001911 PARAMETER Experiment Name: At_Drought_Reproduction_P Parameter: Tissue Value: Flowers
  misc_feature: MA Experiment 20001911 PARAMETER Experiment Name: At_Drought_Reproduction_P Parameter: Treatment Value: Drought vs. No Drought
accccattaaccgtttcaaaaggaaattaaggagttgttcatagtttcgtttgtaaattgcaattgtaagtttgtaactgtaatagaattagattatttagggtttgcttgatcctcgatctgtgatcgattgatctcgcttcgcacccagcaggtttatttaatgagcgtgaaagatggctaagataatgcttggatctcactcggttaagagccatggatggaaggtggctcgtgaacatctttgtgactggctcatcctcgtagtcctcggtctcatcgacattgtactcaatgttatcgagccttttcatcgctatattggacctgacatgttaaccgatctcactttcccattttatgaagacaccatccctatgtgggctgtcccgattatttgtatattggttccgatatgcatcttcatagtgtactattactatcgaagagatgtttatgatcttcatcacgccattctcggtatcggattctcatgtcttgtgactggagtcaccactgattccatcaaagacgcggtcggtaggccacgccctaacttcttttaccgatgttttcccaatggtaaaccgaaatttcatccggatactaaggatgttgtgtgtcatggagttaaaaagataatcaaagaaggttacaagagtttccctagtggtcacacttcatggtcattcgctggtttaactttcctagcgtggtacttatcgggtaaaatcaaagtctttgacagaagaggtcacgtggcgaagctatgcctcgtgttcttaccgatactcatatcaattctcatcggaatatcacgcgtagacgactattggcaccattggaccgatgtcttcgccggagctatcatcggaatttttgtcgcttctttctcttacctccacttttttccttacccttacgacgaaaacggatgggctccacatgcgtattttagaatgttggcggagaggagcactggtcgagccacgacgatgactcgaaccggttctcgaggaatgttgggcaacgacgttgagcctggcaactccgcgtcctcgccgcacgatcgccaccgtgaaagcactgattctgacttttgaaaatttcctccacaatgttttaaaaaaaagaagttaattatccgtgtaatttttaattgtatgattgttttcacttactgatatataatatgtatacttttcatt

SEQ ID NO: 104020 - protein, 308 aa, Arabidopsis thaliana
  peptide (1)..(308): Ceres Seq. ID no. 13614131
  misc_feature (73)..(249): Pfam Name: PAP2 superfamily Pfam Description: PAP2 superfamily
  misc_feature (1)..(308): Homolog of NCBI NO: 18401811 NR Description: phosphatidic acid phosphatase (PAP2) family
  misc_feature (1)..(308): Homolog of NCBI NO: 21593222 NR Description: diacylglycerol pyrophosphate phosphatase,
  misc_feature (1)..(308): Homolog of NCBI NO: 9279656 NR Description: phosphatidic acid phosphatase-like protein
  misc_feature (1)..(265): Homolog of NCBI NO: 15218051 NR Description: phosphatidic acid phosphatase (PAP2) family
  misc_feature (1)..(269): Homolog of NCBI NO: 10673973 NR Description: phosphatidic acid phosphatase beta [Vigna
  misc_feature (1)..(273): Homolog of NCBI NO: 38637528 NR Description: unknown protein [Oryza sativa (japonica
  misc_feature (3)..(265): Homolog of NCBI NO: 9621903 NR Description: phosphatidic acid phosphatase alpha [Vigna
  misc_feature (1)..(269): Homolog of NCBI NO: 38637527 NR Description: putative phosphatidic acid phosphatase beta
  misc_feature (1)..(278): Homolog of NCBI NO: 21554001 NR Description: putative phosphatidic acid phosphatase
  misc_feature (1)..(278): Homolog of NCBI NO: 15724220 NR Description: At2g01180/F10A8.6 [Arabidopsis thaliana]
MAKIMLGSHSVKSHGWKVAREHLCDWLILVVLGLIDIVLNVIEPFHRYIGPDMLTDLTFPFYEDTIPMWAVPIICILVPICIFIVYYYYRRDVYDLHHAILGIGFSCLVTGVTTDSIKDAVGRPRPNFFYRCFPNGKPKFHPDTKDVVCHGVKKIIKEGYKSFPSGHTSWSFAGLTFLAWYLSGKIKVFDRRGHVAKLCLVFLPILISILIGISRVDDYWHHWTDVFAGAIIGIFVASFSYLHFFPYPYDENGWAPHAYFRMLAERSTGRATTMTRTGSRGMLGNDVEPGNSASSPHDRHRESTDSDF

SEQ ID NO: 104021 - protein, 304 aa, Arabidopsis thaliana
  peptide (1)..(304): Ceres Seq. ID no. 13614132
  misc_feature (69)..(245): Pfam Name: PAP2 superfamily Pfam Description: PAP2 superfamily
  misc_feature (1)..(304): Homolog of NCBI NO: 18401811 NR Description: phosphatidic acid phosphatase (PAP2) family
  misc_feature (1)..(304): Homolog of NCBI NO: 21593222 NR Description: diacylglycerol pyrophosphate phosphatase,
  misc_feature (1)..(304): Homolog of NCBI NO: 9279656 NR Description: phosphatidic acid phosphatase-like protein
  misc_feature (1)..(261): Homolog of NCBI NO: 15218051 NR Description: phosphatidic acid phosphatase (PAP2) family
  misc_feature (1)..(265): Homolog of NCBI NO: 10673973 NR Description: phosphatidic acid phosphatase beta [Vigna
  misc_feature (1)..(269): Homolog of NCBI NO: 38637528 NR Description: unknown protein [Oryza sativa (japonica
  misc_feature (1)..(261): Homolog of NCBI NO: 9621903 NR Description: phosphatidic acid phosphatase alpha [Vigna
  misc_feature (1)..(265): Homolog of NCBI NO: 38637527 NR Description: putative phosphatidic acid phosphatase beta
  misc_feature (1)..(274): Homolog of NCBI NO: 21554001 NR Description: putative phosphatidic acid phosphatase
  misc_feature (1)..(274): Homolog of NCBI NO: 15724220 NR Description: At2g01180/F10A8.6 [Arabidopsis thaliana]
MLGSHSVKSHGWKVAREHLCDWLILVVLGLIDIVLNVIEPFHRYIGPDMLTDLTFPFYEDTIPMWAVPIICILVPICIFIVYYYYRRDVYDLHHAILGIGFSCLVTGVTTDSIKDAVGRPRPNFFYRCFPNGKPKFHPDTKDVVCHGVKKIIKEGYKSFPSGHTSWSFAGLTFLAWYLSGKIKVFDRRGHVAKLCLVFLPILISILIGISRVDDYWHHWTDVFAGAIIGIFVASFSYLHFFPYPYDENGWAPHAYFRMLAERSTGRATTMTRTGSRGMLGNDVEPGNSASSPHDRHRESTDSDF

SEQ ID NO: 104022 - protein, 256 aa, Arabidopsis thaliana
  peptide (1)..(256): Ceres Seq. ID no. 13614133
  misc_feature (21)..(197): Pfam Name: PAP2 superfamily Pfam Description: PAP2 superfamily
  misc_feature (1)..(256): Homolog of NCBI NO: 18401811 NR Description: phosphatidic acid phosphatase (PAP2) family
  misc_feature (1)..(256): Homolog of NCBI NO: 21593222 NR Description: diacylglycerol pyrophosphate phosphatase,
  misc_feature (1)..(256): Homolog of NCBI NO: 9279656 NR Description: phosphatidic acid phosphatase-like protein
  misc_feature (1)..(213): Homolog of NCBI NO: 15218051 NR Description: phosphatidic acid phosphatase (PAP2) family
  misc_feature (1)..(217): Homolog of NCBI NO: 10673973 NR Description: phosphatidic acid phosphatase beta [Vigna
  misc_feature (1)..(221): Homolog of NCBI NO: 38637528 NR Description: unknown protein [Oryza sativa (japonica
  misc_feature (1)..(213): Homolog of NCBI NO: 9621903 NR Description: phosphatidic acid phosphatase alpha [Vigna
  misc_feature (1)..(217): Homolog of NCBI NO: 38637527 NR Description: putative phosphatidic acid phosphatase beta
  misc_feature (1)..(226): Homolog of NCBI NO: 21554001 NR Description: putative phosphatidic acid phosphatase
  misc_feature (1)..(226): Homolog of NCBI NO: 15724220 NR Description: At2g01180/F10A8.6 [Arabidopsis thaliana]
MLTDLTFPFYEDTIPMWAVPIICILVPICIFIVYYYYRRDVYDLHHAILGIGFSCLVTGVTTDSIKDAVGRPRPNFFYRCFPNGKPKFHPDTKDVVCHGVKKIIKEGYKSFPSGHTSWSFAGLTFLAWYLSGKIKVFDRRGHVAKLCLVFLPILISILIGISRVDDYWHHWTDVFAGAIIGIFVASFSYLHFFPYPYDENGWAPHAYFRMLAERSTGRATTMTRTGSRGMLGNDVEPGNSASSPHDRHRESTDSDF

SEQ ID NO: 104023 - DNA, 850 bp, Arabidopsis thaliana
  misc_feature (1)..(850): Ceres Seq. ID no. 13614134
  misc_feature: MA Experiment ID: 108434 Result: Down-regulated in Transcription
  misc_feature: MA Experiment 108434 PARAMETER Experiment Name: At_Root_Tips_cDNA_P Parameter: Tissue Value: Root Tips
  misc_feature: MA Experiment ID: 108464 Result: Up-regulated in Transcription
  misc_feature: MA Experiment 108464 PARAMETER Experiment Name: At_Germinating_Seeds_cDNA_P Parameter: Age (day) Value: 4 vs. 0
  misc_feature: MA Experiment 108464 PARAMETER Experiment Name: At_Germinating_Seeds_cDNA_P Parameter: Tissue Value: Germinating Seeds
  misc_feature: MA Experiment ID: 20000112 Result: Up-regulated in Transcription
  misc_feature: MA Experiment 20000112 PARAMETER Experiment Name: At_42deg_Heat_cDNA_P Parameter: Temperature (deg C) Value: 42 vs. 22
  misc_feature: MA Experiment 20000112 PARAMETER Experiment Name: At_42deg_Heat_cDNA_P Parameter: Timepoint (hr) Value: 2
  misc_feature: MA Experiment 20000112 PARAMETER Experiment Name: At_42deg_Heat_cDNA_P Parameter: Tissue Value: Aerial
  misc_feature: MA Experiment ID: 20000180 Result: Up-regulated in Transcription
  misc_feature: MA Experiment 20000180 PARAMETER Experiment Name: At_Germinating_Seeds_P Parameter: Age (hr) Value: 24 vs. 0
  misc_feature: MA Experiment 20000180 PARAMETER Experiment Name: At_Germinating_Seeds_P Parameter: Tissue Value: Germinating Seeds
aaatcaactattttacatagtgattacattcatttcattgttgtttcttaccgcagtaacttttatcttaataaatttgatccaaccatgccaatatttacgggatcgtcctccgattctgaagacgaaagaacgatccataaaacaactaagctcttcactcgtcaacgatctattcactctatatttggaggtggtaaagttgcggatattctgttatggagagagccgaaaatagcagcaacattggtgataggagtgagcatcttatggttcttaatggaagtagtggaatacaatttcataaccctaatttgtcatgcttccatgacctccatgctttttttcttcatttggtctactgcttctgattttctcaattgggaaagaccactaataccagaagttgtactagacgaatcttctttcaaacaattagcaagaagcttccatgttagattcaaccaaatcctcacaaagcttcttgacgttgcttgtggaagagatcctcctctcttttttctcacaacgatctcgctttatatcgtatccatcatcgggacatatttcaactttgtgaatcttctcttcatagggtttgtaagcatgcaaaccttaccggttatgtatgagatgtacgaggacgacgtggatacagcggcgggtaagttgatgaggaagatgaagaagctgtacaagaaagtcgatacgaatgttcttagtaaaatcccaagaggaactgtcaaaaacaagaaatttacttaattctgatcattctttacttatagagataatgtgtttgctactgtatttatgcgacctcatcaacccaaattaatatacatatctg

SEQ ID NO: 104024 - protein, 254 aa, Arabidopsis thaliana
  peptide (1)..(254): Ceres Seq. ID no. 13614135
  misc_feature (30)..(254): Homolog of NCBI NO: 18401821 NR Description: expressed protein [Arabidopsis thaliana]
  misc_feature (30)..(254): Homolog of NCBI NO: 21592845 NR Description: unknown [Arabidopsis thaliana]
  misc_feature (35)..(252): Homolog of NCBI NO: 34909318 NR Description: OSJNBb0021A09.5 [Oryza sativa (japonica
  misc_feature (35)..(252): Homolog of NCBI NO: 18398810 NR Description: expressed protein [Arabidopsis thaliana] expressed protein [Arabidopsis thaliana] unknown protein [Arabidopsis thaliana]
  misc_feature (35)..(252): Homolog of NCBI NO: 30681227 NR Description: expressed protein [Arabidopsis thaliana]
  misc_feature (37)..(252): Homolog of NCBI NO: 15237093 NR Description: expressed protein [Arabidopsis thaliana]
  misc_feature (34)..(251): Homolog of NCBI NO: 18406991 NR Description: expressed protein [Arabidopsis thaliana]
  misc_feature (48)..(252): Homolog of NCBI NO: 34904202 NR Description: P0492F05.25 [Oryza sativa (japonica
  misc_feature (37)..(252): Homolog of NCBI NO: 15236556 NR Description: expressed protein [Arabidopsis thaliana]
  misc_feature (34)..(246): Homolog of NCBI NO: 15222616 NR Description: expressed protein [Arabidopsis thaliana] F22C12.15 [Arabidopsis thaliana] >gi|17381218|gb|AAL36421.1| protein [Arabidopsis thaliana] >gi|21436435|gb|AAM51418.1|
KSTILHSDYIHFIVVSYRSNFYLNKFDPTMPIFTGSSSDSEDERTIHKTTKLFTRQRSIHSIFGGGKVADILLWREPKIAATLVIGVSILWFLMEVVEYNFITLICHASMTSMLFFFIWSTASDFLNWERPLIPEVVLDESSFKQLARSFHVRFNQILTKLLDVACGRDPPLFFLTTISLYIVSIIGTYFNFVNLLFIGFVSMQTLPVMYEMYEDDVDTAAGKLMRKMKKLYKKVDTNVLSKIPRGTVKNKKFT

SEQ ID NO: 104025 - protein, 225 aa, Arabidopsis thaliana
  peptide (1)..(225): Ceres Seq. ID no. 13614136
  misc_feature (1)..(225): Homolog of NCBI NO: 18401821 NR Description: expressed protein [Arabidopsis thaliana]
  misc_feature (1)..(225): Homolog of NCBI NO: 21592845 NR Description: unknown [Arabidopsis thaliana]
  misc_feature (6)..(223): Homolog of NCBI NO: 34909318 NR Description: OSJNBb0021A09.5 [Oryza sativa (japonica
  misc_feature (6)..(223): Homolog of NCBI NO: 18398810 NR Description: expressed protein [Arabidopsis thaliana] expressed protein [Arabidopsis thaliana] unknown protein [Arabidopsis thaliana]
  misc_feature (6)..(223): Homolog of NCBI NO: 30681227 NR Description: expressed protein [Arabidopsis thaliana]
  misc_feature (8)..(223): Homolog of NCBI NO: 15237093 NR Description: expressed protein [Arabidopsis thaliana]
  misc_feature (5)..(222): Homolog of NCBI NO: 18406991 NR Description: expressed protein [Arabidopsis thaliana]
  misc_feature (19)..(223): Homolog of NCBI NO: 34904202 NR Description: P0492F05.25 [Oryza sativa (japonica
  misc_feature (8)..(223): Homolog of NCBI NO: 15236556 NR Description: expressed protein [Arabidopsis thaliana]
  misc_feature (5)..(217): Homolog of NCBI NO: 15222616 NR Description: expressed protein [Arabidopsis thaliana] F22C12.15 [Arabidopsis thaliana] >gi|17381218|gb|AAL36421.1| protein [Arabidopsis thaliana] >gi|21436435|gb|AAM51418.1|
MPIFTGSSSDSEDERTIHKTTKLFTRQRSIHSIFGGGKVADILLWREPKIAATLVIGVSILWFLMEVVEYNFITLICHASMTSMLFFFIWSTASDFLNWERPLIPEVVLDESSFKQLARSFHVRFNQILTKLLDVACGRDPPLFFLTTISLYIVSIIGTYFNFVNLLFIGFVSMQTLPVMYEMYEDDVDTAAGKLMRKMKKLYKKVDTNVLSKIPRGTVKNKKFT

SEQ ID NO: 104026 - protein, 161 aa, Arabidopsis thaliana
  peptide (1)..(161): Ceres Seq. ID no. 13614137
  misc_feature (1)..(161): Homolog of NCBI NO: 18401821 NR Description: expressed protein [Arabidopsis thaliana]
  misc_feature (1)..(161): Homolog of NCBI NO: 21592845 NR Description: unknown [Arabidopsis thaliana]
  misc_feature (1)..(159): Homolog of NCBI NO: 34909318 NR Description: OSJNBb0021A09.5 [Oryza sativa (japonica
  misc_feature (1)..(159): Homolog of NCBI NO: 18398810 NR Description: expressed protein [Arabidopsis thaliana] expressed protein [Arabidopsis thaliana] unknown protein [Arabidopsis thaliana]
  misc_feature (1)..(159): Homolog of NCBI NO: 30681227 NR Description: expressed protein [Arabidopsis thaliana]
  misc_feature (1)..(159): Homolog of NCBI NO: 15237093 NR Description: expressed protein [Arabidopsis thaliana]
  misc_feature (1)..(158): Homolog of NCBI NO: 18406991 NR Description: expressed protein [Arabidopsis thaliana]
  misc_feature (1)..(159): Homolog of NCBI NO: 34904202 NR Description: P0492F05.25 [Oryza sativa (japonica
  misc_feature (1)..(159): Homolog of NCBI NO: 15236556 NR Description: expressed protein [Arabidopsis thaliana]
  misc_feature (1)..(153): Homolog of NCBI NO: 15222616 NR Description: expressed protein [Arabidopsis thaliana] F22C12.15 [Arabidopsis thaliana] >gi|17381218|gb|AAL36421.1| protein [Arabidopsis thaliana] >gi|21436435|gb|AAM51418.1|
MEVVEYNFITLICHASMTSMLFFFIWSTASDFLNWERPLIPEVVLDESSFKQLARSFHVRFNQILTKLLDVACGRDPPLFFLTTISLYIVSIIGTYFNFVNLLFIGFVSMQTLPVMYEMYEDDVDTAAGKLMRKMKKLYKKVDTNVLSKIPRGTVKNKKFT

SEQ ID NO: 104027 - DNA, 1991 bp, Arabidopsis thaliana
  misc_feature (1)..(1991): Ceres Seq. ID no. 13614150
  misc_feature: MA Experiment ID: 108434 Result: Up-regulated in Transcription
  misc_feature: MA Experiment 108434 PARAMETER Experiment Name: At_Root_Tips_cDNA_P Parameter: Tissue Value: Root Tips
  misc_feature: MA Experiment ID: 20000495 Result: Up-regulated in Transcription
  misc_feature: MA Experiment 20000495 PARAMETER Experiment Name: At_Guard_Cells_P Parameter: Harvest Date Value: 8/2/2002
  misc_feature: MA Experiment 20000495 PARAMETER Experiment Name: At_Guard_Cells_P Parameter: Organism Value: A. thaliana
  misc_feature: MA Experiment 20000495 PARAMETER Experiment Name: At_Guard_Cells_P Parameter: Tissue Value: Guard Cells vs. Leaves
  misc_feature: MA Experiment ID: 20000794 Result: Up-regulated in Transcription
  misc_feature: MA Experiment 20000794 PARAMETER Experiment Name: At_Petals_P Parameter: Age (day) Value: 23-25 days
  misc_feature: MA Experiment 20000794 PARAMETER Experiment Name: At_Petals_P Parameter: Plant Line Value: WS
  misc_feature: MA Experiment 20000794 PARAMETER Experiment Name: At_Petals_P Parameter: Tissue Value: Petals vs. Whole plant
gttgtcgccgtcgtcgtttctctcatttctgctctgttgtgctatcgtagcgtcgcgctcctttaaacgcgacggacgcagccttctctgttcatcgtttcgccggaagttttcttcagcggagatttattttcagctggttagtagttttgagtgactactgaggtaacaatggttgtagaaactatcgagaggtcttgtgagggttcaaagagaagacatgtgaacggtggagatatcgctgttccttgttcgggagaagagtgtagcaatggagatataaatgtagctcctggagtttcagcgaaaagagctagggtttctagagaaatgacgtttgaagatatttacggtgctgatgcattactcaatgatgacgatgatgaggatgatgattgtgattgggaacctgtgcaggcgcctatggagtttgtaaaatggtgttgtgtcaattgcactatgtcgaaccctggtgatatggtccactgttgtatatgcggtgagcacaaggaatctggcattttgaggcatggatatttagcgtctcccttttttaaagacactggtctcattgaagtcgaggagaaatatggaggaagctcatctgcaaccagctcgacagctgttgggttcgacgagagaatgttgctacactcagaatttgaagtgaaggcacaaccacatccagagagacctgatcgtcttcgagctatagctgctagtcttgccacagctggtgtttttcctggaagatgcttgcctatcaatgcaagggaaatcacgaaacaagaactccagatggtccacacttcagagcatgttgatgctgttgatactacaagccagcttctctatagctacttcacctctgacacatatgctaatgagtattcagcacgtgctgctagacttgcagcaggtttgtgcgctgatctagctacagatattttcactggccgtgtaaaaaatggttttgctttggttagacctcccggtcatcatgctggcgtcaggcatgctatggggttttgccttcacaataatgcagccgttgctgcattagtagcacaagcagcaggggcaaagaaggtgctgattgtggactgggatgtccatcatggcaacggaacccaagagatattcgaacaaaacaaatctgtattgtacatatccttgcacagacatgagggaggaaacttctatcccggtactggagctgctgatgaggttggttctaatggtggggaaggttattgtgtaaatgttccatggagttgcggtggagttggggataaagactatatctttgcgtttcaacatgtggttctccccatagcttctgcattttctccagattttgtcatcatatctgcgggatttgatgcggctagaggagacccactaggatgctgtgatgtgactccggctggctattctcgaatgacacagatgttgggtgatctgtgtggtgggaaaatgctagttattctcgagggcggctacaatcttcgctccatatctgcttctgcaacagcagtgatcaaggtgcttctgggtgaaaatccggagaacgagttgcccatcgccaccacgccttcagtagccggcctgcaaactgttcttgatgtactgaatatccaactggagttctggccatcacttgctatcagctactccaaattactctcagagttggaagcacgtctgatcgaaaacaaaaaaaatcagatgaaaaggaaggttgttcgggttccgacatggtggaaatggggacgaaagaagcttttgtacaactttctctcggctcgtatgatttcaagatcaaagtgattttagaaagcattcttcctaatccgtcgtaggaattgtctacacttacttgtaaccctaactgatctgggggaatttattgcaattagggagctctgaacaatctttatcacttacatttggtagggttttatagaaagaacccttttaacctgcttacc

SEQ ID NO: 104028 - protein, 552 aa, Arabidopsis thaliana
  peptide (1)..(552): Ceres Seq. ID no. 13614151
  misc_feature (1)..(552): Homolog of NCBI NO: 18401915 NR Description: histone deacetylase -related [Arabidopsis
  misc_feature (1)..(552): Homolog of NCBI NO: 21554265 NR Description: histone deacetylase, putative [Arabidopsis
  misc_feature (1)..(552): Homolog of NCBI NO: 26451468 NR Description: putative histone deacetylase [Arabidopsis
  misc_feature (1)..(552): Homolog of NCBI NO: 30684970 NR Description: histone deacetylase -related [Arabidopsis
  misc_feature (230)..(551): Homolog of NCBI NO: 11994115 NR Description: gene_id:MYF24.24~unknown protein [Arabidopsis
  misc_feature (1)..(206): Homolog of NCBI NO: 11994115 NR Description: gene_id:MYF24.24~unknown protein [Arabidopsis
  misc_feature (62)..(543): Homolog of NCBI NO: 22135463 NR Description: histone deacetylase HDA110 isoform 1 [Zea mays]
  misc_feature (62)..(543): Homolog of NCBI NO: 22135465 NR Description: histone deacetylase HDA110 isoform 2 [Zea mays]
  misc_feature (65)..(415): Homolog of NCBI NO: 34899956 NR Description: putative histone deacetylase [Oryza sativa
  misc_feature (416)..(506): Homolog of NCBI NO: 34899956 NR Description: putative histone deacetylase [Oryza sativa
MVVETIERSCEGSKRRHVNGGDIAVPCSGEECSNGDINVAPGVSAKRARVSREMTFEDIYGADALLNDDDDEDDDCDWEPVQAPMEFVKWCCVNCTMSNPGDMVHCCICGEHKESGILRHGYLASPFFKDTGLIEVEEKYGGSSSATSSTAVGFDERMLLHSEFEVKAQPHPERPDRLRAIAASLATAGVFPGRCLPINAREITKQELQMVHTSEHVDAVDTTSQLLYSYFTSDTYANEYSARAARLAAGLCADLATDIFTGRVKNGFALVRPPGHHAGVRHAMGFCLHNNAAVAALVAQAAGAKKVLIVDWDVHHGNGTQEIFEQNKSVLYISLHRHEGGNFYPGTGAADEVGSNGGEGYCVNVPWSCGGVGDKDYIFAFQHVVLPIASAFSPDFVIISAGFDAARGDPLGCCDVTPAGYSRMTQMLGDLCGGKMLVILEGGYNLRSISASATAVIKVLLGENPENELPIATTPSVAGLQTVLDVLNIQLEFWPSLAISYSKLLSELEARLIENKKNQMKRKVVRVPTWWKWGRKKLLYNFLSARMISRSK

SEQ ID NO: 104029 - protein, 499 aa, Arabidopsis thaliana
  peptide (1)..(499): Ceres Seq. ID no. 13614152
  misc_feature (1)..(499): Homolog of NCBI NO: 18401915 NR Description: histone deacetylase -related [Arabidopsis
  misc_feature (1)..(499): Homolog of NCBI NO: 21554265 NR Description: histone deacetylase, putative [Arabidopsis
  misc_feature (1)..(499): Homolog of NCBI NO: 26451468 NR Description: putative histone deacetylase [Arabidopsis
  misc_feature (1)..(499): Homolog of NCBI NO: 30684970 NR Description: histone deacetylase -related [Arabidopsis
  misc_feature (177)..(498): Homolog of NCBI NO: 11994115 NR Description: gene_id:MYF24.24~unknown protein [Arabidopsis
  misc_feature (1)..(153): Homolog of NCBI NO: 11994115 NR Description: gene_id:MYF24.24~unknown protein [Arabidopsis
  misc_feature (9)..(490): Homolog of NCBI NO: 22135463 NR Description: histone deacetylase HDA110 isoform 1 [Zea mays]
  misc_feature (9)..(490): Homolog of NCBI NO: 22135465 NR Description: histone deacetylase HDA110 isoform 2 [Zea mays]
  misc_feature (12)..(362): Homolog of NCBI NO: 34899956 NR Description: putative histone deacetylase [Oryza sativa
  misc_feature (363)..(453): Homolog of NCBI NO: 34899956 NR Description: putative histone deacetylase [Oryza sativa
MTFEDIYGADALLNDDDDEDDDCDWEPVQAPMEFVKWCCVNCTMSNPGDMVHCCICGEHKESGILRHGYLASPFFKDTGLIEVEEKYGGSSSATSSTAVGFDERMLLHSEFEVKAQPHPERPDRLRAIAASLATAGVFPGRCLPINAREITKQELQMVHTSEHVDAVDTTSQLLYSYFTSDTYANEYSARAARLAAGLCADLATDIFTGRVKNGFALVRPPGHHAGVRHAMGFCLHNNAAVAALVAQAAGAKKVLIVDWDVHHGNGTQEIFEQNKSVLYISLHRHEGGNFYPGTGAADEVGSNGGEGYCVNVPWSCGGVGDKDYIFAFQHVVLPIASAFSPDFVIISAGFDAARGDPLGCCDVTPAGYSRMTQMLGDLCGGKMLVILEGGYNLRSISASATAVIKVLLGENPENELPIATTPSVAGLQTVLDVLNIQLEFWPSLAISYSKLLSELEARLIENKKNQMKRKVVRVPTWWKWGRKKLLYNFLSARMISRSK

SEQ ID NO: 104030 - protein, 468 aa, Arabidopsis thaliana
  peptide (1)..(468): Ceres Seq. ID no. 13614153
  misc_feature (1)..(468): Homolog of NCBI NO: 18401915 NR Description: histone deacetylase -related [Arabidopsis
  misc_feature (1)..(468): Homolog of NCBI NO: 21554265 NR Description: histone deacetylase, putative [Arabidopsis
  misc_feature (1)..(468): Homolog of NCBI NO: 26451468 NR Description: putative histone deacetylase [Arabidopsis
  misc_feature (1)..(468): Homolog of NCBI NO: 30684970 NR Description: histone deacetylase -related [Arabidopsis
  misc_feature (146)..(467): Homolog of NCBI NO: 11994115 NR Description: gene_id:MYF24.24~unknown protein [Arabidopsis
  misc_feature (1)..(122): Homolog of NCBI NO: 11994115 NR Description: gene_id:MYF24.24~unknown protein [Arabidopsis
  misc_feature (1)..(459): Homolog of NCBI NO: 22135463 NR Description: histone deacetylase HDA110 isoform 1 [Zea mays]
  misc_feature (1)..(459): Homolog of NCBI NO: 22135465 NR Description: histone deacetylase HDA110 isoform 2 [Zea mays]
  misc_feature (1)..(331): Homolog of NCBI NO: 34899956 NR Description: putative histone deacetylase [Oryza sativa
  misc_feature (332)..(422): Homolog of NCBI NO: 34899956 NR Description: putative histone deacetylase [Oryza sativa
MEFVKWCCVNCTMSNPGDMVHCCICGEHKESGILRHGYLASPFFKDTGLIEVEEKYGGSSSATSSTAVGFDERMLLHSEFEVKAQPHPERPDRLRAIAASLATAGVFPGRCLPINAREITKQELQMVHTSEHVDAVDTTSQLLYSYFTSDTYANEYSARAARLAAGLCADLATDIFTGRVKNGFALVRPPGHHAGVRHAMGFCLHNNAAVAALVAQAAGAKKVLIVDWDVHHGNGTQEIFEQNKSVLYISLHRHEGGNFYPGTGAADEVGSNGGEGYCVNVPWSCGGVGDKDYIFAFQHVVLPIASAFSPDFVIISAGFDAARGDPLGCCDVTPAGYSRMTQMLGDLCGGKMLVILEGGYNLRSISASATAVIKVLLGENPENELPIATTPSVAGLQTVLDVLNIQLEFWPSLAISYSKLLSELEARLIENKKNQMKRKVVRVPTWWKWGRKKLLYNFLSARMISRSK

SEQ ID NO: 104031 - DNA, 1959 bp, Arabidopsis thaliana
  misc_feature (1)..(1959): Ceres Seq. ID no. 13614154
  misc_feature: MA Experiment ID: 20001557 Result: Up-regulated in Transcription
  misc_feature: MA Experiment 20001557 PARAMETER Experiment Name: At_Drought_Soil_Dry_P Parameter: Age (day) Value: 27
  misc_feature: MA Experiment 20001557 PARAMETER Experiment Name: At_Drought_Soil_Dry_P Parameter: Organism Value: A. thaliana
  misc_feature: MA Experiment 20001557 PARAMETER Experiment Name: At_Drought_Soil_Dry_P Parameter: Plant Line Value: WS
  misc_feature: MA Experiment 20001557 PARAMETER Experiment Name: At_Drought_Soil_Dry_P Parameter: Post Timepoint (hr) Value: 3
  misc_feature: MA Experiment 20001557 PARAMETER Experiment Name: At_Drought_Soil_Dry_P Parameter: Post-Treatment Value: Re-Water vs. No Drought
  misc_feature: MA Experiment 20001557 PARAMETER Experiment Name: At_Drought_Soil_Dry_P Parameter: Timepoint (day) Value: 13
  misc_feature: MA Experiment 20001557 PARAMETER Experiment Name: At_Drought_Soil_Dry_P Parameter: Treatment Value: Drought vs. No Drought
  misc_feature: MA Experiment ID: 20001558 Result: Up-regulated in Transcription
  misc_feature: MA Experiment 20001558 PARAMETER Experiment Name: At_Drought_Soil_Dry_P Parameter: Age (day) Value: 27
  misc_feature: MA Experiment 20001558 PARAMETER Experiment Name: At_Drought_Soil_Dry_P Parameter: Organism Value: A. thaliana
  misc_feature: MA Experiment 20001558 PARAMETER Experiment Name: At_Drought_Soil_Dry_P Parameter: Plant Line Value: WS
  misc_feature: MA Experiment 20001558 PARAMETER Experiment Name: At_Drought_Soil_Dry_P Parameter: Post Timepoint (hr) Value: 6
  misc_feature: MA Experiment 20001558 PARAMETER Experiment Name: At_Drought_Soil_Dry_P Parameter: Post-Treatment Value: Re-Water vs. No Drought
  misc_feature: MA Experiment 20001558 PARAMETER Experiment Name: At_Drought_Soil_Dry_P Parameter: Timepoint (day) Value: 13
  misc_feature: MA Experiment 20001558 PARAMETER Experiment Name: At_Drought_Soil_Dry_P Parameter: Treatment Value: Drought vs. No Drought
  misc_feature: MA Experiment ID: 20001757 Result: Up-regulated in Transcription
  misc_feature: MA Experiment 20001757 PARAMETER Experiment Name: At_50mM_NH4NO3_L-to-H_P Parameter: Timepoint (hr) Value: 6
  misc_feature: MA Experiment 20001757 PARAMETER Experiment Name: At_50mM_NH4NO3_L-to-H_P Parameter: Tissue Value: Leaf
  misc_feature: MA Experiment 20001757 PARAMETER Experiment Name: At_50mM_NH4NO3_L-to-H_P Parameter: Treatment Value: 50mM NH4NO3 vs 100mM Mannitol
gccgcgttatcactcttacgtttctctctctctctcaacttcttccacagcaaatttcttcgattctctgagctctctcccatccttttcaagtggcttcgtttctaaaaaattgattggttgaagaaagtggaaacatggttgaatcggacaagtcatccgttgaagagctgaagaagagggttaggaagagaagccgtgggaagaagaatgagcagcaaaaggctgaagaaaaaacccacactgtagaggaaaacgctgatgaaacgcagaagaagagtgaaaagaaggttaagaaagtgagaggcaaaatcgaggaagaggaagaaaaggtggaagcaatggaagatggtgaagatgagaagaatattgtgattgtcgggaaagggataatgactaatgtgacttttgattccctcgacttatctgagcaaacttctatagctatcaaggagatgggctttcagtacatgacgcaaattcaagctggatcaattcagccccttttggaggggaaggatgttcttggtgctgccagaactggttctggtaaaactcttgcttttctcattccggctgttgagttgctgtttaaagagcgtttctctcctcgcaacgggactggtgtgattgttatttgccccacaagggaacttgctatccagactaaaaatgtggcggaggagttactcaagcatcattcacagacagtcagcatggttattggtggcaataacagaaggtcggaagcacaacgcattgccagtggttcaaacttggtgatagcaactcctggtcgtcttcttgaccatcttcagaatacaaaggctttcatttataaacacttgaagtgccttgtgatcgatgaagctgataggatactggaagagaattttgaggaagacatgaataagattctaaagattttaccaaagactaggcaaactgcgttattctctgccacccagacctctaaggttaaagatcttgctcgggtgtcattgacatcacctgttcatgtggatgtcgatgatggcagacgcaaggtgacaaatgaaggattggagcaaggctattgtgttgttccgagcaaacaaagacttatccttctaatttcctttttgaaaaagaacctaaataaaaagattatggtatttttctcgacttgcaagtcggtacaattccatacggaaatcatgaaaataagcgacgtggatgtctctgatattcatggaggcatggatcagaacagaagaactaaaacctttttcgacttcatgaaagcaaagaaaggtatcttgttatgtactgatgttgctgctcgtggtctcgatattccttccgtggactggattatacagtatgatccaccagacaagccaacggaatatatccatagggttggtcgaacagcccgtggagaaggagcaaagggaaaggcattacttgtcttgattcctgaagaacttcagtttattcgctacctgaaggctgcgaaagtacctgttaaagagcttgagttcaatgagaagaggcttagtaatgttcaatctgcgctggagaaatgtgttgccaaggactacaatctgaacaagttagccaaagatgcgtacagggcttatctctcagcatacaattcacactctttgaaagacatctttaatgttcaccgacttgacctcctggctgttgctgaatcgttctgcttctcttcgccgcctaaagtgaatctgaacatagaaagtggagctgggaaggtgaggaaggcgagaaagcagcaaggtcgcaatggcttcagtccttacagtccctatggcaagtccacacctacaaaggaggcataaagtgtcatttgtttacaaaattactattttgctccgtagttttgactaattaccaccaccaagttttgtttaaagagtaaacagtgcatttgatttaaatgaaatgttccttggc

SEQ ID NO: 104032 - protein, 568 aa, Arabidopsis thaliana; identical to SEQ ID NO: 48241
  peptide (1)..(568): Ceres Seq. ID no. 13614155
  misc_feature (102)..(312): Pfam Name: DEAD/DEAH box helicase Pfam Description: DEAD/DEAH box helicase
  misc_feature (1)..(568): Homolog of NCBI NO: 15229677 NR Description: DEAD/DEAH box helicase, putative [Arabidopsis
  misc_feature (5)..(562): Homolog of NCBI NO: 15239187 NR Description: DEAD/DEAH box helicase, putative [Arabidopsis
  misc_feature (3)..(561): Homolog of NCBI NO: 29150366 NR Description: putative RNA helicase [Oryza sativa (japonica
  misc_feature (6)..(561): Homolog of NCBI NO: 19115400 NR Description: probable ATP-dependent RNA helicase
  misc_feature (1)..(553): Homolog of NCBI NO: 32423207 NR Description: hypothetical protein [Neurospora crassa]
  misc_feature (6)..(553): Homolog of NCBI NO: 7446077 NR Description: DEAD box protein MrDb, Myc-regulated - human
  misc_feature (6)..(553): Homolog of NCBI NO: 12654791 NR Description: DEAD/H (Asp-Glu-Ala-Asp/His) box polypeptide 18
  misc_feature (1)..(560): Homolog of NCBI NO: 40745958 NR Description: hypothetical protein AN1949.2 [Aspergillus
  misc_feature (25)..(553): Homolog of NCBI NO: 12860207 NR Description: unnamed protein product [Mus musculus]
  misc_feature (25)..(553): Homolog of NCBI NO: 31981163 NR Description: RIKEN cDNA 2310005B10 [Mus musculus]

SEQ ID NO: 104033 - protein, 500 aa, Arabidopsis thaliana; identical to SEQ ID NO: 48242
  peptide (1)..(500): Ceres Seq. ID no. 13614156
  misc_feature (34)..(244): Pfam Name: DEAD/DEAH box helicase Pfam Description: DEAD/DEAH box helicase
  misc_feature (1)..(500): Homolog of NCBI NO: 15229677 NR Description: DEAD/DEAH box helicase, putative [Arabidopsis
  misc_feature (1)..(494): Homolog of NCBI NO: 15239187 NR Description: DEAD/DEAH box helicase, putative [Arabidopsis
  misc_feature (1)..(493): Homolog of NCBI NO: 29150366 NR Description: putative RNA helicase [Oryza sativa (japonica
  misc_feature (1)..(493): Homolog of NCBI NO: 19115400 NR Description: probable ATP-dependent RNA helicase
  misc_feature (1)..(485): Homolog of NCBI NO: 32423207 NR Description: hypothetical protein [Neurospora crassa]
  misc_feature (1)..(485): Homolog of NCBI NO: 7446077 NR Description: DEAD box protein MrDb, Myc-regulated - human
  misc_feature (1)..(485): Homolog of NCBI NO: 12654791 NR Description: DEAD/H (Asp-Glu-Ala-Asp/His) box polypeptide 18
  misc_feature (1)..(492): Homolog of NCBI NO: 40745958 NR Description: hypothetical protein AN1949.2 [Aspergillus
  misc_feature (1)..(485): Homolog of NCBI NO: 12860207 NR Description: unnamed protein product [Mus musculus]
  misc_feature (1)..(485): Homolog of NCBI NO: 31981163 NR Description: RIKEN cDNA 2310005B10 [Mus musculus]

SEQ ID NO: 104034 - protein, 483 aa, Arabidopsis thaliana; identical to SEQ ID NO: 48243
  peptide (1)..(483): Ceres Seq. ID no. 13614157
  misc_feature (17)..(227): Pfam Name: DEAD/DEAH box helicase Pfam Description: DEAD/DEAH box helicase
  misc_feature (1)..(483): Homolog of NCBI NO: 15229677 NR Description: DEAD/DEAH box helicase, putative [Arabidopsis
  misc_feature (1)..(477): Homolog of NCBI NO: 15239187 NR Description: DEAD/DEAH box helicase, putative [Arabidopsis
  misc_feature (1)..(476): Homolog of NCBI NO: 29150366 NR Description: putative RNA helicase [Oryza sativa (japonica
  misc_feature (1)..(476): Homolog of NCBI NO: 19115400 NR Description: probable ATP-dependent RNA helicase
  misc_feature (1)..(468): Homolog of NCBI NO: 32423207 NR Description: hypothetical protein [Neurospora crassa]
  misc_feature (1)..(468): Homolog of NCBI NO: 7446077 NR Description: DEAD box protein MrDb, Myc-regulated - human
  misc_feature (1)..(468): Homolog of NCBI NO: 12654791 NR Description: DEAD/H (Asp-Glu-Ala-Asp/His) box polypeptide 18
  misc_feature (1)..(475): Homolog of NCBI NO: 40745958 NR Description: hypothetical protein AN1949.2 [Aspergillus
  misc_feature (1)..(468): Homolog of NCBI NO: 12860207 NR Description: unnamed protein product [Mus musculus]
  misc_feature (1)..(468): Homolog of NCBI NO: 31981163 NR Description: RIKEN cDNA 2310005B10 [Mus musculus]

SEQ ID NO: 104035 - DNA, 1027 bp, Arabidopsis thaliana
  misc_feature (1)..(1027): Ceres Seq. ID no. 13614181
  misc_feature: MA Experiment ID: 108434 Result: Down-regulated in Transcription
  misc_feature: MA Experiment 108434 PARAMETER Experiment Name: At_Root_Tips_cDNA_P Parameter: Tissue Value: Root Tips
  misc_feature: MA Experiment ID: 108595 Result: Down-regulated in Transcription
  misc_feature: MA Experiment 108595 PARAMETER Experiment Name: At_Ler-pi_Ovule_cDNA_P Parameter: Plant Line Value: null
  misc_feature: MA Experiment ID: 20000069 Result: Up-regulated in Transcription
  misc_feature: MA Experiment 20000069 PARAMETER Experiment Name: At_100uM_ABA_Mutants_cDNA_P Parameter: Plant Line Value: CS23
  misc_feature: MA Experiment 20000069 PARAMETER Experiment Name: At_100uM_ABA_Mutants_cDNA_P Parameter: Timepoint (hr) Value: 6
  misc_feature: MA Experiment 20000069 PARAMETER Experiment Name: At_100uM_ABA_Mutants_cDNA_P Parameter: Tissue Value: Aerial
  misc_feature: MA Experiment 20000069 PARAMETER Experiment Name: At_100uM_ABA_Mutants_cDNA_P Parameter: Treatment Value: 100uM ABA vs. No Treatment
  misc_feature: MA Experiment ID: 20000071 Result: Up-regulated in Transcription
  misc_feature: MA Experiment 20000071 PARAMETER Experiment Name: At_100uM_ABA_Mutants_cDNA_P Parameter: Plant Line Value: CS8104
  misc_feature: MA Experiment 20000071 PARAMETER Experiment Name: At_100uM_ABA_Mutants_cDNA_P Parameter: Timepoint (hr) Value: 6
  misc_feature: MA Experiment 20000071 PARAMETER Experiment Name: At_100uM_ABA_Mutants_cDNA_P Parameter: Tissue Value: Aerial
  misc_feature: MA Experiment 20000071 PARAMETER Experiment Name: At_100uM_ABA_Mutants_cDNA_P Parameter: Treatment Value: 100uM ABA vs. No Treatment
  misc_feature: MA Experiment ID: 20000087 Result: Up-regulated in Transcription
  misc_feature: MA Experiment 20000087 PARAMETER Experiment Name: At_100uM_ABA_Mutants_cDNA_P Parameter: Plant Line Value: WS
  misc_feature: MA Experiment 20000087 PARAMETER Experiment Name: At_100uM_ABA_Mutants_cDNA_P Parameter: Timepoint (hr) Value: 6
  misc_feature: MA Experiment 20000087 PARAMETER Experiment Name: At_100uM_ABA_Mutants_cDNA_P Parameter: Tissue Value: Aerial
  misc_feature: MA Experiment 20000087 PARAMETER Experiment Name: At_100uM_ABA_Mutants_cDNA_P Parameter: Treatment Value: 100uM ABA vs. No Treatment
  misc_feature: MA Experiment ID: 20000112 Result: Up-regulated in Transcription
  misc_feature: MA Experiment 20000112 PARAMETER Experiment Name: At_42deg_Heat_cDNA_P Parameter: Temperature (deg C) Value: 42 vs. 22
  misc_feature: MA Experiment 20000112 PARAMETER Experiment Name: At_42deg_Heat_cDNA_P Parameter: Timepoint (hr) Value: 2
  misc_feature: MA Experiment 20000112 PARAMETER Experiment Name: At_42deg_Heat_cDNA_P Parameter: Tissue Value: Aerial
  misc_feature: MA Experiment ID: 20000117 Result: Up-regulated in Transcription
  misc_feature: MA Experiment 20000117 PARAMETER Experiment Name: At_100uM_ABA_Mutants_cDNA_P Parameter: Plant Line Value: Columbia
  misc_feature: MA Experiment 20000117 PARAMETER Experiment Name: At_100uM_ABA_Mutants_cDNA_P Parameter: Timepoint (hr) Value: 6
  misc_feature: MA Experiment 20000117 PARAMETER Experiment Name: At_100uM_ABA_Mutants_cDNA_P Parameter: Tissue Value: Aerial
  misc_feature: MA Experiment 20000117 PARAMETER Experiment Name: At_100uM_ABA_Mutants_cDNA_P Parameter: Treatment Value: 100uM ABA vs. No Treatment
  misc_feature: MA Experiment ID: 20000794 Result: Up-regulated in Transcription
  misc_feature: MA Experiment 20000794 PARAMETER Experiment Name: At_Petals_P Parameter: Age (day) Value: 23-25 days
  misc_feature: MA Experiment 20000794 PARAMETER Experiment Name: At_Petals_P Parameter: Plant Line Value: WS
  misc_feature: MA Experiment 20000794 PARAMETER Experiment Name: At_Petals_P Parameter: Tissue Value: Petals vs. Whole plant
aaaataatagtcacaaaagaaattagaagacagatcaggaacagctagaagactcttcagggcacagagaaaacacccaccacatcaccgtcttcttcaacaaaatttaccaccagagatcgcagatatttcttcattctatctctctcttttagatccgattcgatgccgtcccgtagacgtaccctcctcaaggtcatcatcctcggtgatagcggggtgggaaaaacctctttgatgaatcagtatgttaataaaaagttcagcaaccagtacaaggcaaccattggagccgacttcttgaccaaggaagtacagtttgaagatcgacttttcactttacagatctgggatacagctggacaggaaaggtttcagagccttggtgtagccttttaccgtggtgctgattgctgtgttcttgtatatgatgtcaattccatgaaatcatttgaaaatctgaacaactggagggaagaatttctgatccaggcgagtccatcagatccagagaattttccatttgttcttatcggaaacaaggttgacgtggatgatggaaacagcagagtggtttcagagaaaaaggctaaagcttggtgtgcttcaaaggggaacattccttactttgagacctctgccaaggtaggtactaatgtggaggaagctttccaatgcattgccaaggacgcattgaagagcggagaagaagaagaactatacttgccagacacaatcgatgtagggacgagcaatcaacagaggtctacagggtgtgaatgctaaggagtatcaccagaaggaaacgaggcctctcctcccattatctcttttcgcaagttatgtctacattattactatgttgtaaattttttcttttgtgtggaaaagggatgagaacaaaaaaagaaggaaccctaaaaaaaaaagagatttgtttagtgttatttgtggggattttcatttatcatgctagctaaataaatactcactttcatcttaattttaagtgatgtttcttgtttgc

SEQ ID NO: 104036 - protein, 206 aa, Arabidopsis thaliana; identical to SEQ ID NO: 38968
  peptide (1)..(206): Ceres Seq. ID no. 13614182
  misc_feature (10)..(178): Pfam Name: Ras family Pfam Description: Ras family
  misc_feature (1)..(206): Homolog of NCBI NO: 15230211 NR Description: GTP-binding protein, putative [Arabidopsis
  misc_feature (1)..(206): Homolog of NCBI NO: 21536526 NR Description: GTP binding protein, putative [Arabidopsis
  misc_feature (1)..(206): Homolog of NCBI NO: 1370186 NR Description: RAB7C [Lotus japonicus]
  misc_feature (1)..(206): Homolog of NCBI NO: 34484308 NR Description: putative GTP-binding protein [Cucumis sativus]
  misc_feature (1)..(206): Homolog of NCBI NO: 400923 NR Description: RAS-RELATED PROTEIN RAB7 >gi|485497|pir||S33531
  misc_feature (1)..(206): Homolog of NCBI NO: 15222098 NR Description: Ras family GTP-binding protein [Arabidopsis
  misc_feature (1)..(206): Homolog of NCBI NO: 7438408 NR Description: GTP-binding protein Rab7b - common tobacco
  misc_feature (1)..(204): Homolog of NCBI NO: 3914557 NR Description: RAS-RELATED PROTEIN RAB7 (POSSIBLE
  misc_feature (1)..(206): Homolog of NCBI NO: 1370188 NR Description: RAB7D [Lotus japonicus]
  misc_feature (1)..(206): Homolog of NCBI NO: 3914550 NR Description: RAS-RELATED PROTEIN RAB7

SEQ ID NO: 104037 - protein, 182 aa, Arabidopsis thaliana; identical to SEQ ID NO: 38969
  peptide (1)..(182): Ceres Seq. ID no. 13614183
  misc_feature (1)..(154): Pfam Name: Ras family Pfam Description: Ras family
  misc_feature (1)..(182): Homolog of NCBI NO: 15230211 NR Description: GTP-binding protein, putative [Arabidopsis
  misc_feature (1)..(182): Homolog of NCBI NO: 21536526 NR Description: GTP binding protein, putative [Arabidopsis
  misc_feature (1)..(182): Homolog of NCBI NO: 1370186 NR Description: RAB7C [Lotus japonicus]
  misc_feature (1)..(182): Homolog of NCBI NO: 34484308 NR Description: putative GTP-binding protein [Cucumis sativus]
  misc_feature (1)..(182): Homolog of NCBI NO: 400923 NR Description: RAS-RELATED PROTEIN RAB7 >gi|485497|pir||S33531
  misc_feature (1)..(182): Homolog of NCBI NO: 15222098 NR Description: Ras family GTP-binding protein [Arabidopsis
  misc_feature (1)..(182): Homolog of NCBI NO: 7438408 NR Description: GTP-binding protein Rab7b - common tobacco
  misc_feature (1)..(180): Homolog of NCBI NO: 3914557 NR Description: RAS-RELATED PROTEIN RAB7 (POSSIBLE
  misc_feature (1)..(182): Homolog of NCBI NO: 1370188 NR Description: RAB7D [Lotus japonicus]
  misc_feature (1)..(182): Homolog of NCBI NO: 3914550 NR Description: RAS-RELATED PROTEIN RAB7

SEQ ID NO: 104038 - protein, 114 aa, Arabidopsis thaliana; identical to SEQ ID NO: 38970
  peptide (1)..(114): Ceres Seq. ID no. 13614184
  misc_feature (1)..(86): Pfam Name: Ras family Pfam Description: Ras family
  misc_feature (1)..(114): Homolog of NCBI NO: 15230211 NR Description: GTP-binding protein, putative [Arabidopsis
  misc_feature (1)..(114): Homolog of NCBI NO: 21536526 NR Description: GTP binding protein, putative [Arabidopsis
  misc_feature (1)..(114): Homolog of NCBI NO: 1370186 NR Description: RAB7C [Lotus japonicus]
  misc_feature (1)..(114): Homolog of NCBI NO: 34484308 NR Description: putative GTP-binding protein [Cucumis sativus]
  misc_feature (1)..(114): Homolog of NCBI NO: 400923 NR Description: RAS-RELATED PROTEIN RAB7 >gi|485497|pir||S33531
  misc_feature (1)..(114): Homolog of NCBI NO: 15222098 NR Description: Ras family GTP-binding protein [Arabidopsis
  misc_feature (1)..(114): Homolog of NCBI NO: 7438408 NR Description: GTP-binding protein Rab7b - common tobacco
  misc_feature (1)..(112): Homolog of NCBI NO: 3914557 NR Description: RAS-RELATED PROTEIN RAB7 (POSSIBLE
  misc_feature (1)..(114): Homolog of NCBI NO: 1370188 NR Description: RAB7D [Lotus japonicus]
  misc_feature (1)..(114): Homolog of NCBI NO: 3914550 NR Description: RAS-RELATED PROTEIN RAB7

SEQ ID NO: 104039 - DNA, 1047 bp, Arabidopsis thaliana
  misc_feature (1)..(1047): Ceres Seq. ID no. 13614189
  misc_feature: MA Experiment ID: 108434 Result: Up-regulated in Transcription
  misc_feature: MA Experiment 108434 PARAMETER Experiment Name: At_Root_Tips_cDNA_P Parameter: Tissue Value: Root Tips
  misc_feature: MA Experiment ID: 108462 Result: Down-regulated in Transcription
  misc_feature: MA Experiment 108462 PARAMETER Experiment Name: At_Germinating_Seeds_cDNA_P Parameter: Age (day) Value: 2 vs. 0
  misc_feature: MA Experiment 108462 PARAMETER Experiment Name: At_Germinating_Seeds_cDNA_P Parameter: Tissue Value: Germinating Seeds
  misc_feature: MA Experiment ID: 108463 Result: Down-regulated in Transcription
  misc_feature: MA Experiment 108463 PARAMETER Experiment Name: At_Germinating_Seeds_cDNA_P Parameter: Age (day) Value: 3 vs. 0
  misc_feature: MA Experiment 108463 PARAMETER Experiment Name: At_Germinating_Seeds_cDNA_P Parameter: Tissue Value: Germinating Seeds
  misc_feature: MA Experiment ID: 108464 Result: Down-regulated in Transcription
  misc_feature: MA Experiment 108464 PARAMETER Experiment Name: At_Germinating_Seeds_cDNA_P Parameter: Age (day) Value: 4 vs. 0
  misc_feature: MA Experiment 108464 PARAMETER Experiment Name: At_Germinating_Seeds_cDNA_P Parameter: Tissue Value: Germinating Seeds
  misc_feature: MA Experiment ID: 20000179 Result: Down-regulated in Transcription
  misc_feature: MA Experiment 20000179 PARAMETER Experiment Name: At_Germinating_Seeds_P Parameter: Age (hr) Value: 6 vs. 0
  misc_feature: MA Experiment 20000179 PARAMETER Experiment Name: At_Germinating_Seeds_P Parameter: Tissue Value: Germinating Seeds
  misc_feature: MA Experiment ID: 20000180 Result: Down-regulated in Transcription
  misc_feature: MA Experiment 20000180 PARAMETER Experiment Name: At_Germinating_Seeds_P Parameter: Age (hr) Value: 24 vs. 0
  misc_feature: MA Experiment 20000180 PARAMETER Experiment Name: At_Germinating_Seeds_P Parameter: Tissue Value: Germinating Seeds
  misc_feature: MA Experiment ID: 20000224 Result: Down-regulated in Transcription
  misc_feature: MA Experiment ID: 20000227 Result: Up-regulated in Transcription
  misc_feature: MA Experiment 20000227 PARAMETER Experiment Name: At_Root-Tips-vs-Tops_P Parameter: Tissue Value: Root Tips vs. Root Tops
tgaacgcaggcagagattcttcgaacttgatatttgggaaacttgcaatccgattctgtcaccagtgttttgccttcataaatggagtttgttgttgaagaaggaaagctagtgaatgaagattgctcgactttagttctcccagcattgtcaattgggaatgtaggacagctcgctgttgatcttctagtgtcatctactggtgcagagagagttggttatcttgatgatccaaatctgcttccttgtgttggaaatgatgcttatggccctcttccttgtggcgagatcgcccttcctctcgaggtttatgagtcatcttcaattgctactacccttgctcagcaacggtctccagttgcaaagggaatgatgattaaatttgcggagaatatagccaattttgctgcttcaagtggaaagaagcacatcattgtgttatcgagtttagacttccaaaggctgcataacttggatatgtcgagaggcccacaggtgtattatctgtctaacgctgaatctgatggaagagatgatcactgtgaaaggcttgggtttggaagattgcacgagtatgattcagaaggaagatgttggaagtaccttagctctgtctttgaaaagaacagtgtagaagagctggcgttgccttcagaagatgaacttgaagacatagactactatccaagcttgccatttgcagctcttttctcagcttttaaggcaagaggcttgaagatgacatgcctgctatgttactgttctgaaggagacaacattcctgaagcatttcttctagctgaggcttcatctaagcttatgggtctgactcctgacaagttccatggggaagaaggtgggaaatggcagataccgtattcatggaagagtatgtatggagctcctccggatatgtctatgttttaagactgttgttggagctcacagtgtcagacaccgaggttgttgtagtggtacaattatgatccaatgagaagtttatgaacatttgagatggtttaatccgatagagacaccttttctttc

SEQ ID NO: 104040 - protein, 281 aa, Arabidopsis thaliana
  peptide (1)..(281): Ceres Seq. ID no. 13614190
  misc_feature (1)..(281): Homolog of NCBI NO: 18402055 NR Description: expressed protein [Arabidopsis thaliana]
  misc_feature (1)..(281): Homolog of NCBI NO: 21594933 NR Description: unknown [Arabidopsis thaliana]
  misc_feature (100)..(281): Homolog of NCBI NO: 30794081 NR Description: unknown protein [Arabidopsis thaliana]
  misc_feature (1)..(281): Homolog of NCBI NO: 31415930 NR Description: unknown protein [Oryza sativa (japonica
  misc_feature (138)..(276): Homolog of NCBI NO: 32484314 NR Description: Unknown (protein for MGC:64466) [Xenopus laevis]
  misc_feature (16)..(122): Homolog of NCBI NO: 32484314 NR Description: Unknown (protein for MGC:64466) [Xenopus laevis]
  misc_feature (17)..(148): Homolog of NCBI NO: 28829982 NR Description: similar to Arabidopsis thaliana (Mouse-ear Genomic DNA, chromosome 3, TAC clone:K13E13 [Dictyostelium
  misc_feature (17)..(164): Homolog of NCBI NO: 37589726 NR Description: Unknown (protein for MGC:73278) [Danio rerio]
  misc_feature (11)..(143): Homolog of NCBI NO: 6841170 NR Description: HSPC260 [Homo sapiens]
  misc_feature (17)..(143): Homolog of NCBI NO: 22726189 NR Description: hepatocellular carcinoma susceptibility protein;
MEFVVEEGKLVNEDCSTLVLPALSIGNVGQLAVDLLVSSTGAERVGYLDDPNLLPCVGNDAYGPLPCGEIALPLEVYESSSIATTLAQQRSPVAKGMMIKFAENIANFAASSGKKHIIVLSSLDFQRLHNLDMSRGPQVYYLSNAESDGRDDHCERLGFGRLHEYDSEGRCWKYLSSVFEKNSVEELALPSEDELEDIDYYPSLPFAALFSAFKARGLKMTCLLCYCSEGDNIPEAFLLAEASSKLMGLTPDKFHGEEGGKWQIPYSWKSMYGAPPDMSMF

SEQ ID NO: 104041 - protein, 185 aa, Arabidopsis thaliana
  peptide (1)..(185): Ceres Seq. ID no. 13614191
  misc_feature (1)..(185): Homolog of NCBI NO: 18402055 NR Description: expressed protein [Arabidopsis thaliana]
  misc_feature (1)..(185): Homolog of NCBI NO: 21594933 NR Description: unknown [Arabidopsis thaliana]
  misc_feature (4)..(185): Homolog of NCBI NO: 30794081 NR Description: unknown protein [Arabidopsis thaliana]
  misc_feature (1)..(185): Homolog of NCBI NO: 31415930 NR Description: unknown protein [Oryza sativa (japonica
  misc_feature (42)..(180): Homolog of NCBI NO: 32484314 NR Description: Unknown (protein for MGC:64466) [Xenopus laevis]
  misc_feature (1)..(26): Homolog of NCBI NO: 32484314 NR Description: Unknown (protein for MGC:64466) [Xenopus laevis]
  misc_feature (1)..(52): Homolog of NCBI NO: 28829982 NR Description: similar to Arabidopsis thaliana (Mouse-ear Genomic DNA, chromosome 3, TAC clone:K13E13 [Dictyostelium
  misc_feature (1)..(68): Homolog of NCBI NO: 37589726 NR Description: Unknown (protein for MGC:73278) [Danio rerio]
  misc_feature (1)..(47): Homolog of NCBI NO: 6841170 NR Description: HSPC260 [Homo sapiens]
  misc_feature (1)..(47): Homolog of NCBI NO: 22726189 NR Description: hepatocellular carcinoma susceptibility protein;
MMIKFAENIANFAASSGKKHIIVLSSLDFQRLHNLDMSRGPQVYYLSNAESDGRDDHCERLGFGRLHEYDSEGRCWKYLSSVFEKNSVEELALPSEDELEDIDYYPSLPFAALFSAFKARGLKMTCLLCYCSEGDNIPEAFLLAEASSKLMGLTPDKFHGEEGGKWQIPYSWKSMYGAPPDMSMF

SEQ ID NO: 104042 - protein, 184 aa, Arabidopsis thaliana
  peptide (1)..(184): Ceres Seq. ID no. 13614192
  misc_feature (1)..(184): Homolog of NCBI NO: 18402055 NR Description: expressed protein [Arabidopsis thaliana]
  misc_feature (1)..(184): Homolog of NCBI NO: 21594933 NR Description: unknown [Arabidopsis thaliana]
  misc_feature (3)..(184): Homolog of NCBI NO: 30794081 NR Description: unknown protein [Arabidopsis thaliana]
  misc_feature (1)..(184): Homolog of NCBI NO: 31415930 NR Description: unknown protein [Oryza sativa (japonica
  misc_feature (41)..(179): Homolog of NCBI NO: 32484314 NR Description: Unknown (protein for MGC:64466) [Xenopus laevis]
  misc_feature (1)..(25): Homolog of NCBI NO: 32484314 NR Description: Unknown (protein for MGC:64466) [Xenopus laevis]
  misc_feature (1)..(51): Homolog of NCBI NO: 28829982 NR Description: similar to Arabidopsis thaliana (Mouse-ear Genomic DNA, chromosome 3, TAC clone:K13E13 [Dictyostelium
  misc_feature (1)..(67): Homolog of NCBI NO: 37589726 NR Description: Unknown (protein for MGC:73278) [Danio rerio]
  misc_feature (1)..(46): Homolog of NCBI NO: 6841170 NR Description: HSPC260 [Homo sapiens]
  misc_feature (1)..(46): Homolog of NCBI NO: 22726189 NR Description: hepatocellular carcinoma susceptibility protein;
MIKFAENIANFAASSGKKHIIVLSSLDFQRLHNLDMSRGPQVYYLSNAESDGRDDHCERLGFGRLHEYDSEGRCWKYLSSVFEKNSVEELALPSEDELEDIDYYPSLPFAALFSAFKARGLKMTCLLCYCSEGDNIPEAFLLAEASSKLMGLTPDKFHGEEGGKWQIPYSWKSMYGAPPDMSMF

SEQ ID NO: 104043 - DNA, 1536 bp, Arabidopsis thaliana
  misc_feature (1)..(1536): Ceres Seq. ID no. 13614201
atgacaagttggttttttttttttttttttaattttttcatcttcttgggtttggttgggtcactcttcaggtcaggtgtgtaaaaaagaaagaaagaaaagagagattgttgtgttgtaacccctttgactaaaatctaatgaacttttttaacacaacaaaactccttcagatctgaaagggttcttcttctctcttagtctctttgtccttttattctccgtcgtcgtttcatgatctgactctctggtcttctcttcttcttcttcttcttctattttttcttacttcgtcactgttgtgtctgaacatgccacgccctttcttccataagttgattttctcatccactatccaagaaaaacgtctgagggtcccagataagtttgtgagtaaattcaaggatgagctttcggttgctgttgcactcacagtacctgatggtcatgtttggcgtgtaggactaaggaaagctgacaacaaaatttggtttcaagatggttggcaagagtttgttgaccgttactccattcgcattggttatcttttgatttttagatatgaaggaaactctgccttcagcgtctacattttcaatttatcccactctgagatcaattaccattccaccggtctcatggattccgctcacaaccacttcaaacgcgcccgtttgtttgaagaccttgaagatgaagatgccgaggtcatctttccttcttctgtgtacccatcaccacttcctgagtctacagtaccagccaacaaagggtatgctagttcagccatccaaaccttgttcactggaccagttaaagctgaagagccaacgccaaccccaaaaatacctaaaaagagagggaggaagaagaaaaatgctgatcctgaggaaataaactcatcagctccgcgagatgatgatccagagaaccgttcaaagttctacgagagtgcttctgcgagaaagagaaccgtgactgcagaagaaagagagagagccatcaatgcagccaaaacgttcgaaccaacaaaccctttcttcagagtggttctgcgaccatcctatctatacagaggttgcatcatgtatcttccttctgggtttgctgagaagtacctaagtgggatctccgggttcatcaaagtccagcttgcggagaaacaatggcctgttcgatgtctctacaaagccgggagagccaaattcagtcaaggatggtacgaattcactctagagaacaacttaggagaaggagacgtctgtgtgtttgagctgctcagaaccagagatttcgttttgaaagtgacagcctttcgagtcaacgagtacgtctgaacaaagcattatggtgtgatcattctggatttgcaagtacaatgtcgtgtaggagtatcttaatttaaaaacaactaaaaaactctcttctggtctgtgtcattattgcgtcagtgtctcgttttttctctcgggtttactttgtgttatcgatgtggataagttgtttttacctcattatatataacctcttgagtgg

SEQ ID NO: 104044 - protein, 341 aa, Arabidopsis thaliana; identical to SEQ ID NO: 36797
  peptide (1)..(341): Ceres Seq. ID no. 13614202
  misc_feature (243)..(340): Pfam Name: B3 DNA binding domain Pfam Description: B3 DNA binding domain
  misc_feature (1)..(341): Homolog of NCBI NO: 30685150 NR Description: transcriptional factor B3 family [Arabidopsis >gi|21734794|gb|AAM76972.1|AF289051_1 reduced vernalization
  misc_feature (1)..(341): Homolog of NCBI NO: 40806799 NR Description: reduced vernalization response 1 [Brassica rapa]
  misc_feature (1)..(341): Homolog of NCBI NO: 33943517 NR Description: reduced vernalization response 1 [Brassica rapa]
  misc_feature (110)..(341): Homolog of NCBI NO: 9280316 NR Description: gb|AAD43153.1~gene_id:K13E13.10~similar to
  misc_feature (110)..(341): Homolog of NCBI NO: 18402653 NR Description: transcriptional factor B3 family [Arabidopsis
  misc_feature (110)..(341): Homolog of NCBI NO: 14596161 NR Description: Unknown protein [Arabidopsis thaliana]
  misc_feature (212)..(339): Homolog of NCBI NO: 34910734 NR Description: P0022F10.13 [Oryza sativa (japonica
  misc_feature (3)..(101): Homolog of NCBI NO: 34910734 NR Description: P0022F10.13 [Oryza sativa (japonica
  misc_feature (6)..(104): Homolog of NCBI NO: 15234250 NR Description: transcriptional factor B3 family [Arabidopsis
  misc_feature (185)..(336): Homolog of NCBI NO: 28201561 NR Description: putative auxin response factor [Oryza sativa

SEQ ID NO: 104045 - protein, 232 aa, Arabidopsis thaliana; identical to SEQ ID NO: 36798
  peptide (1)..(232): Ceres Seq. ID no. 13614203
  misc_feature (134)..(231): Pfam Name: B3 DNA binding domain Pfam Description: B3 DNA binding domain
  misc_feature (1)..(232): Homolog of NCBI NO: 30685150 NR Description: transcriptional factor B3 family [Arabidopsis >gi|21734794|gb|AAM76972.1|AF289051_1 reduced vernalization
  misc_feature (1)..(232): Homolog of NCBI NO: 40806799 NR Description: reduced vernalization response 1 [Brassica rapa]
  misc_feature (1)..(232): Homolog of NCBI NO: 33943517 NR Description: reduced vernalization response 1 [Brassica rapa]
  misc_feature (1)..(232): Homolog of NCBI NO: 9280316 NR Description: gb|AAD43153.1~gene_id:K13E13.10~similar to
  misc_feature (1)..(232): Homolog of NCBI NO: 18402653 NR Description: transcriptional factor B3 family [Arabidopsis
  misc_feature (1)..(232): Homolog of NCBI NO: 14596161 NR Description: Unknown protein [Arabidopsis thaliana]
  misc_feature (103)..(230): Homolog of NCBI NO: 34910734 NR Description: P0022F10.13 [Oryza sativa (japonica
  misc_feature (76)..(227): Homolog of NCBI NO: 28201561 NR Description: putative auxin response factor [Oryza sativa
  misc_feature (58)..(223): Homolog of NCBI NO: 28201553 NR Description: putative auxin response factor [Oryza sativa
  misc_feature (1)..(213): Homolog of NCBI NO: 28201564 NR Description: putative auxin response factor [Oryza sativa

SEQ ID NO: 104046 - DNA, 1255 bp, Arabidopsis thaliana
  misc_feature (1)..(1255): Ceres Seq. ID no. 13614204
  misc_feature: MA Experiment ID: 108462 Result: Up-regulated in Transcription
  misc_feature: MA Experiment 108462 PARAMETER Experiment Name: At_Germinating_Seeds_cDNA_P Parameter: Age (day) Value: 2 vs. 0
  misc_feature: MA Experiment 108462 PARAMETER Experiment Name: At_Germinating_Seeds_cDNA_P Parameter: Tissue Value: Germinating Seeds
  misc_feature: MA Experiment ID: 108463 Result: Up-regulated in Transcription
  misc_feature: MA Experiment 108463 PARAMETER Experiment Name: At_Germinating_Seeds_cDNA_P Parameter: Age (day) Value: 3 vs. 0
  misc_feature: MA Experiment 108463 PARAMETER Experiment Name: At_Germinating_Seeds_cDNA_P Parameter: Tissue Value: Germinating Seeds
  misc_feature: MA Experiment ID: 108464 Result: Up-regulated in Transcription
  misc_feature: MA Experiment 108464 PARAMETER Experiment Name: At_Germinating_Seeds_cDNA_P Parameter: Age (day) Value: 4 vs. 0
  misc_feature: MA Experiment 108464 PARAMETER Experiment Name: At_Germinating_Seeds_cDNA_P Parameter: Tissue Value: Germinating Seeds
  misc_feature: MA Experiment ID: 108488 Result: Up-regulated in Transcription
  misc_feature: MA Experiment ID: 108501 Result: Up-regulated in Transcription
  misc_feature: MA Experiment 108501 PARAMETER Experiment Name: At_ap2_floral_buds_cDNA_P Parameter: Plant Line Value: ap2 (Ler.)
  misc_feature: MA Experiment 108501 PARAMETER Experiment Name: At_ap2_floral_buds_cDNA_P Parameter: Tissue Value: Closed Flower
  misc_feature: MA Experiment ID: 108573 Result: Down-regulated in Transcription
  misc_feature: MA Experiment 108573 PARAMETER Experiment Name: At_Drought_cDNA_P Parameter: Timepoint (hr) Value: 6
  misc_feature: MA Experiment 108573 PARAMETER Experiment Name: At_Drought_cDNA_P Parameter: Tissue Value: Aerial
  misc_feature: MA Experiment 108573 PARAMETER Experiment Name: At_Drought_cDNA_P Parameter: Treatment Value: Drought vs. No Drought
  misc_feature: MA Experiment ID: 108576 Result: Down-regulated in Transcription
  misc_feature: MA Experiment 108576 PARAMETER Experiment Name: At_42deg_Heat_cDNA_P Parameter: Temperature (deg C) Value: 42 vs. 22
  misc_feature: MA Experiment 108576 PARAMETER Experiment Name: At_42deg_Heat_cDNA_P Parameter: Timepoint (hr) Value: 1
  misc_feature: MA Experiment 108576 PARAMETER Experiment Name: At_42deg_Heat_cDNA_P Parameter: Tissue Value: Aerial
  misc_feature: MA Experiment ID: 108577 Result: Down-regulated in Transcription
  misc_feature: MA Experiment 108577 PARAMETER Experiment Name: At_42deg_Heat_cDNA_P Parameter: Temperature (deg C) Value: 42 vs. 22
  misc_feature: MA Experiment 108577 PARAMETER Experiment Name: At_42deg_Heat_cDNA_P Parameter: Timepoint (hr) Value: 6
  misc_feature: MA Experiment 108577 PARAMETER Experiment Name: At_42deg_Heat_cDNA_P Parameter: Tissue Value: Aerial
  misc_feature: MA Experiment ID: 108668 Result: Down-regulated in Transcription
  misc_feature: MA Experiment 108668 PARAMETER Experiment Name: At_2mM_SA_cDNA_P Parameter: Plant Line Value: WS
  misc_feature: MA Experiment 108668 PARAMETER Experiment Name: At_2mM_SA_cDNA_P Parameter: Timepoint (hr) Value: 6
  misc_feature: MA Experiment 108668 PARAMETER Experiment Name: At_2mM_SA_cDNA_P Parameter: Treatment Value: 2mM SA vs. No Treatment
  misc_feature: MA Experiment ID: 20000090 Result: Down-regulated in Transcription
  misc_feature: MA Experiment ID: 20000111 Result: Down-regulated in Transcription
  misc_feature: MA Experiment 20000111 PARAMETER Experiment Name: At_42deg_Heat_cDNA_P Parameter: Temperature (deg C) Value: 42 vs. 22
  misc_feature: MA Experiment 20000111 PARAMETER Experiment Name: At_42deg_Heat_cDNA_P Parameter: Timepoint (hr) Value: 6
  misc_feature: MA Experiment 20000111 PARAMETER Experiment Name: At_42deg_Heat_cDNA_P Parameter: Tissue Value: Aerial
  misc_feature: MA Experiment ID: 20000113 Result: Down-regulated in Transcription
  misc_feature: MA Experiment 20000113 PARAMETER Experiment Name: At_42deg_Heat_cDNA_P Parameter: Temperature (deg C) Value: 42 vs. 22
  misc_feature: MA Experiment 20000113 PARAMETER Experiment Name: At_42deg_Heat_cDNA_P Parameter: Timepoint (hr) Value: 8
  misc_feature: MA Experiment 20000113 PARAMETER Experiment Name: At_42deg_Heat_cDNA_P Parameter: Tissue Value: Aerial
  misc_feature: MA Experiment ID: 20000171 Result: Down-regulated in Transcription
  misc_feature: MA Experiment 20000171 PARAMETER Experiment Name: At_42deg_Heat_P Parameter: Age (day) Value: 14
  misc_feature: MA Experiment 20000171 PARAMETER Experiment Name: At_42deg_Heat_P Parameter: Organism Value: A. thaliana
  misc_feature: MA Experiment 20000171 PARAMETER Experiment Name: At_42deg_Heat_P Parameter: Plant Line Value: WS
  misc_feature: MA Experiment 20000171 PARAMETER Experiment Name: At_42deg_Heat_P Parameter: Temperature (deg C) Value: 42 vs. 22
  misc_feature: MA Experiment 20000171 PARAMETER Experiment Name: At_42deg_Heat_P Parameter: Timepoint (hr) Value: 1
  misc_feature: MA Experiment 20000171 PARAMETER Experiment Name: At_42deg_Heat_P Parameter: Tissue Value: Aerial
  misc_feature: MA Experiment ID: 20000173 Result: Down-regulated in Transcription
  misc_feature: MA Experiment 20000173 PARAMETER Experiment Name: At_42deg_Heat_P Parameter: Age (day) Value: 14
  misc_feature: MA Experiment 20000173 PARAMETER Experiment Name: At_42deg_Heat_P Parameter: Organism Value: A. thaliana
  misc_feature: MA Experiment 20000173 PARAMETER Experiment Name: At_42deg_Heat_P Parameter: Plant Line Value: WS
  misc_feature: MA Experiment 20000173 PARAMETER Experiment Name: At_42deg_Heat_P Parameter: Temperature (deg C) Value: 42 vs. 22
  misc_feature: MA Experiment 20000173 PARAMETER Experiment Name: At_42deg_Heat_P Parameter: Timepoint (hr) Value: 6
  misc_feature: MA Experiment 20000173 PARAMETER Experiment Name: At_42deg_Heat_P Parameter: Tissue Value: Aerial
  misc_feature: MA Experiment ID: 20000179 Result: Up-regulated in Transcription
  misc_feature: MA Experiment 20000179 PARAMETER Experiment Name: At_Germinating_Seeds_P Parameter: Age (hr) Value: 6 vs. 0
  misc_feature: MA Experiment 20000179 PARAMETER Experiment Name: At_Germinating_Seeds_P Parameter: Tissue Value: Germinating Seeds
  misc_feature: MA Experiment ID: 20000180 Result: Up-regulated in Transcription
  misc_feature: MA Experiment 20000180 PARAMETER Experiment Name: At_Germinating_Seeds_P Parameter: Age (hr) Value: 24 vs. 0
  misc_feature: MA Experiment 20000180 PARAMETER Experiment Name: At_Germinating_Seeds_P Parameter: Tissue Value: Germinating Seeds
  misc_feature: MA Experiment ID: 20000182 Result: Down-regulated in Transcription
  misc_feature: MA Experiment 20000182 PARAMETER Experiment Name: At_2mM_SA_P Parameter: Age (day) Value: 14
  misc_feature: MA Experiment 20000182 PARAMETER Experiment Name: At_2mM_SA_P Parameter: Organism Value: A. thaliana
  misc_feature: MA Experiment 20000182 PARAMETER Experiment Name: At_2mM_SA_P Parameter: Plant Line Value: WS
  misc_feature: MA Experiment 20000182 PARAMETER Experiment Name: At_2mM_SA_P Parameter: Timepoint (hr) Value: 6
  misc_feature: MA Experiment 20000182 PARAMETER Experiment Name: At_2mM_SA_P Parameter: Tissue Value: Aerial
  misc_feature: MA Experiment 20000182 PARAMETER Experiment Name: At_2mM_SA_P Parameter: Treatment Value: 2mM SA vs. No Treatment
  misc_feature: MA Experiment ID: 20000438 Result: Up-regulated in Transcription
  misc_feature: MA Experiment 20000438 PARAMETER Experiment Name: At_Shoots__P Parameter: Age (day) Value: 14
  misc_feature: MA Experiment 20000438 PARAMETER Experiment Name: At_Shoots__P Parameter: Tissue Value: Shoots vs. Whole Plant
  misc_feature: MA Experiment ID: 20001247 Result: Down-regulated in Transcription
  misc_feature: MA Experiment 20001247 PARAMETER Experiment Name: At_Far-red-induction_P Parameter: Age (day) Value: 7
  misc_feature: MA Experiment 20001247 PARAMETER Experiment Name: At_Far-red-induction_P Parameter: Light Value: Far-red vs. White
  misc_feature: MA Experiment 20001247 PARAMETER Experiment Name: At_Far-red-induction_P Parameter: Organism Value: A. thaliana
  misc_feature: MA Experiment 20001247 PARAMETER Experiment Name: At_Far-red-induction_P Parameter: Plant Line Value: Columbia
  misc_feature: MA Experiment 20001247 PARAMETER Experiment Name: At_Far-red-induction_P Parameter: Timepoint (hr) Value: 1
  misc_feature: MA Experiment 20001247 PARAMETER Experiment Name: At_Far-red-induction_P Parameter: Tissue Value: Whole Plant
  misc_feature: MA Experiment ID: 20001450 Result: Down-regulated in Transcription
  misc_feature: MA Experiment 20001450 PARAMETER Experiment Name: At_Far-red-induction_P Parameter: Age (day) Value: 7
  misc_feature: MA Experiment 20001450 PARAMETER Experiment Name: At_Far-red-induction_P Parameter: Light Value: Far-red vs. White
  misc_feature: MA Experiment 20001450 PARAMETER Experiment Name: At_Far-red-induction_P Parameter: Organism Value: A. thaliana
  misc_feature: MA Experiment 20001450 PARAMETER Experiment Name: At_Far-red-induction_P Parameter: Plant Line Value: Columbia
  misc_feature: MA Experiment 20001450 PARAMETER Experiment Name: At_Far-red-induction_P Parameter: Timepoint (hr) Value: 8
  misc_feature: MA Experiment 20001450 PARAMETER Experiment Name: At_Far-red-induction_P Parameter: Tissue Value: Whole Plant
  misc_feature: MA Experiment ID: 20001555 Result: Up-regulated in Transcription
  misc_feature: MA Experiment 20001555 PARAMETER Experiment Name: At_Drought_Soil_Dry_P Parameter: Age (day) Value: 24
  misc_feature: MA Experiment 20001555 PARAMETER Experiment Name: At_Drought_Soil_Dry_P Parameter: Organism Value: A. thaliana
  misc_feature: MA Experiment 20001555 PARAMETER Experiment Name: At_Drought_Soil_Dry_P Parameter: Plant Line Value: WS
  misc_feature: MA Experiment 20001555 PARAMETER Experiment Name: At_Drought_Soil_Dry_P Parameter: Post Timepoint (hr) Value: None
  misc_feature: MA Experiment 20001555 PARAMETER Experiment Name: At_Drought_Soil_Dry_P Parameter: Post-Treatment Value: None
  misc_feature: MA Experiment 20001555 PARAMETER Experiment Name: At_Drought_Soil_Dry_P Parameter: Timepoint (day) Value: 10
  misc_feature: MA Experiment 20001555 PARAMETER Experiment Name: At_Drought_Soil_Dry_P Parameter: Treatment Value: Drought vs. No Drought
atcgatatctccaaagcctactctaaaaaataaccacaagaatcactgccaaaactgccatgggagaactcgacgaagcttttatccaagctccagaacacagacccaacactcacctcacaaactccggtgatttcattttctccgacgagatcccgaccatcgacctctcttctctcgaagatactcatcatgacaagactgcgatcgccaaggagattgcagaggcatgcaagagatggggattttttcaagtgatcaaccatggcttgccttcagctttaaggcatcgtgtagagaagacagctgctgagtttttcaatctaacgacggaggagaagaggaaagtgaaaagagacgaagtgaatcctatgggttatcacgacgaagaacacactaagaacgttagagattggaaggaaattttcgatttcttcttacaagattccacgatcgttccggcgtcaccggagccggaagatactgagctccgaaagctcacgaaccagtggcctcaaaacccttctcatttcagagaggtatgccaagaatatgcaagagaagttgagaagttagcttttaggctattggaacttgtctccattagtttgggtctacctggtgatcggctaaccggtttcttcaatgagcaaactagttttttgcggtttaaccattaccctccttgcccgaaccccgagctagcattaggtgttggacgtcacaaagatggaggagctttaaccgtcctggcccaagatagtgtaggtggattacaagtgagtcgtagatcggatggacaatggatccccgtgaaaccgatctcggatgctttgatcattaacatgggcaattgtattcaggtgtggacaaatgatgagtattggagtgctgaacatagagtggtcgtgaatacaagcaaagagagattctcaataccattcttcttcttcccatcacatgaagccaatattgagccattggaggagcttataagtgaggaaaacccgccttgttataaaaagtacaattggggaaagttctttgtttcaagaaacagaagtgatttcaagaaactcgaggttgagaatatccagattgatcacttcaaggcttagttaatcacattataattaaaccttatgttgatttctattcgttctttttatataagttagccaagttcatatttcccaaaatgcacgcgagattttacatgtttatgtttaaaataaacggtcatcagaatgttgtg

SEQ ID NO: 104047 - protein, 352 aa, Arabidopsis thaliana; identical to SEQ ID NO: 23735
  peptide (1)..(352): Ceres Seq. ID no. 13614205
  misc_feature (198)..(299): Pfam Name: 2OG-Fe(II) oxygenase superfamily Pfam Description: 2OG-Fe(II) oxygenase superfamily
  misc_feature (1)..(352): Homolog of NCBI NO: 18402079 NR Description: oxidoreductase, 2OG-Fe(II) oxygenase family
  misc_feature (1)..(351): Homolog of NCBI NO: 18402081 NR Description: flavonol synthase family [Arabidopsis thaliana]
  misc_feature (1)..(351): Homolog of NCBI NO: 21593702 NR Description: unknown [Arabidopsis thaliana]
  misc_feature (1)..(269): Homolog of NCBI NO: 30685157 NR Description: flavonol synthase family [Arabidopsis thaliana]
  misc_feature (4)..(159): Homolog of NCBI NO: 40253917 NR Description: putative Isopenicillin N synthase and related
  misc_feature (224)..(351): Homolog of NCBI NO: 40253917 NR Description: putative Isopenicillin N synthase and related
  misc_feature (49)..(254): Homolog of NCBI NO: 18103924 NR Description: putative oxylase protein [Pinus pinaster]
  misc_feature (1)..(345): Homolog of NCBI NO: 18402992 NR Description: oxidoreductase, 2OG-Fe(II) oxygenase family thaliana] >gi|9294689|dbj|BAB03055.1| gene_id:MHC9.10~similar to
  misc_feature (1)..(344): Homolog of NCBI NO: 15229694 NR Description: oxidoreductase, 2OG-Fe(II) oxygenase family thaliana] >gi|6016680|gb|AAF01507.1|AC009991_3 putative dioxygenase [Arabidopsis thaliana]
  misc_feature (6)..(345): Homolog of NCBI NO: 34907194 NR Description: putative ethylene-forming enzyme [Oryza sativa

SEQ ID NO: 104048 - protein, 248 aa, Arabidopsis thaliana; identical to SEQ ID NO: 23736
  peptide (1)..(248): Ceres Seq. ID no. 13614206
  misc_feature (94)..(195): Pfam Name: 2OG-Fe(II) oxygenase superfamily Pfam Description: 2OG-Fe(II) oxygenase superfamily
  misc_feature (1)..(248): Homolog of NCBI NO: 18402079 NR Description: oxidoreductase, 2OG-Fe(II) oxygenase family
  misc_feature (1)..(247): Homolog of NCBI NO: 18402081 NR Description: flavonol synthase family [Arabidopsis thaliana]
  misc_feature (1)..(247): Homolog of NCBI NO: 21593702 NR Description: unknown [Arabidopsis thaliana]
  misc_feature (1)..(165): Homolog of NCBI NO: 30685157 NR Description: flavonol synthase family [Arabidopsis thaliana]
  misc_feature (1)..(55): Homolog of NCBI NO: 40253917 NR Description: putative Isopenicillin N synthase and related
  misc_feature (120)..(247): Homolog of NCBI NO: 40253917 NR Description: putative Isopenicillin N synthase and related
  misc_feature (1)..(150): Homolog of NCBI NO: 18103924 NR Description: putative oxylase protein [Pinus pinaster]
  misc_feature (1)..(241): Homolog of NCBI NO: 18402992 NR Description: oxidoreductase, 2OG-Fe(II) oxygenase family thaliana] >gi|9294689|dbj|BAB03055.1| gene_id:MHC9.10~similar to
  misc_feature (1)..(240): Homolog of NCBI NO: 15229694 NR Description: oxidoreductase, 2OG-Fe(II) oxygenase family thaliana] >gi|6016680|gb|AAF01507.1|AC009991_3 putative dioxygenase [Arabidopsis thaliana]
  misc_feature (1)..(241): Homolog of NCBI NO: 34907194 NR Description: putative ethylene-forming enzyme [Oryza sativa

SEQ ID NO: 104049 - DNA, 1173 bp, Arabidopsis thaliana
  misc_feature (1)..(1173): Ceres Seq. ID no. 13614207
  misc_feature: MA Experiment ID: 108434 Result: Down-regulated in Transcription
  misc_feature: MA Experiment 108434 PARAMETER Experiment Name: At_Root_Tips_cDNA_P Parameter: Tissue Value: Root Tips
  misc_feature: MA Experiment ID: 108462 Result: Up-regulated in Transcription
  misc_feature: MA Experiment 108462 PARAMETER Experiment Name: At_Germinating_Seeds_cDNA_P Parameter: Age (day) Value: 2 vs. 0
  misc_feature: MA Experiment 108462 PARAMETER Experiment Name: At_Germinating_Seeds_cDNA_P Parameter: Tissue Value: Germinating Seeds
  misc_feature: MA Experiment ID: 108463 Result: Up-regulated in Transcription
  misc_feature: MA Experiment 108463 PARAMETER Experiment Name: At_Germinating_Seeds_cDNA_P Parameter: Age (day) Value: 3 vs. 0
  misc_feature: MA Experiment 108463 PARAMETER Experiment Name: At_Germinating_Seeds_cDNA_P Parameter: Tissue Value: Germinating Seeds
  misc_feature: MA Experiment ID: 108464 Result: Up-regulated in Transcription
  misc_feature: MA Experiment 108464 PARAMETER Experiment Name: At_Germinating_Seeds_cDNA_P Parameter: Age (day) Value: 4 vs. 0
  misc_feature: MA Experiment 108464 PARAMETER Experiment Name: At_Germinating_Seeds_cDNA_P Parameter: Tissue Value: Germinating Seeds
  misc_feature: MA Experiment ID: 108573 Result: Down-regulated in Transcription
  misc_feature: MA Experiment 108573 PARAMETER Experiment Name: At_Drought_cDNA_P Parameter: Timepoint (hr) Value: 6
  misc_feature: MA Experiment 108573 PARAMETER Experiment Name: At_Drought_cDNA_P Parameter: Tissue Value: Aerial
  misc_feature: MA Experiment 108573 PARAMETER Experiment Name: At_Drought_cDNA_P Parameter: Treatment Value: Drought vs. No Drought
  misc_feature: MA Experiment ID: 108577 Result: Down-regulated in Transcription
  misc_feature: MA Experiment 108577 PARAMETER Experiment Name: At_42deg_Heat_cDNA_P Parameter: Temperature (deg C) Value: 42 vs. 22
  misc_feature: MA Experiment 108577 PARAMETER Experiment Name: At_42deg_Heat_cDNA_P Parameter: Timepoint (hr) Value: 6
  misc_feature: MA Experiment 108577 PARAMETER Experiment Name: At_42deg_Heat_cDNA_P Parameter: Tissue Value: Aerial
  misc_feature: MA Experiment ID: 108579 Result: Up-regulated in Transcription
  misc_feature: MA Experiment 108579 PARAMETER Experiment Name: At_4deg_Cold_cDNA_P Parameter: Temperature (deg C) Value: 4 vs. 22
  misc_feature: MA Experiment 108579 PARAMETER Experiment Name: At_4deg_Cold_cDNA_P Parameter: Timepoint (hr) Value: 6
  misc_feature: MA Experiment 108579 PARAMETER Experiment Name: At_4deg_Cold_cDNA_P Parameter: Tissue Value: Aerial
  misc_feature: MA Experiment ID: 108585 Result: Up-regulated in Transcription
  misc_feature: MA Experiment 108585 PARAMETER Experiment Name: At_5mM_NaNP_cDNA_P Parameter: Timepoint (hr) Value: 6
  misc_feature: MA Experiment 108585 PARAMETER Experiment Name: At_5mM_NaNP_cDNA_P Parameter: Tissue Value: Aerial
  misc_feature: MA Experiment 108585 PARAMETER Experiment Name: At_5mM_NaNP_cDNA_P Parameter: Treatment Value: null
  misc_feature: MA Experiment ID: 20000090 Result: Up-regulated in Transcription
  misc_feature: MA Experiment ID: 20000111 Result: Down-regulated in Transcription
  misc_feature: MA Experiment 20000111 PARAMETER Experiment Name: At_42deg_Heat_cDNA_P Parameter: Temperature (deg C) Value: 42 vs. 22
  misc_feature: MA Experiment 20000111 PARAMETER Experiment Name: At_42deg_Heat_cDNA_P Parameter: Timepoint (hr) Value: 6
  misc_feature: MA Experiment 20000111 PARAMETER Experiment Name: At_42deg_Heat_cDNA_P Parameter: Tissue Value: Aerial
  misc_feature: MA Experiment ID: 20000113 Result: Down-regulated in Transcription
  misc_feature: MA Experiment 20000113 PARAMETER Experiment Name: At_42deg_Heat_cDNA_P Parameter: Temperature (deg C) Value: 42 vs. 22
  misc_feature: MA Experiment 20000113 PARAMETER Experiment Name: At_42deg_Heat_cDNA_P Parameter: Timepoint (hr) Value: 8
  misc_feature: MA Experiment 20000113 PARAMETER Experiment Name: At_42deg_Heat_cDNA_P Parameter: Tissue Value: Aerial
  misc_feature: MA Experiment ID: 20000144 Result: Down-regulated in Transcription
  misc_feature: MA Experiment 20000144 PARAMETER Experiment Name: At_42deg_Heat_cDNA_P Parameter: Temperature (deg C) Value: 42 vs. 22
  misc_feature: MA Experiment 20000144 PARAMETER Experiment Name: At_42deg_Heat_cDNA_P Parameter: Timepoint (hr) Value: 1
  misc_feature: MA Experiment 20000144 PARAMETER Experiment Name: At_42deg_Heat_cDNA_P Parameter: Tissue Value: Aerial
  misc_feature: MA Experiment ID: 20000171 Result: Down-regulated in Transcription
  misc_feature: MA Experiment 20000171 PARAMETER Experiment Name: At_42deg_Heat_P Parameter: Age (day) Value: 14
  misc_feature: MA Experiment 20000171 PARAMETER Experiment Name: At_42deg_Heat_P Parameter: Organism Value: A. thaliana
  misc_feature: MA Experiment 20000171 PARAMETER Experiment Name: At_42deg_Heat_P Parameter: Plant Line Value: WS
  misc_feature: MA Experiment 20000171 PARAMETER Experiment Name: At_42deg_Heat_P Parameter: Temperature (deg C) Value: 42 vs. 22
  misc_feature: MA Experiment 20000171 PARAMETER Experiment Name: At_42deg_Heat_P Parameter: Timepoint (hr) Value: 1
  misc_feature: MA Experiment 20000171 PARAMETER Experiment Name: At_42deg_Heat_P Parameter: Tissue Value: Aerial
  misc_feature: MA Experiment ID: 20000173 Result: Down-regulated in Transcription
  misc_feature: MA Experiment 20000173 PARAMETER Experiment Name: At_42deg_Heat_P Parameter: Age (day) Value: 14
  misc_feature: MA Experiment 20000173 PARAMETER Experiment Name: At_42deg_Heat_P Parameter: Organism Value: A. thaliana
  misc_feature: MA Experiment 20000173 PARAMETER Experiment Name: At_42deg_Heat_P Parameter: Plant Line Value: WS
  misc_feature: MA Experiment 20000173 PARAMETER Experiment Name: At_42deg_Heat_P Parameter: Temperature (deg C) Value: 42 vs. 22
  misc_feature: MA Experiment 20000173 PARAMETER Experiment Name: At_42deg_Heat_P Parameter: Timepoint (hr) Value: 6
  misc_feature: MA Experiment 20000173 PARAMETER Experiment Name: At_42deg_Heat_P Parameter: Tissue Value: Aerial
  misc_feature: MA Experiment ID: 20000182 Result: Up-regulated in Transcription
  misc_feature: MA Experiment 20000182 PARAMETER Experiment Name: At_2mM_SA_P Parameter: Age (day) Value: 14
  misc_feature: MA Experiment 20000182 PARAMETER Experiment Name: At_2mM_SA_P Parameter: Organism Value: A. thaliana
  misc_feature: MA Experiment 20000182 PARAMETER Experiment Name: At_2mM_SA_P Parameter: Plant Line Value: WS
  misc_feature: MA Experiment 20000182 PARAMETER Experiment Name: At_2mM_SA_P Parameter: Timepoint (hr) Value: 6
  misc_feature: MA Experiment 20000182 PARAMETER Experiment Name: At_2mM_SA_P Parameter: Tissue Value: Aerial
  misc_feature: MA Experiment 20000182 PARAMETER Experiment Name: At_2mM_SA_P Parameter: Treatment Value: 2mM SA vs. No Treatment
  misc_feature: MA Experiment ID: 20000184 Result: Down-regulated in Transcription
  misc_feature: MA Experiment 20000184 PARAMETER Experiment Name: At_Shoots__P Parameter: Age (day) Value: 7
  misc_feature: MA Experiment 20000184 PARAMETER Experiment Name: At_Shoots__P Parameter: Tissue Value: Shoots vs. Whole Plant
  misc_feature: MA Experiment ID: 20000185 Result: Down-regulated in Transcription
  misc_feature: MA Experiment 20000185 PARAMETER Experiment Name: At_Roots__P Parameter: Age (day) Value: 7 vs. 21
  misc_feature: MA Experiment 20000185 PARAMETER Experiment Name: At_Roots__P Parameter: Organism Value: A. thaliana
  misc_feature: MA Experiment 20000185 PARAMETER Experiment Name: At_Roots__P Parameter: Tissue Value: Roots vs. Whole Plant
  misc_feature: MA Experiment ID: 20000234 Result: Down-regulated in Transcription
  misc_feature: MA Experiment 20000234 PARAMETER Experiment Name: At_Siliques_P Parameter: Age (day) Value: 21
  misc_feature: MA Experiment 20000234 PARAMETER Experiment Name: At_Siliques_P Parameter: Organism Value: A. thaliana
  misc_feature: MA Experiment 20000234 PARAMETER Experiment Name: At_Siliques_P Parameter: Plant Line Value: WS
  misc_feature: MA Experiment 20000234 PARAMETER Experiment Name: At_Siliques_P Parameter: Tissue Value: Less Than 5mm Siliques vs. Whole Plant
  misc_feature: MA Experiment ID: 20000264 Result: Down-regulated in Transcription
  misc_feature: MA Experiment 20000264 PARAMETER Experiment Name: At_Open_Flower_P Parameter: Age (day) Value: 21
  misc_feature: MA Experiment 20000264 PARAMETER Experiment Name: At_Open_Flower_P Parameter: Plant Line Value: WS
  misc_feature: MA Experiment 20000264 PARAMETER Experiment Name: At_Open_Flower_P Parameter: Tissue Value: Open Flower vs. Whole Plant
  misc_feature: MA Experiment ID: 20000265 Result: Down-regulated in Transcription
  misc_feature: MA Experiment 20000265 PARAMETER Experiment Name: At_Open_Flower_P Parameter: Age (day) Value: 21
  misc_feature: MA Experiment 20000265 PARAMETER Experiment Name: At_Open_Flower_P Parameter: Plant Line Value: WS
  misc_feature: MA Experiment 20000265 PARAMETER Experiment Name: At_Open_Flower_P Parameter: Tissue Value: Closed Flower vs. Whole Plant
  misc_feature: MA Experiment ID: 20000286 Result: Down-regulated in Transcription
  misc_feature: MA Experiment 20000286 PARAMETER Experiment Name: At_Open_Flower_P Parameter: Age (day) Value: 21
  misc_feature: MA Experiment 20000286 PARAMETER Experiment Name: At_Open_Flower_P Parameter: Plant Line Value: WS
  misc_feature: MA Experiment 20000286 PARAMETER Experiment Name: At_Open_Flower_P Parameter: Tissue Value: Half Open vs. Whole Plant
  misc_feature: MA Experiment ID: 20000438 Result: Down-regulated in Transcription
  misc_feature: MA Experiment 20000438 PARAMETER Experiment Name: At_Shoots__P Parameter: Age (day) Value: 14
  misc_feature: MA Experiment 20000438 PARAMETER Experiment Name: At_Shoots__P Parameter: Tissue Value: Shoots vs. Whole Plant
  misc_feature: MA Experiment ID: 20000495 Result: Down-regulated in Transcription
  misc_feature: MA Experiment 20000495 PARAMETER Experiment Name: At_Guard_Cells_P Parameter: Harvest Date Value: 8/2/2002
  misc_feature: MA Experiment 20000495 PARAMETER Experiment Name: At_Guard_Cells_P Parameter: Organism Value: A. thaliana
  misc_feature: MA Experiment 20000495 PARAMETER Experiment Name: At_Guard_Cells_P Parameter: Tissue Value: Guard Cells vs. Leaves
  misc_feature: MA Experiment ID: 20000794 Result: Down-regulated in Transcription
  misc_feature: MA Experiment 20000794 PARAMETER Experiment Name: At_Petals_P Parameter: Age (day) Value: 23-25 days
  misc_feature: MA Experiment 20000794 PARAMETER Experiment Name: At_Petals_P Parameter: Plant Line Value: WS
  misc_feature: MA Experiment 20000794 PARAMETER Experiment Name: At_Petals_P Parameter: Tissue Value: Petals vs. Whole plant
  misc_feature: MA Experiment ID: 20001555 Result: Down-regulated in Transcription
  misc_feature: MA Experiment 20001555 PARAMETER Experiment Name: At_Drought_Soil_Dry_P Parameter: Age (day) Value: 24
  misc_feature: MA Experiment 20001555 PARAMETER Experiment Name: At_Drought_Soil_Dry_P Parameter: Organism Value: A. thaliana
  misc_feature: MA Experiment 20001555 PARAMETER Experiment Name: At_Drought_Soil_Dry_P Parameter: Plant Line Value: WS
  misc_feature: MA Experiment 20001555 PARAMETER Experiment Name: At_Drought_Soil_Dry_P Parameter: Post Timepoint (hr) Value: None
  misc_feature: MA Experiment 20001555 PARAMETER Experiment Name: At_Drought_Soil_Dry_P Parameter: Post-Treatment Value: None
  misc_feature: MA Experiment 20001555 PARAMETER Experiment Name: At_Drought_Soil_Dry_P Parameter: Timepoint (day) Value: 10
  misc_feature: MA Experiment 20001555 PARAMETER Experiment Name: At_Drought_Soil_Dry_P Parameter: Treatment Value: Drought vs. No Drought
  misc_feature: MA Experiment ID: 20001558 Result: Down-regulated in Transcription
  misc_feature: MA Experiment 20001558 PARAMETER Experiment Name: At_Drought_Soil_Dry_P Parameter: Age (day) Value: 27
  misc_feature: MA Experiment 20001558 PARAMETER Experiment Name: At_Drought_Soil_Dry_P Parameter: Organism Value: A. thaliana
  misc_feature: MA Experiment 20001558 PARAMETER Experiment Name: At_Drought_Soil_Dry_P Parameter: Plant Line Value: WS
  misc_feature: MA Experiment 20001558 PARAMETER Experiment Name: At_Drought_Soil_Dry_P Parameter: Post Timepoint (hr) Value: 6
  misc_feature: MA Experiment 20001558 PARAMETER Experiment Name: At_Drought_Soil_Dry_P Parameter: Post-Treatment Value: Re-Water vs. No Drought
  misc_feature: MA Experiment 20001558 PARAMETER Experiment Name: At_Drought_Soil_Dry_P Parameter: Timepoint (day) Value: 13
  misc_feature: MA Experiment 20001558 PARAMETER Experiment Name: At_Drought_Soil_Dry_P Parameter: Treatment Value: Drought vs. No Drought
  misc_feature: MA Experiment ID: 20001560 Result: Down-regulated in Transcription
  misc_feature: MA Experiment 20001560 PARAMETER Experiment Name: At_Drought_Soil_Dry_P Parameter: Age (day) Value: 28
  misc_feature: MA Experiment 20001560 PARAMETER Experiment Name: At_Drought_Soil_Dry_P Parameter: Organism Value: A. thaliana
  misc_feature: MA Experiment 20001560 PARAMETER Experiment Name: At_Drought_Soil_Dry_P Parameter: Plant Line Value: WS
  misc_feature: MA Experiment 20001560 PARAMETER Experiment Name: At_Drought_Soil_Dry_P Parameter: Post Timepoint (hr) Value: None
  misc_feature: MA Experiment 20001560 PARAMETER Experiment Name: At_Drought_Soil_Dry_P Parameter: Post-Treatment Value: None
  misc_feature: MA Experiment 20001560 PARAMETER Experiment Name: At_Drought_Soil_Dry_P Parameter: Timepoint (day) Value: 14
  misc_feature: MA Experiment 20001560 PARAMETER Experiment Name: At_Drought_Soil_Dry_P Parameter: Treatment Value: Drought vs. No Drought
atccaaagtccaaacacagcataaaagtagctctattgactttttttcttcctccaaactctttttacgtcaagcaatggaggatcttgatccaacctacatccaagcaccagagcatagatcagattcgaatttcatccctaaccaaccagaagaaatacccgtgattgatctctcgcgcctcgatgaccccgaagatgtccaaaacgttatctcagagatcggtgatgcttgtgaaaaatggggattttttcaggtgcttaatcatggtgtgccttctgacgcaaggcaacgtgtggagaagactgtgaagatgtttttcgatttgcctatggaagagaagataaaggtgaagagagacgatgtgaatcctgtagggtatcatgatggagaacacaccaagaacgttaaagattggaaagaagtgtttgatatttatttcaaagatccaatggtcattccttcaaccactgatcctgaagatgaaggcttaagacttgtttacaacaagtggcctcaatctccttctgatttcagggaagcatgtgaagtatatgcgagacacgctgaaaaattagcgttcaagctcttggaactgatttcgttaagcttaggcttgccaaaagagcgttttcatgactacttcaaagaacaaatgagttttttcaggataaatcgttatccaccatgtccaagacctgacctagctttaggtgttggtcaccacaaagatgccgacgttattagtctattggctcaagatgatgttggaggattacaagttagtcgtagatcggacggtgtttggtttccgattagacccgtccctaatgctcttgtcatcaatataggcaattgtatggagatatggacgaatgacaagtattggagtgctgaacatagagtggtggtgaacacaacaagagagagatactcgataccattcttcttgttgccttcacacgatgtggaagtgaagccattagaagaacttgtgagtcctgaaaaccctccaaaatacaaaggctataaatggggtaagttctacgtcagtaggaatagaagcgattttcgaaaactggaaatcgaaaacatccaaatcgatgacttcaaagttaaaacttaatatactatgtatcggctttttttttgtttaccaagctatgatattaa

SEQ ID NO: 104050 - protein, 374 aa, Arabidopsis thaliana; identical to SEQ ID NO: 37546
  peptide (1)..(374): Ceres Seq. ID no. 13614208
  misc_feature (218)..(319): Pfam Name: 2OG-Fe(II) oxygenase superfamily Pfam Description: 2OG-Fe(II) oxygenase superfamily
  misc_feature (26)..(374): Homolog of NCBI NO: 18402081 NR Description: flavonol synthase family [Arabidopsis thaliana]
  misc_feature (26)..(374): Homolog of NCBI NO: 21593702 NR Description: unknown [Arabidopsis thaliana]
  misc_feature (26)..(289): Homolog of NCBI NO: 30685157 NR Description: flavonol synthase family [Arabidopsis thaliana]
  misc_feature (26)..(371): Homolog of NCBI NO: 18402079 NR Description: oxidoreductase, 2OG-Fe(II) oxygenase family
  misc_feature (29)..(179): Homolog of NCBI NO: 40253917 NR Description: putative Isopenicillin N synthase and related
  misc_feature (244)..(373): Homolog of NCBI NO: 40253917 NR Description: putative Isopenicillin N synthase and related
  misc_feature (67)..(274): Homolog of NCBI NO: 18103924 NR Description: putative oxylase protein [Pinus pinaster]
  misc_feature (52)..(365): Homolog of NCBI NO: 18402992 NR Description: oxidoreductase, 2OG-Fe(II) oxygenase family thaliana] >gi|9294689|dbj|BAB03055.1| gene_id:MHC9.10~similar to
  misc_feature (33)..(365): Homolog of NCBI NO: 34907194 NR Description: putative ethylene-forming enzyme [Oryza sativa
  misc_feature (26)..(340): Homolog of NCBI NO: 15229694 NR Description: oxidoreductase, 2OG-Fe(II) oxygenase family thaliana] >gi|6016680|gb|AAF01507.1|AC009991_3 putative dioxygenase [Arabidopsis thaliana]

SEQ ID NO: 104051 - protein, 349 aa, Arabidopsis thaliana; identical to SEQ ID NO: 37547
  peptide (1)..(349): Ceres Seq. ID no. 13614209
  misc_feature (193)..(294): Pfam Name: 2OG-Fe(II) oxygenase superfamily Pfam Description: 2OG-Fe(II) oxygenase superfamily
  misc_feature (1)..(349): Homolog of NCBI NO: 18402081 NR Description: flavonol synthase family [Arabidopsis thaliana]
  misc_feature (1)..(349): Homolog of NCBI NO: 21593702 NR Description: unknown [Arabidopsis thaliana]
  misc_feature (1)..(264): Homolog of NCBI NO: 30685157 NR Description: flavonol synthase family [Arabidopsis thaliana]
  misc_feature (1)..(346): Homolog of NCBI NO: 18402079 NR Description: oxidoreductase, 2OG-Fe(II) oxygenase family
  misc_feature (4)..(154): Homolog of NCBI NO: 40253917 NR Description: putative Isopenicillin N synthase and related
  misc_feature (219)..(348): Homolog of NCBI NO: 40253917 NR Description: putative Isopenicillin N synthase and related
  misc_feature (42)..(249): Homolog of NCBI NO: 18103924 NR Description: putative oxylase protein [Pinus pinaster]
  misc_feature (27)..(340): Homolog of NCBI NO: 18402992 NR Description: oxidoreductase, 2OG-Fe(II) oxygenase family thaliana] >gi|9294689|dbj|BAB03055.1| gene_id:MHC9.10~similar to
  misc_feature (8)..(340): Homolog of NCBI NO: 34907194 NR Description: putative ethylene-forming enzyme [Oryza sativa
  misc_feature (1)..(315): Homolog of NCBI NO: 15229694 NR Description: oxidoreductase, 2OG-Fe(II) oxygenase family thaliana] >gi|6016680|gb|AAF01507.1|AC009991_3 putative dioxygenase [Arabidopsis thaliana]

SEQ ID NO: 104052 - protein, 270 aa, Arabidopsis thaliana; identical to SEQ ID NO: 37548
  peptide (1)..(270): Ceres Seq. ID no. 13614210
  misc_feature (114)..(215): Pfam Name: 2OG-Fe(II) oxygenase superfamily Pfam Description: 2OG-Fe(II) oxygenase superfamily
  misc_feature (1)..(270): Homolog of NCBI NO: 18402081 NR Description: flavonol synthase family [Arabidopsis thaliana]
  misc_feature (1)..(270): Homolog of NCBI NO: 21593702 NR Description: unknown [Arabidopsis thaliana]
  misc_feature (1)..(185): Homolog of NCBI NO: 30685157 NR Description: flavonol synthase family [Arabidopsis thaliana]
  misc_feature (1)..(267): Homolog of NCBI NO: 18402079 NR Description: oxidoreductase, 2OG-Fe(II) oxygenase family
  misc_feature (1)..(75): Homolog of NCBI NO: 40253917 NR Description: putative Isopenicillin N synthase and related
  misc_feature (140)..(269): Homolog of NCBI NO: 40253917 NR Description: putative Isopenicillin N synthase and related
  misc_feature (1)..(170): Homolog of NCBI NO: 18103924 NR Description: putative oxylase protein [Pinus pinaster]
  misc_feature (1)..(261): Homolog of NCBI NO: 18402992 NR Description: oxidoreductase, 2OG-Fe(II) oxygenase family thaliana] >gi|9294689|dbj|BAB03055.1| gene_id:MHC9.10~similar to
  misc_feature (1)..(261): Homolog of NCBI NO: 34907194 NR Description: putative ethylene-forming enzyme [Oryza sativa
  misc_feature (1)..(236): Homolog of NCBI NO: 15229694 NR Description: oxidoreductase, 2OG-Fe(II) oxygenase family thaliana] >gi|6016680|gb|AAF01507.1|AC009991_3 putative dioxygenase [Arabidopsis thaliana]

SEQ ID NO: 104053 - DNA, 1690 bp, Arabidopsis thaliana
  misc_feature (1)..(1690): Ceres Seq. ID no. 13614213
  misc_feature: MA Experiment ID: 108434 Result: Down-regulated in Transcription
  misc_feature: MA Experiment 108434 PARAMETER Experiment Name: At_Root_Tips_cDNA_P Parameter: Tissue Value: Root Tips
  misc_feature: MA Experiment ID: 108435 Result: Down-regulated in Transcription
  misc_feature: MA Experiment 108435 PARAMETER Experiment Name: At_stm_Mutants_cDNA_P Parameter: Plant Line Value: wt Landsburg vs stm
  misc_feature: MA Experiment 108435 PARAMETER Experiment Name: At_stm_Mutants_cDNA_P Parameter: Tissue Value: Shoot Apical Meristem Region
  misc_feature: MA Experiment ID: 108461 Result: Up-regulated in Transcription
  misc_feature: MA Experiment 108461 PARAMETER Experiment Name: At_Germinating_Seeds_cDNA_P Parameter: Age (day) Value: 1 vs. 0
  misc_feature: MA Experiment 108461 PARAMETER Experiment Name: At_Germinating_Seeds_cDNA_P Parameter: Tissue Value: Germinating Seeds
  misc_feature: MA Experiment ID: 108462 Result: Up-regulated in Transcription
  misc_feature: MA Experiment 108462 PARAMETER Experiment Name: At_Germinating_Seeds_cDNA_P Parameter: Age (day) Value: 2 vs. 0
  misc_feature: MA Experiment 108462 PARAMETER Experiment Name: At_Germinating_Seeds_cDNA_P Parameter: Tissue Value: Germinating Seeds
  misc_feature: MA Experiment ID: 108463 Result: Up-regulated in Transcription
  misc_feature: MA Experiment 108463 PARAMETER Experiment Name: At_Germinating_Seeds_cDNA_P Parameter: Age (day) Value: 3 vs. 0
  misc_feature: MA Experiment 108463 PARAMETER Experiment Name: At_Germinating_Seeds_cDNA_P Parameter: Tissue Value: Germinating Seeds
  misc_feature: MA Experiment ID: 108464 Result: Up-regulated in Transcription
  misc_feature: MA Experiment 108464 PARAMETER Experiment Name: At_Germinating_Seeds_cDNA_P Parameter: Age (day) Value: 4 vs. 0
  misc_feature: MA Experiment 108464 PARAMETER Experiment Name: At_Germinating_Seeds_cDNA_P Parameter: Tissue Value: Germinating Seeds
  misc_feature: MA Experiment ID: 108469 Result: Up-regulated in Transcription
  misc_feature: MA Experiment ID: 108473 Result: Up-regulated in Transcription
  misc_feature: MA Experiment 108473 PARAMETER Experiment Name: At_Drought_Flowers_cDNA_P Parameter: Timepoint (hr) Value: 7 d
  misc_feature: MA Experiment 108473 PARAMETER Experiment Name: At_Drought_Flowers_cDNA_P Parameter: Tissue Value: Flower
  misc_feature: MA Experiment 108473 PARAMETER Experiment Name: At_Drought_Flowers_cDNA_P Parameter: Treatment Value: Drought vs. No Drought
  misc_feature: MA Experiment ID: 108488 Result: Down-regulated in Transcription
  misc_feature: MA Experiment ID: 108501 Result: Down-regulated in Transcription
  misc_feature: MA Experiment 108501 PARAMETER Experiment Name: At_ap2_floral_buds_cDNA_P Parameter: Plant Line Value: ap2 (Ler.)
  misc_feature: MA Experiment 108501 PARAMETER Experiment Name: At_ap2_floral_buds_cDNA_P Parameter: Tissue Value: Closed Flower
  misc_feature: MA Experiment ID: 108561 Result: Up-regulated in Transcription
  misc_feature: MA Experiment 108561 PARAMETER Experiment Name: At_100uM_ABA_cDNA_P Parameter: Timepoint (hr) Value: 6
  misc_feature: MA Experiment 108561 PARAMETER Experiment Name: At_100uM_ABA_cDNA_P Parameter: Tissue Value: Aerial
  misc_feature: MA Experiment 108561 PARAMETER Experiment Name: At_100uM_ABA_cDNA_P Parameter: Treatment Value: 100uM ABA vs. No Treatment
  misc_feature: MA Experiment ID: 108572 Result: Up-regulated in Transcription
  misc_feature: MA Experiment 108572 PARAMETER Experiment Name: At_Drought_cDNA_P Parameter: Timepoint (hr) Value: 1
  misc_feature: MA Experiment 108572 PARAMETER Experiment Name: At_Drought_cDNA_P Parameter: Tissue Value: Aerial
  misc_feature: MA Experiment 108572 PARAMETER Experiment Name: At_Drought_cDNA_P Parameter: Treatment Value: Drought vs. No Drought
  misc_feature: MA Experiment ID: 108573 Result: Up-regulated in Transcription
  misc_feature: MA Experiment 108573 PARAMETER Experiment Name: At_Drought_cDNA_P Parameter: Timepoint (hr) Value: 6
  misc_feature: MA Experiment 108573 PARAMETER Experiment Name: At_Drought_cDNA_P Parameter: Tissue Value: Aerial
  misc_feature: MA Experiment 108573 PARAMETER Experiment Name: At_Drought_cDNA_P Parameter: Treatment Value: Drought vs. No Drought
  misc_feature: MA Experiment ID: 108574 Result: Up-regulated in Transcription
  misc_feature: MA Experiment 108574 PARAMETER Experiment Name: At_Wounding__cDNA_P Parameter: Timepoint (hr) Value: 1
  misc_feature: MA Experiment 108574 PARAMETER Experiment Name: At_Wounding__cDNA_P Parameter: Tissue Value: Aerial
  misc_feature: MA Experiment 108574 PARAMETER Experiment Name: At_Wounding__cDNA_P Parameter: Treatment Value: Wounding vs. No Wounding
  misc_feature: MA Experiment ID: 108585 Result: Up-regulated in Transcription
  misc_feature: MA Experiment 108585 PARAMETER Experiment Name: At_5mM_NaNP_cDNA_P Parameter: Timepoint (hr) Value: 6
  misc_feature: MA Experiment 108585 PARAMETER Experiment Name: At_5mM_NaNP_cDNA_P Parameter: Tissue Value: Aerial
  misc_feature: MA Experiment 108585 PARAMETER Experiment Name: At_5mM_NaNP_cDNA_P Parameter: Treatment Value: null
  misc_feature: MA Experiment ID: 108595 Result: Up-regulated in Transcription
  misc_feature: MA Experiment 108595 PARAMETER Experiment Name: At_Ler-pi_Ovule_cDNA_P Parameter: Plant Line Value: null
  misc_feature: MA Experiment ID: 108605 Result: Up-regulated in Transcription
  misc_feature: MA Experiment 108605 PARAMETER Experiment Name: At_100uM_ABA_cDNA_P Parameter: Timepoint (hr) Value: 6
  misc_feature: MA Experiment 108605 PARAMETER Experiment Name: At_100uM_ABA_cDNA_P Parameter: Tissue Value: Aerial
  misc_feature: MA Experiment 108605 PARAMETER Experiment Name: At_100uM_ABA_cDNA_P Parameter: Treatment Value: 100uM ABA vs. No Treatment
  misc_feature: MA Experiment ID: 108607 Result: Up-regulated in Transcription
  misc_feature: MA Experiment 108607 PARAMETER Experiment Name: At_100uM_ABA_cDNA_P Parameter: Timepoint (hr) Value: 4
  misc_feature: MA Experiment 108607 PARAMETER Experiment Name: At_100uM_ABA_cDNA_P Parameter: Tissue Value: Aerial
  misc_feature: MA Experiment 108607 PARAMETER Experiment Name: At_100uM_ABA_cDNA_P Parameter: Treatment Value: 100uM ABA vs. No Treatment
  misc_feature: MA Experiment ID: 108608 Result: Up-regulated in Transcription
  misc_feature: MA Experiment 108608 PARAMETER Experiment Name: At_100uM_ABA_cDNA_P Parameter: Timepoint (hr) Value: 1
  misc_feature: MA Experiment 108608 PARAMETER Experiment Name: At_100uM_ABA_cDNA_P Parameter: Tissue Value: Aerial
  misc_feature: MA Experiment 108608 PARAMETER Experiment Name: At_100uM_ABA_cDNA_P Parameter: Treatment Value: 100uM ABA vs. No Treatment
  misc_feature: MA Experiment ID: 108609 Result: Up-regulated in Transcription
  misc_feature: MA Experiment 108609 PARAMETER Experiment Name: At_100uM_ABA_cDNA_P Parameter: Timepoint (hr) Value: 24
  misc_feature: MA Experiment 108609 PARAMETER Experiment Name: At_100uM_ABA_cDNA_P Parameter: Tissue Value: Aerial
  misc_feature: MA Experiment 108609 PARAMETER Experiment Name: At_100uM_ABA_cDNA_P Parameter: Treatment Value: 100uM ABA vs. No Treatment
  misc_feature: MA Experiment ID: 108668 Result: Up-regulated in Transcription
  misc_feature: MA Experiment 108668 PARAMETER Experiment Name: At_2mM_SA_cDNA_P Parameter: Plant Line Value: WS
  misc_feature: MA Experiment 108668 PARAMETER Experiment Name: At_2mM_SA_cDNA_P Parameter: Timepoint (hr) Value: 6
  misc_feature: MA Experiment 108668 PARAMETER Experiment Name: At_2mM_SA_cDNA_P Parameter: Treatment Value: 2mM SA vs. No Treatment
  misc_feature: MA Experiment ID: 20000068 Result: Down-regulated in Transcription
  misc_feature: MA Experiment ID: 20000069 Result: Up-regulated in Transcription
  misc_feature: MA Experiment 20000069 PARAMETER Experiment Name: At_100uM_ABA_Mutants_cDNA_P Parameter: Plant Line Value: CS23
  misc_feature: MA Experiment 20000069 PARAMETER Experiment Name: At_100uM_ABA_Mutants_cDNA_P Parameter: Timepoint (hr) Value: 6
  misc_feature: MA Experiment 20000069 PARAMETER Experiment Name: At_100uM_ABA_Mutants_cDNA_P Parameter: Tissue Value: Aerial
  misc_feature: MA Experiment 20000069 PARAMETER Experiment Name: At_100uM_ABA_Mutants_cDNA_P Parameter: Treatment Value: 100uM ABA vs. No Treatment
  misc_feature: MA Experiment ID: 20000070 Result: Up-regulated in Transcription
  misc_feature: MA Experiment 20000070 PARAMETER Experiment Name: At_100uM_ABA_Mutants_cDNA_P Parameter: Plant Line Value: CS24
  misc_feature: MA Experiment 20000070 PARAMETER Experiment Name: At_100uM_ABA_Mutants_cDNA_P Parameter: Timepoint (hr) Value: 6
  misc_feature: MA Experiment 20000070 PARAMETER Experiment Name: At_100uM_ABA_Mutants_cDNA_P Parameter: Tissue Value: Aerial
  misc_feature: MA Experiment 20000070 PARAMETER Experiment Name: At_100uM_ABA_Mutants_cDNA_P Parameter: Treatment Value: 100uM ABA vs. No Treatment
  misc_feature: MA Experiment ID: 20000071 Result: Up-regulated in Transcription
  misc_feature: MA Experiment 20000071 PARAMETER Experiment Name: At_100uM_ABA_Mutants_cDNA_P Parameter: Plant Line Value: CS8104
  misc_feature: MA Experiment 20000071 PARAMETER Experiment Name: At_100uM_ABA_Mutants_cDNA_P Parameter: Timepoint (hr) Value: 6
  misc_feature: MA Experiment 20000071 PARAMETER Experiment Name: At_100uM_ABA_Mutants_cDNA_P Parameter: Tissue Value: Aerial
  misc_feature: MA Experiment 20000071 PARAMETER Experiment Name: At_100uM_ABA_Mutants_cDNA_P Parameter: Treatment Value: 100uM ABA vs. No Treatment
  misc_feature: MA Experiment ID: 20000072 Result: Up-regulated in Transcription
  misc_feature: MA Experiment 20000072 PARAMETER Experiment Name: At_100uM_ABA_Mutants_cDNA_P Parameter: Plant Line Value: CS8105
  misc_feature: MA Experiment 20000072 PARAMETER Experiment Name: At_100uM_ABA_Mutants_cDNA_P Parameter: Timepoint (hr) Value: 6
  misc_feature: MA Experiment 20000072 PARAMETER Experiment Name: At_100uM_ABA_Mutants_cDNA_P Parameter: Tissue Value: Aerial
  misc_feature: MA Experiment 20000072 PARAMETER Experiment Name: At_100uM_ABA_Mutants_cDNA_P Parameter: Treatment Value: 100uM ABA vs. No Treatment
  misc_feature: MA Experiment ID: 20000086 Result: Up-regulated in Transcription
  misc_feature: MA Experiment 20000086 PARAMETER Experiment Name: At_100uM_ABA_Mutants_cDNA_P Parameter: Plant Line Value: CS22
  misc_feature: MA Experiment 20000086 PARAMETER Experiment Name: At_100uM_ABA_Mutants_cDNA_P Parameter: Timepoint (hr) Value: 6
  misc_feature: MA Experiment 20000086 PARAMETER Experiment Name: At_100uM_ABA_Mutants_cDNA_P Parameter: Tissue Value: Aerial
  misc_feature: MA Experiment 20000086 PARAMETER Experiment Name: At_100uM_ABA_Mutants_cDNA_P Parameter: Treatment Value: 100uM ABA vs. No Treatment
  misc_feature: MA Experiment ID: 20000087 Result: Up-regulated in Transcription
  misc_feature: MA Experiment 20000087 PARAMETER Experiment Name: At_100uM_ABA_Mutants_cDNA_P Parameter: Plant Line Value: WS
  misc_feature: MA Experiment 20000087 PARAMETER Experiment Name: At_100uM_ABA_Mutants_cDNA_P Parameter: Timepoint (hr) Value: 6
  misc_feature: MA Experiment 20000087 PARAMETER Experiment Name: At_100uM_ABA_Mutants_cDNA_P Parameter: Tissue Value: Aerial
  misc_feature: MA Experiment 20000087 PARAMETER Experiment Name: At_100uM_ABA_Mutants_cDNA_P Parameter: Treatment Value: 100uM ABA vs. No Treatment
  misc_feature: MA Experiment ID: 20000088 Result: Up-regulated in Transcription
  misc_feature: MA Experiment 20000088 PARAMETER Experiment Name: At_100uM_ABA_Mutants_cDNA_P Parameter: Plant Line Value: Landsberg
  misc_feature: MA Experiment 20000088 PARAMETER Experiment Name: At_100uM_ABA_Mutants_cDNA_P Parameter: Timepoint (hr) Value: 6
  misc_feature: MA Experiment 20000088 PARAMETER Experiment Name: At_100uM_ABA_Mutants_cDNA_P Parameter: Tissue Value: Aerial
  misc_feature: MA Experiment 20000088 PARAMETER Experiment Name: At_100uM_ABA_Mutants_cDNA_P Parameter: Treatment Value: 100uM ABA vs. No Treatment
  misc_feature: MA Experiment ID: 20000089 Result: Up-regulated in Transcription
  misc_feature: MA Experiment ID: 20000113 Result: Up-regulated in Transcription
  misc_feature: MA Experiment 20000113 PARAMETER Experiment Name: At_42deg_Heat_cDNA_P Parameter: Temperature (deg C) Value: 42 vs. 22
  misc_feature: MA Experiment 20000113 PARAMETER Experiment Name: At_42deg_Heat_cDNA_P Parameter: Timepoint (hr) Value: 8
  misc_feature: MA Experiment 20000113 PARAMETER Experiment Name: At_42deg_Heat_cDNA_P Parameter: Tissue Value: Aerial
  misc_feature: MA Experiment ID: 20000117 Result: Up-regulated in Transcription
  misc_feature: MA Experiment 20000117 PARAMETER Experiment Name: At_100uM_ABA_Mutants_cDNA_P Parameter: Plant Line Value: Columbia
  misc_feature: MA Experiment 20000117 PARAMETER Experiment Name: At_100uM_ABA_Mutants_cDNA_P Parameter: Timepoint (hr) Value: 6
  misc_feature: MA Experiment 20000117 PARAMETER Experiment Name: At_100uM_ABA_Mutants_cDNA_P Parameter: Tissue Value: Aerial
  misc_feature: MA Experiment 20000117 PARAMETER Experiment Name: At_100uM_ABA_Mutants_cDNA_P Parameter: Treatment Value: 100uM ABA vs. No Treatment
  misc_feature: MA Experiment ID: 20000166 Result: Up-regulated in Transcription
  misc_feature: MA Experiment 20000166 PARAMETER Experiment Name: At_100uM_ABA_P Parameter: Age (day) Value: 14
  misc_feature: MA Experiment 20000166 PARAMETER Experiment Name: At_100uM_ABA_P Parameter: Organism Value: A. thaliana
  misc_feature: MA Experiment 20000166 PARAMETER Experiment Name: At_100uM_ABA_P Parameter: Plant Line Value: WS
  misc_feature: MA Experiment 20000166 PARAMETER Experiment Name: At_100uM_ABA_P Parameter: Timepoint (hr) Value: 1
  misc_feature: MA Experiment 20000166 PARAMETER Experiment Name: At_100uM_ABA_P Parameter: Tissue Value: Aerial
  misc_feature: MA Experiment 20000166 PARAMETER Experiment Name: At_100uM_ABA_P Parameter: Treatment Value: 100uM ABA vs. No Treatment
  misc_feature: MA Experiment ID: 20000169 Result: Up-regulated in Transcription
  misc_feature: MA Experiment 20000169 PARAMETER Experiment Name: At_100uM_ABA_P Parameter: Age (day) Value: 14
  misc_feature: MA Experiment 20000169 PARAMETER Experiment Name: At_100uM_ABA_P Parameter: Organism Value: A. thaliana
  misc_feature: MA Experiment 20000169 PARAMETER Experiment Name: At_100uM_ABA_P Parameter: Plant Line Value: WS
  misc_feature: MA Experiment 20000169 PARAMETER Experiment Name: At_100uM_ABA_P Parameter: Timepoint (hr) Value: 6
  misc_feature: MA Experiment 20000169 PARAMETER Experiment Name: At_100uM_ABA_P Parameter: Tissue Value: Aerial
  misc_feature: MA Experiment 20000169 PARAMETER Experiment Name: At_100uM_ABA_P Parameter: Treatment Value: 100uM ABA vs. No Treatment
  misc_feature: MA Experiment ID: 20000179 Result: Up-regulated in Transcription
  misc_feature: MA Experiment 20000179 PARAMETER Experiment Name: At_Germinating_Seeds_P Parameter: Age (hr) Value: 6 vs. 0
  misc_feature: MA Experiment 20000179 PARAMETER Experiment Name: At_Germinating_Seeds_P Parameter: Tissue Value: Germinating Seeds
  misc_feature: MA Experiment ID: 20000180 Result: Up-regulated in Transcription
  misc_feature: MA Experiment 20000180 PARAMETER Experiment Name: At_Germinating_Seeds_P Parameter: Age (hr) Value: 24 vs. 0
  misc_feature: MA Experiment 20000180 PARAMETER Experiment Name: At_Germinating_Seeds_P Parameter: Tissue Value: Germinating Seeds
  misc_feature: MA Experiment ID: 20000182 Result: Up-regulated in Transcription
  misc_feature: MA Experiment 20000182 PARAMETER Experiment Name: At_2mM_SA_P Parameter: Age (day) Value: 14
  misc_feature: MA Experiment 20000182 PARAMETER Experiment Name: At_2mM_SA_P Parameter: Organism Value: A. thaliana
  misc_feature: MA Experiment 20000182 PARAMETER Experiment Name: At_2mM_SA_P Parameter: Plant Line Value: WS
  misc_feature: MA Experiment 20000182 PARAMETER Experiment Name: At_2mM_SA_P Parameter: Timepoint (hr) Value: 6
  misc_feature: MA Experiment 20000182 PARAMETER Experiment Name: At_2mM_SA_P Parameter: Tissue Value: Aerial
  misc_feature: MA Experiment 20000182 PARAMETER Experiment Name: At_2mM_SA_P Parameter: Treatment Value: 2mM SA vs. No Treatment
  misc_feature: MA Experiment ID: 20000213 Result: Down-regulated in Transcription
  misc_feature: MA Experiment 20000213 PARAMETER Experiment Name: At_4deg_Cold_P Parameter: Timepoint (hr) Value: 2
  misc_feature: MA Experiment ID: 20000234 Result: Down-regulated in Transcription
  misc_feature: MA Experiment 20000234 PARAMETER Experiment Name: At_Siliques_P Parameter: Age (day) Value: 21
  misc_feature: MA Experiment 20000234 PARAMETER Experiment Name: At_Siliques_P Parameter: Organism Value: A. thaliana
  misc_feature: MA Experiment 20000234 PARAMETER Experiment Name: At_Siliques_P Parameter: Plant Line Value: WS
  misc_feature: MA Experiment 20000234 PARAMETER Experiment Name: At_Siliques_P Parameter: Tissue Value: Less Than 5mm Siliques vs. Whole Plant
  misc_feature: MA Experiment ID: 20000235 Result: Down-regulated in Transcription
  misc_feature: MA Experiment 20000235 PARAMETER Experiment Name: At_Siliques_P Parameter: Age (day) Value: 21
  misc_feature: MA Experiment 20000235 PARAMETER Experiment Name: At_Siliques_P Parameter: Organism Value: A. thaliana
  misc_feature: MA Experiment 20000235 PARAMETER Experiment Name: At_Siliques_P Parameter: Plant Line Value: WS
  misc_feature: MA Experiment 20000235 PARAMETER Experiment Name: At_Siliques_P Parameter: Tissue Value: 5-10mm Siliques vs. Whole Plant
  misc_feature: MA Experiment ID: 20000264 Result: Down-regulated in Transcription
  misc_feature: MA Experiment 20000264 PARAMETER Experiment Name: At_Open_Flower_P Parameter: Age (day) Value: 21
  misc_feature: MA Experiment 20000264 PARAMETER Experiment Name: At_Open_Flower_P Parameter: Plant Line Value: WS
  misc_feature: MA Experiment 20000264 PARAMETER Experiment Name: At_Open_Flower_P Parameter: Tissue Value: Open Flower vs. Whole Plant
  misc_feature: MA Experiment ID: 20000265 Result: Down-regulated in Transcription
  misc_feature: MA Experiment 20000265 PARAMETER Experiment Name: At_Open_Flower_P Parameter: Age (day) Value: 21
  misc_feature: MA Experiment 20000265 PARAMETER Experiment Name: At_Open_Flower_P Parameter: Plant Line Value: WS
  misc_feature: MA Experiment 20000265 PARAMETER Experiment Name: At_Open_Flower_P Parameter: Tissue Value: Closed Flower vs. Whole Plant
  misc_feature: MA Experiment ID: 20000267 Result: Up-regulated in Transcription
  misc_feature: MA Experiment 20000267 PARAMETER Experiment Name: At_Drought_P Parameter: Age (day) Value: 7
  misc_feature: MA Experiment 20000267 PARAMETER Experiment Name: At_Drought_P Parameter: Organism Value: A. thaliana
  misc_feature: MA Experiment 20000267 PARAMETER Experiment Name: At_Drought_P Parameter: Plant Line Value: WS
  misc_feature: MA Experiment 20000267 PARAMETER Experiment Name: At_Drought_P Parameter: Timepoint (hr) Value: 6
  misc_feature: MA Experiment 20000267 PARAMETER Experiment Name: At_Drought_P Parameter: Tissue Value: Whole Plant
  misc_feature: MA Experiment 20000267 PARAMETER Experiment Name: At_Drought_P Parameter: Treatment Value: Drought vs. No Drought
  misc_feature: MA Experiment ID: 20000268 Result: Up-regulated in Transcription
  misc_feature: MA Experiment 20000268 PARAMETER Experiment Name: At_100mM_NaCl__P Parameter: Age (day) Value: 14
  misc_feature: MA Experiment 20000268 PARAMETER Experiment Name: At_100mM_NaCl__P Parameter: Organism Value: A. thaliana
  misc_feature: MA Experiment 20000268 PARAMETER Experiment Name: At_100mM_NaCl__P Parameter: Plant Line Value: WS
  misc_feature: MA Experiment 20000268 PARAMETER Experiment Name: At_100mM_NaCl__P Parameter: Timepoint (hr) Value: 6
  misc_feature: MA Experiment 20000268 PARAMETER Experiment Name: At_100mM_NaCl__P Parameter: Tissue Value: Whole Plant
  misc_feature: MA Experiment 20000268 PARAMETER Experiment Name: At_100mM_NaCl__P Parameter: Treatment Value: 100mM NaCl vs. No Treatment
  misc_feature: MA Experiment ID: 20000269 Result: Down-regulated in Transcription
  misc_feature: MA Experiment 20000269 PARAMETER Experiment Name: At_1mM_KNO3_L-vs-H_Roots_P Parameter: Age (day) Value: 7,10,12
  misc_feature: MA Experiment 20000269 PARAMETER Experiment Name: At_1mM_KNO3_L-vs-H_Roots_P Parameter: Organism Value: A. thaliana
  misc_feature: MA Experiment 20000269 PARAMETER Experiment Name: At_1mM_KNO3_L-vs-H_Roots_P Parameter: Plant Line Value: WS
  misc_feature: MA Experiment 20000269 PARAMETER Experiment Name: At_1mM_KNO3_L-vs-H_Roots_P Parameter: Timepoint (day) Value: 7,10,12
  misc_feature: MA Experiment 20000269 PARAMETER Experiment Name: At_1mM_KNO3_L-vs-H_Roots_P Parameter: Tissue Value: Roots
  misc_feature: MA Experiment 20000269 PARAMETER Experiment Name: At_1mM_KNO3_L-vs-H_Roots_P Parameter: Treatment Value: 1mM KNO3 vs. 50mM KNO3
  misc_feature: MA Experiment ID: 20000286 Result: Down-regulated in Transcription
  misc_feature: MA Experiment 20000286 PARAMETER Experiment Name: At_Open_Flower_P Parameter: Age (day) Value: 21
  misc_feature: MA Experiment 20000286 PARAMETER Experiment Name: At_Open_Flower_P Parameter: Plant Line Value: WS
  misc_feature: MA Experiment 20000286 PARAMETER Experiment Name: At_Open_Flower_P Parameter: Tissue Value: Half Open vs. Whole Plant
  misc_feature: MA Experiment ID: 20000436 Result: Up-regulated in Transcription
  misc_feature: MA Experiment 20000436 PARAMETER Experiment Name: At_Drought_P Parameter: Age (day) Value: 7
  misc_feature: MA Experiment 20000436 PARAMETER Experiment Name: At_Drought_P Parameter: Organism Value: A. thaliana
  misc_feature: MA Experiment 20000436 PARAMETER Experiment Name: At_Drought_P Parameter: Plant Line Value: WS
  misc_feature: MA Experiment 20000436 PARAMETER Experiment Name: At_Drought_P Parameter: Timepoint (hr) Value: 12
  misc_feature: MA Experiment 20000436 PARAMETER Experiment Name: At_Drought_P Parameter: Tissue Value: Whole Plant
  misc_feature: MA Experiment 20000436 PARAMETER Experiment Name: At_Drought_P Parameter: Treatment Value: Drought vs. No Drought
  misc_feature: MA Experiment ID: 20000437 Result: Up-regulated in Transcription
  misc_feature: MA Experiment 20000437 PARAMETER Experiment Name: At_Drought_P Parameter: Age (day) Value: 8
  misc_feature: MA Experiment 20000437 PARAMETER Experiment Name: At_Drought_P Parameter: Organism Value: A. thaliana
  misc_feature: MA Experiment 20000437 PARAMETER Experiment Name: At_Drought_P Parameter: Plant Line Value: WS
  misc_feature: MA Experiment 20000437 PARAMETER Experiment Name: At_Drought_P Parameter: Timepoint (hr) Value: 24
  misc_feature: MA Experiment 20000437 PARAMETER Experiment Name: At_Drought_P Parameter: Tissue Value: Whole Plant
  misc_feature: MA Experiment 20000437 PARAMETER Experiment Name: At_Drought_P Parameter: Treatment Value: Drought vs. No Drought
  misc_feature: MA Experiment ID: 20000453 Result: Up-regulated in Transcription
  misc_feature: MA Experiment 20000453 PARAMETER Experiment Name: At_100uM_ABA_P Parameter: Age (day) Value: 15
  misc_feature: MA Experiment 20000453 PARAMETER Experiment Name: At_100uM_ABA_P Parameter: Organism Value: A. thaliana
  misc_feature: MA Experiment 20000453 PARAMETER Experiment Name: At_100uM_ABA_P Parameter: Plant Line Value: WS
  misc_feature: MA Experiment 20000453 PARAMETER Experiment Name: At_100uM_ABA_P Parameter: Timepoint (hr) Value: 24
  misc_feature: MA Experiment 20000453 PARAMETER Experiment Name: At_100uM_ABA_P Parameter: Tissue Value: Aerial
  misc_feature: MA Experiment 20000453 PARAMETER Experiment Name: At_100uM_ABA_P Parameter: Treatment Value: 100uM ABA vs. No Treatment
  misc_feature: MA Experiment ID: 20000460 Result: Up-regulated in Transcription
  misc_feature: MA Experiment 20000460 PARAMETER Experiment Name: At_10percent_PEG_P Parameter: Age (day) Value: 12
  misc_feature: MA Experiment 20000460 PARAMETER Experiment Name: At_10percent_PEG_P Parameter: Organism Value: A. thaliana
  misc_feature: MA Experiment 20000460 PARAMETER Experiment Name: At_10percent_PEG_P Parameter: Plant Line Value: WS
  misc_feature: MA Experiment 20000460 PARAMETER Experiment Name: At_10percent_PEG_P Parameter: Timepoint (day) Value: 12
  misc_feature: MA Experiment 20000460 PARAMETER Experiment Name: At_10percent_PEG_P Parameter: Tissue Value: Whole Plant
  misc_feature: MA Experiment 20000460 PARAMETER Experiment Name: At_10percent_PEG_P Parameter: Treatment Value: 10percent PEG vs. No Treatment
  misc_feature: MA Experiment ID: 20001247 Result: Up-regulated in Transcription
  misc_feature: MA Experiment 20001247 PARAMETER Experiment Name: At_Far-red-induction_P Parameter: Age (day) Value: 7
  misc_feature: MA Experiment 20001247 PARAMETER Experiment Name: At_Far-red-induction_P Parameter: Light Value: Far-red vs. White
  misc_feature: MA Experiment 20001247 PARAMETER Experiment Name: At_Far-red-induction_P Parameter: Organism Value: A. thaliana
  misc_feature: MA Experiment 20001247 PARAMETER Experiment Name: At_Far-red-induction_P Parameter: Plant Line Value: Columbia
  misc_feature: MA Experiment 20001247 PARAMETER Experiment Name: At_Far-red-induction_P Parameter: Timepoint (hr) Value: 1
  misc_feature: MA Experiment 20001247 PARAMETER Experiment Name: At_Far-red-induction_P Parameter: Tissue Value: Whole Plant
  misc_feature: MA Experiment ID: 20001248 Result: Up-regulated in Transcription
  misc_feature: MA Experiment 20001248 PARAMETER Experiment Name: At_Far-red-induction_P Parameter: Age (day) Value: 7
  misc_feature: MA Experiment 20001248 PARAMETER Experiment Name: At_Far-red-induction_P Parameter: Light Value: Far-red vs. White
  misc_feature: MA Experiment 20001248 PARAMETER Experiment Name: At_Far-red-induction_P Parameter: Organism Value: A. thaliana
  misc_feature: MA Experiment 20001248 PARAMETER Experiment Name: At_Far-red-induction_P Parameter: Plant Line Value: Columbia
  misc_feature: MA Experiment 20001248 PARAMETER Experiment Name: At_Far-red-induction_P Parameter: Timepoint (hr) Value: 4
  misc_feature: MA Experiment 20001248 PARAMETER Experiment Name: At_Far-red-induction_P Parameter: Tissue Value: Whole Plant
  misc_feature: MA Experiment ID: 20001450 Result: Up-regulated in Transcription
  misc_feature: MA Experiment 20001450 PARAMETER Experiment Name: At_Far-red-induction_P Parameter: Age (day) Value: 7
  misc_feature: MA Experiment 20001450 PARAMETER Experiment Name: At_Far-red-induction_P Parameter: Light Value: Far-red vs. White
  misc_feature: MA Experiment 20001450 PARAMETER Experiment Name: At_Far-red-induction_P Parameter: Organism Value: A. thaliana
  misc_feature: MA Experiment 20001450 PARAMETER Experiment Name: At_Far-red-induction_P Parameter: Plant Line Value: Columbia
  misc_feature: MA Experiment 20001450 PARAMETER Experiment Name: At_Far-red-induction_P Parameter: Timepoint (hr) Value: 8
  misc_feature: MA Experiment 20001450 PARAMETER Experiment Name: At_Far-red-induction_P Parameter: Tissue Value: Whole Plant
  misc_feature: MA Experiment ID: 20001451 Result: Up-regulated in Transcription
  misc_feature: MA Experiment 20001451 PARAMETER Experiment Name: At_Far-red-induction_P Parameter: Age (day) Value: 7
  misc_feature: MA Experiment 20001451 PARAMETER Experiment Name: At_Far-red-induction_P Parameter: Light Value: Far-red vs. White
  misc_feature: MA Experiment 20001451 PARAMETER Experiment Name: At_Far-red-induction_P Parameter: Organism Value: A. thaliana
  misc_feature: MA Experiment 20001451 PARAMETER Experiment Name: At_Far-red-induction_P Parameter: Plant Line Value: Columbia
  misc_feature: MA Experiment 20001451 PARAMETER Experiment Name: At_Far-red-induction_P Parameter: Timepoint (hr) Value: 24
  misc_feature: MA Experiment 20001451 PARAMETER Experiment Name: At_Far-red-induction_P Parameter: Tissue Value: Whole Plant
  misc_feature: MA Experiment ID: 20001554 Result: Up-regulated in Transcription
  misc_feature: MA Experiment 20001554 PARAMETER Experiment Name: At_Drought_Soil_Dry_P Parameter: Age (day) Value: 21
  misc_feature: MA Experiment 20001554 PARAMETER Experiment Name: At_Drought_Soil_Dry_P Parameter: Organism Value: A. thaliana
  misc_feature: MA Experiment 20001554 PARAMETER Experiment Name: At_Drought_Soil_Dry_P Parameter: Plant Line Value: WS
  misc_feature: MA Experiment 20001554 PARAMETER Experiment Name: At_Drought_Soil_Dry_P Parameter: Post Timepoint (hr) Value: None
  misc_feature: MA Experiment 20001554 PARAMETER Experiment Name: At_Drought_Soil_Dry_P Parameter: Post-Treatment Value: None
  misc_feature: MA Experiment 20001554 PARAMETER Experiment Name: At_Drought_Soil_Dry_P Parameter: Timepoint (day) Value: 7
  misc_feature: MA Experiment 20001554 PARAMETER Experiment Name: At_Drought_Soil_Dry_P Parameter: Treatment Value: Drought vs. No Drought
  misc_feature: MA Experiment ID: 20001555 Result: Up-regulated in Transcription
  misc_feature: MA Experiment 20001555 PARAMETER Experiment Name: At_Drought_Soil_Dry_P Parameter: Age (day) Value: 24
  misc_feature: MA Experiment 20001555 PARAMETER Experiment Name: At_Drought_Soil_Dry_P Parameter: Organism Value: A. thaliana
  misc_feature: MA Experiment 20001555 PARAMETER Experiment Name: At_Drought_Soil_Dry_P Parameter: Plant Line Value: WS
  misc_feature: MA Experiment 20001555 PARAMETER Experiment Name: At_Drought_Soil_Dry_P Parameter: Post Timepoint (hr) Value: None
  misc_feature: MA Experiment 20001555 PARAMETER Experiment Name: At_Drought_Soil_Dry_P Parameter: Post-Treatment Value: None
  misc_feature: MA Experiment 20001555 PARAMETER Experiment Name: At_Drought_Soil_Dry_P Parameter: Timepoint (day) Value: 10
  misc_feature: MA Experiment 20001555 PARAMETER Experiment Name: At_Drought_Soil_Dry_P Parameter: Treatment Value: Drought vs. No Drought
  misc_feature: MA Experiment ID: 20001559 Result: Up-regulated in Transcription
  misc_feature: MA Experiment 20001559 PARAMETER Experiment Name: At_Drought_Soil_Dry_P Parameter: Age (day) Value: 28
  misc_feature: MA Experiment 20001559 PARAMETER Experiment Name: At_Drought_Soil_Dry_P Parameter: Organism Value: A. thaliana
  misc_feature: MA Experiment 20001559 PARAMETER Experiment Name: At_Drought_Soil_Dry_P Parameter: Plant Line Value: WS
  misc_feature: MA Experiment 20001559 PARAMETER Experiment Name: At_Drought_Soil_Dry_P Parameter: Post Timepoint (hr) Value: 29
  misc_feature: MA Experiment 20001559 PARAMETER Experiment Name: At_Drought_Soil_Dry_P Parameter: Post-Treatment Value: Re-Water vs. No Drought
  misc_feature: MA Experiment 20001559 PARAMETER Experiment Name: At_Drought_Soil_Dry_P Parameter: Timepoint (day) Value: 14
  misc_feature: MA Experiment 20001559 PARAMETER Experiment Name: At_Drought_Soil_Dry_P Parameter: Treatment Value: Drought vs. No Drought
  misc_feature: MA Experiment ID: 20001904 Result: Up-regulated in Transcription
  misc_feature: MA Experiment 20001904 PARAMETER Experiment Name: At_Drought_Reproduction_P Parameter: Age (day) Value: 37
  misc_feature: MA Experiment 20001904 PARAMETER Experiment Name: At_Drought_Reproduction_P Parameter: Organism Value: A. thaliana
  misc_feature: MA Experiment 20001904 PARAMETER Experiment Name: At_Drought_Reproduction_P Parameter: Plant Line Value: WS
  misc_feature: MA Experiment 20001904 PARAMETER Experiment Name: At_Drought_Reproduction_P Parameter: Timepoint (day) Value: 7
  misc_feature: MA Experiment 20001904 PARAMETER Experiment Name: At_Drought_Reproduction_P Parameter: Tissue Value: Rosettes
  misc_feature: MA Experiment 20001904 PARAMETER Experiment Name: At_Drought_Reproduction_P Parameter: Treatment Value: Drought vs. No Drought
  misc_feature: MA Experiment ID: 20001905 Result: Up-regulated in Transcription
  misc_feature: MA Experiment 20001905 PARAMETER Experiment Name: At_Drought_Reproduction_P Parameter: Age (day) Value: 40
  misc_feature: MA Experiment 20001905 PARAMETER Experiment Name: At_Drought_Reproduction_P Parameter: Organism Value: A. thaliana
  misc_feature: MA Experiment 20001905 PARAMETER Experiment Name: At_Drought_Reproduction_P Parameter: Plant Line Value: WS
  misc_feature: MA Experiment 20001905 PARAMETER Experiment Name: At_Drought_Reproduction_P Parameter: Timepoint (day) Value: 10
  misc_feature: MA Experiment 20001905 PARAMETER Experiment Name: At_Drought_Reproduction_P Parameter: Tissue Value: Rosettes
  misc_feature: MA Experiment 20001905 PARAMETER Experiment Name: At_Drought_Reproduction_P Parameter: Treatment Value: Drought vs. No Drought
  misc_feature: MA Experiment ID: 20001906 Result: Up-regulated in Transcription
  misc_feature: MA Experiment 20001906 PARAMETER Experiment Name: At_Drought_Reproduction_P Parameter: Age (day) Value: 35
  misc_feature: MA Experiment 20001906 PARAMETER Experiment Name: At_Drought_Reproduction_P Parameter: Organism Value: A. thaliana
  misc_feature: MA Experiment 20001906 PARAMETER Experiment Name: At_Drought_Reproduction_P Parameter: Plant Line Value: WS
  misc_feature: MA Experiment 20001906 PARAMETER Experiment Name: At_Drought_Reproduction_P Parameter: Timepoint (day) Value: 5
  misc_feature: MA Experiment 20001906 PARAMETER Experiment Name: At_Drought_Reproduction_P Parameter: Tissue Value: Siliques
  misc_feature: MA Experiment 20001906 PARAMETER Experiment Name: At_Drought_Reproduction_P Parameter: Treatment Value: Drought vs. No Drought
  misc_feature: MA Experiment ID: 20001907 Result: Up-regulated in Transcription
  misc_feature: MA Experiment 20001907 PARAMETER Experiment Name: At_Drought_Reproduction_P Parameter: Age (day) Value: 37
  misc_feature: MA Experiment 20001907 PARAMETER Experiment Name: At_Drought_Reproduction_P Parameter: Organism Value: A. thaliana
  misc_feature: MA Experiment 20001907 PARAMETER Experiment Name: At_Drought_Reproduction_P Parameter: Plant Line Value: WS
  misc_feature: MA Experiment 20001907 PARAMETER Experiment Name: At_Drought_Reproduction_P Parameter: Timepoint (day) Value: 7
  misc_feature: MA Experiment 20001907 PARAMETER Experiment Name: At_Drought_Reproduction_P Parameter: Tissue Value: Siliques
  misc_feature: MA Experiment 20001907 PARAMETER Experiment Name: At_Drought_Reproduction_P Parameter: Treatment Value: Drought vs. No Drought
  misc_feature: MA Experiment ID: 20001908 Result: Up-regulated in Transcription
  misc_feature: MA Experiment 20001908 PARAMETER Experiment Name: At_Drought_Reproduction_P Parameter: Age (day) Value: 40
  misc_feature: MA Experiment 20001908 PARAMETER Experiment Name: At_Drought_Reproduction_P Parameter: Organism Value: A. thaliana
  misc_feature: MA Experiment 20001908 PARAMETER Experiment Name: At_Drought_Reproduction_P Parameter: Plant Line Value: WS
  misc_feature: MA Experiment 20001908 PARAMETER Experiment Name: At_Drought_Reproduction_P Parameter: Timepoint (day) Value: 10
  misc_feature: MA Experiment 20001908 PARAMETER Experiment Name: At_Drought_Reproduction_P Parameter: Tissue Value: Siliques
  misc_feature: MA Experiment 20001908 PARAMETER Experiment Name: At_Drought_Reproduction_P Parameter: Treatment Value: Drought vs. No Drought
  misc_feature: MA Experiment ID: 20001910 Result: Up-regulated in Transcription
  misc_feature: MA Experiment 20001910 PARAMETER Experiment Name: At_Drought_Reproduction_P Parameter: Age (day) Value: 37
  misc_feature: MA Experiment 20001910 PARAMETER Experiment Name: At_Drought_Reproduction_P Parameter: Organism Value: A. thaliana
  misc_feature: MA Experiment 20001910 PARAMETER Experiment Name: At_Drought_Reproduction_P Parameter: Plant Line Value: WS
  misc_feature: MA Experiment 20001910 PARAMETER Experiment Name: At_Drought_Reproduction_P Parameter: Timepoint (day) Value: 7
  misc_feature: MA Experiment 20001910 PARAMETER Experiment Name: At_Drought_Reproduction_P Parameter: Tissue Value: Flowers
  misc_feature: MA Experiment 20001910 PARAMETER Experiment Name: At_Drought_Reproduction_P Parameter: Treatment Value: Drought vs. No Drought
  misc_feature: MA Experiment ID: 20001911 Result: Up-regulated in Transcription
  misc_feature: MA Experiment 20001911 PARAMETER Experiment Name: At_Drought_Reproduction_P Parameter: Age (day) Value: 40
  misc_feature: MA Experiment 20001911 PARAMETER Experiment Name: At_Drought_Reproduction_P Parameter: Organism Value: A. thaliana
  misc_feature: MA Experiment 20001911 PARAMETER Experiment Name: At_Drought_Reproduction_P Parameter: Plant Line Value: WS
  misc_feature: MA Experiment 20001911 PARAMETER Experiment Name: At_Drought_Reproduction_P Parameter: Timepoint (day) Value: 10
  misc_feature: MA Experiment 20001911 PARAMETER Experiment Name: At_Drought_Reproduction_P Parameter: Tissue Value: Flowers
  misc_feature: MA Experiment 20001911 PARAMETER Experiment Name: At_Drought_Reproduction_P Parameter: Treatment Value: Drought vs. No Drought
aaaagatcgacgaacataaaaacaaaaacatataatttgggtttttagagttcgaaacttgaaatctttttttttttggttgctgaggaatcgaagtagaagagtataaatgggtgttagagagaaagatccgttagcccagttgagtttgccaccaggttttagattttatccgacagatgaagagcttcttgttcagtatctatgtcggaaagttgcaggctatcatttctctctccaggtcatcggagacatcgatctctacaagttcgatccttgggatttgccaagtaaggctttgtttggagagaaggaatggtatttctttagcccaagagatcggaaatatccgaacgggtcaagacccaatagagtagccgggtcgggttattggaaagcaacgggtactgacaaaattatcacggcggatggtcgtcgtgtcgggattaaaaaagctctggtcttttacgccggaaaagctcccaaaggcactaaaaccaactggattatgcacgagtatcgcttaatagaacattctcgtagccatggaagctccaagttggatgattgggtgttgtgtcgaatttacaagaaaacatctggatctcagagacaagctgttactcctgttcaagcttgtcgtgaagagcatagcacgaatgggtcgtcatcgtcttcttcatcacagcttgacgacgttcttgattcgttcccggagataaaagaccagtcttttaatcttcctcggatgaattcgctcaggacgattcttaacgggaactttgattgggctagcttggcaggtcttaatccaattccagagctagctccgaccaatggattaccgagttacggtggttacgatgcgtttcgagcggcggaaggtgaggcggagagtgggcatgtgaatcggcagcagaactcgagcgggttgactcagagtttcgggtacagctcgagtgggtttggtgtttcgggtcaaacattcgagtttaggcaatgagagagatgtgaagttactgatgggtgaaaaaagtaaaaaaaaaacttggagatagtagagtggcaattgatgtaaataatagggatttatatggggcttttaccgattcggtgaggcttaggattccacaaaggaaaaaggctcgactggggactagtttgatccaacttgacggcccacaaatgtgtaatgtttctcaacggagagaaaaataaatggttaccaatatttttacaccggttatgtgttgataccatttgcacaaaacggtttaagttctgaattgaataacttaacacccaaaatttggtaaaaagcttaatacaaaaagttcaaaggcattttcgcttactgcgacactcggagttgcagagtactctacgtaacagactctgttcatagagtttgcggcaccggtggtgggacattcttgcggacacagtatgtacttttggaagcatcgttcctaagggttgctgcagtaaactccttgtgacttggctcgcaagaaacataacatggccgcaagaaaaaacagcattaacgaagaggtgtttgagatcttcatgtctagtttattcttcctgttttattatgtgtcgactggtgtcaaaagaaacgtgttgattgtgaatttgtagacgccactctgtaaatttatttaaaataaactattttacttcacgt

SEQ ID NO: 104054 - protein, 297 aa, Arabidopsis thaliana; identical to SEQ ID NO: 24428
  peptide (1)..(297): Ceres Seq. ID no. 13614214
  misc_feature (14)..(140): Pfam Name: No apical meristem (NAM) protein Pfam Description: No apical meristem (NAM) protein
  misc_feature (1)..(297): Homolog of NCBI NO: 18416983 NR Description: No apical meristem (NAM) protein family thaliana] >gi|15982729|gb|AAL09817.1| unknown protein thaliana] >gi|16226943|gb|AAL16305.1|AF428375_1
  misc_feature (62)..(297): Homolog of NCBI NO: 7486254 NR Description: hypothetical protein F27G19.10 - Arabidopsis >gi|4972066|emb|CAB43873.1| putative protein [Arabidopsis >gi|7269595|emb|CAB81391.1| putative protein [Arabidopsis
  misc_feature (1)..(62): Homolog of NCBI NO: 7486254 NR Description: hypothetical protein F27G19.10 - Arabidopsis >gi|4972066|emb|CAB43873.1| putative protein [Arabidopsis >gi|7269595|emb|CAB81391.1| putative protein [Arabidopsis
  misc_feature (6)..(297): Homolog of NCBI NO: 23397295 NR Description: unknown protein [Arabidopsis thaliana]
  misc_feature (1)..(297): Homolog of NCBI NO: 31322582 NR Description: NAC-domain protein 485 [Brassica napus]
  misc_feature (72)..(297): Homolog of NCBI NO: 15375404 NR Description: NAM-like protein [Arabidopsis thaliana]
  misc_feature (1)..(279): Homolog of NCBI NO: 6175246 NR Description: jasmonic acid 2 [Lycopersicon esculentum]
  misc_feature (1)..(282): Homolog of NCBI NO: 15232604 NR Description: No apical meristem (NAM) protein family thaliana] >gi|7021735|gb|AAF35416.1| putative jasmonic acid
  misc_feature (1)..(291): Homolog of NCBI NO: 15219112 NR Description: No apical meristem (NAM) protein family
  misc_feature (1)..(282): Homolog of NCBI NO: 21536744 NR Description: putative jasmonic acid regulatory protein

SEQ ID NO: 104055 - protein, 164 aa, Arabidopsis thaliana; identical to SEQ ID NO: 24429
  peptide (1)..(164): Ceres Seq. ID no. 13614215
  misc_feature (1)..(164): Homolog of NCBI NO: 18416983 NR Description: No apical meristem (NAM) protein family thaliana] >gi|15982729|gb|AAL09817.1| unknown protein thaliana] >gi|16226943|gb|AAL16305.1|AF428375_1
  misc_feature (1)..(164): Homolog of NCBI NO: 7486254 NR Description: hypothetical protein F27G19.10 - Arabidopsis >gi|4972066|emb|CAB43873.1| putative protein [Arabidopsis >gi|7269595|emb|CAB81391.1| putative protein [Arabidopsis
  misc_feature (1)..(164): Homolog of NCBI NO: 23397295 NR Description: unknown protein [Arabidopsis thaliana]
  misc_feature (1)..(164): Homolog of NCBI NO: 31322582 NR Description: NAC-domain protein 485 [Brassica napus]
  misc_feature (1)..(164): Homolog of NCBI NO: 15375404 NR Description: NAM-like protein [Arabidopsis thaliana]
  misc_feature (1)..(146): Homolog of NCBI NO: 6175246 NR Description: jasmonic acid 2 [Lycopersicon esculentum]
  misc_feature (1)..(149): Homolog of NCBI NO: 15232604 NR Description: No apical meristem (NAM) protein family thaliana] >gi|7021735|gb|AAF35416.1| putative jasmonic acid
  misc_feature (1)..(158): Homolog of NCBI NO: 15219112 NR Description: No apical meristem (NAM) protein family
  misc_feature (1)..(149): Homolog of NCBI NO: 21536744 NR Description: putative jasmonic acid regulatory protein
  misc_feature (1)..(164): Homolog of NCBI NO: 30687579 NR Description: No apical meristem (NAM) protein family

SEQ ID NO: 104056 - DNA, 1276 bp, Arabidopsis thaliana
  misc_feature (1)..(1276): Ceres Seq. ID no. 13614216
  misc_feature: MA Experiment ID: 20000234 Result: Down-regulated in Transcription
  misc_feature: MA Experiment 20000234 PARAMETER Experiment Name: At_Siliques_P Parameter: Age (day) Value: 21
  misc_feature: MA Experiment 20000234 PARAMETER Experiment Name: At_Siliques_P Parameter: Organism Value: A. thaliana
  misc_feature: MA Experiment 20000234 PARAMETER Experiment Name: At_Siliques_P Parameter: Plant Line Value: WS
  misc_feature: MA Experiment 20000234 PARAMETER Experiment Name: At_Siliques_P Parameter: Tissue Value: Less Than 5mm Siliques vs. Whole Plant
  misc_feature: MA Experiment ID: 20000264 Result: Down-regulated in Transcription
  misc_feature: MA Experiment 20000264 PARAMETER Experiment Name: At_Open_Flower_P Parameter: Age (day) Value: 21
  misc_feature: MA Experiment 20000264 PARAMETER Experiment Name: At_Open_Flower_P Parameter: Plant Line Value: WS
  misc_feature: MA Experiment 20000264 PARAMETER Experiment Name: At_Open_Flower_P Parameter: Tissue Value: Open Flower vs. Whole Plant
  misc_feature: MA Experiment ID: 20000265 Result: Down-regulated in Transcription
  misc_feature: MA Experiment 20000265 PARAMETER Experiment Name: At_Open_Flower_P Parameter: Age (day) Value: 21
  misc_feature: MA Experiment 20000265 PARAMETER Experiment Name: At_Open_Flower_P Parameter: Plant Line Value: WS
  misc_feature: MA Experiment 20000265 PARAMETER Experiment Name: At_Open_Flower_P Parameter: Tissue Value: Closed Flower vs. Whole Plant
  misc_feature: MA Experiment ID: 20000286 Result: Down-regulated in Transcription
  misc_feature: MA Experiment 20000286 PARAMETER Experiment Name: At_Open_Flower_P Parameter: Age (day) Value: 21
  misc_feature: MA Experiment 20000286 PARAMETER Experiment Name: At_Open_Flower_P Parameter: Plant Line Value: WS
  misc_feature: MA Experiment 20000286 PARAMETER Experiment Name: At_Open_Flower_P Parameter: Tissue Value: Half Open vs. Whole Plant
  misc_feature: MA Experiment ID: 20000438 Result: Down-regulated in Transcription
  misc_feature: MA Experiment 20000438 PARAMETER Experiment Name: At_Shoots__P Parameter: Age (day) Value: 14
  misc_feature: MA Experiment 20000438 PARAMETER Experiment Name: At_Shoots__P Parameter: Tissue Value: Shoots vs. Whole Plant
  misc_feature: MA Experiment ID: 20000794 Result: Down-regulated in Transcription
  misc_feature: MA Experiment 20000794 PARAMETER Experiment Name: At_Petals_P Parameter: Age (day) Value: 23-25 days
  misc_feature: MA Experiment 20000794 PARAMETER Experiment Name: At_Petals_P Parameter: Plant Line Value: WS
  misc_feature: MA Experiment 20000794 PARAMETER Experiment Name: At_Petals_P Parameter: Tissue Value: Petals vs. Whole plant
  misc_feature: MA Experiment ID: 20001247 Result: Up-regulated in Transcription
  misc_feature: MA Experiment 20001247 PARAMETER Experiment Name: At_Far-red-induction_P Parameter: Age (day) Value: 7
  misc_feature: MA Experiment 20001247 PARAMETER Experiment Name: At_Far-red-induction_P Parameter: Light Value: Far-red vs. White
  misc_feature: MA Experiment 20001247 PARAMETER Experiment Name: At_Far-red-induction_P Parameter: Organism Value: A. thaliana
  misc_feature: MA Experiment 20001247 PARAMETER Experiment Name: At_Far-red-induction_P Parameter: Plant Line Value: Columbia
  misc_feature: MA Experiment 20001247 PARAMETER Experiment Name: At_Far-red-induction_P Parameter: Timepoint (hr) Value: 1
  misc_feature: MA Experiment 20001247 PARAMETER Experiment Name: At_Far-red-induction_P Parameter: Tissue Value: Whole Plant
  misc_feature: MA Experiment ID: 20001248 Result: Up-regulated in Transcription
  misc_feature: MA Experiment 20001248 PARAMETER Experiment Name: At_Far-red-induction_P Parameter: Age (day) Value: 7
  misc_feature: MA Experiment 20001248 PARAMETER Experiment Name: At_Far-red-induction_P Parameter: Light Value: Far-red vs. White
  misc_feature: MA Experiment 20001248 PARAMETER Experiment Name: At_Far-red-induction_P Parameter: Organism Value: A. thaliana
  misc_feature: MA Experiment 20001248 PARAMETER Experiment Name: At_Far-red-induction_P Parameter: Plant Line Value: Columbia
  misc_feature: MA Experiment 20001248 PARAMETER Experiment Name: At_Far-red-induction_P Parameter: Timepoint (hr) Value: 4
  misc_feature: MA Experiment 20001248 PARAMETER Experiment Name: At_Far-red-induction_P Parameter: Tissue Value: Whole Plant
atcgtacaacccatctctttttttttttttaacttgtcttctctctttccttaactttgatggcactgtcccttctctcctacaacgtctccgacctctgtctcggcaaacctcctcttcgttgtctttcctcctcttcctcctccgtatccgacgccatcgctgccctcaaatcctctgaagacactttcctctccgtctggaattgcaatcacgacgatgacaataacacagagtgcgagtgcttggggaaaatatcaatggctgacgtcatctgccacttgtccaaagaccatgaccacagtctctgtgccttaaactcatccgtctctgttcttctccccaaaactcgttccattgtcctccatgttcaaccatcctgcagcttaatagaagccattgatctgataatcaaaggagcacagaatctgattgtcccgatacatacaaagccctacactaagaaaaagcagcacaacgacaacgtttcggtcaccaccaccacccactcgaacggacaacgattctgctggatcacacaagaagacatcattcagtttctcctcggattcatcgccgcattctctcctttgccagcgatgtccctctctgatctcggtgtcatcaacagcacacacacagttgttgcggtcgattaccactcctcagcgtccgcagttgtctctgccgtatccaacgctcttgccgtccaaacctctgtcgcagtggtcgacggtgagggagatgacccttttacgtctttgatcggcgaaatatccccgatgacattaacttgctgcgacgagacagcagctgcggcggtggcgacgctctccgctggagatctgatggcgtacatagacggagcaaatcctccggagagtcttgttcagatcgttaggaaccgtttggaggataaaggattgattggtttgatgtcgcttttcgattctctctcatcttattcgacgtcgtcgggttattcgtcggaggaagaagctccagtgagaacgacgtcgtatggacggtcgatgagtagctcagcaagaatggcaaggaagtcggaggcgatagtgtgtaatccaaagagctcgttaatggcagtgatgatccaagcggttgctcatcgagtgaactacgcgtgggtggttgagaaggatggttgtttcgttggcatggttacttttgttgatatcttaaaagtttttaggaaatttttggagaatgacatgtgaaaagttttttaaatatattttcttgtgttttgtcgattact

SEQ ID NO: 104057 - protein, 391 aa, Arabidopsis thaliana
  peptide (1)..(391): Ceres Seq. ID no. 13614217
  misc_feature (336)..(384): Pfam Name: CBS domain Pfam Description: CBS domain
  misc_feature (1)..(391): Homolog of NCBI NO: 30687603 NR Description: expressed protein [Arabidopsis thaliana]
  misc_feature (1)..(391): Homolog of NCBI NO: 27754524 NR Description: unknown protein [Arabidopsis thaliana]
  misc_feature (1)..(374): Homolog of NCBI NO: 7486257 NR Description: hypothetical protein F27G19.60 - Arabidopsis >gi|4972071|emb|CAB43878.1| hypothetical protein [Arabidopsis >gi|7269600|emb|CAB81396.1| hypothetical protein [Arabidopsis
  misc_feature (1)..(372): Homolog of NCBI NO: 15238832 NR Description: expressed protein [Arabidopsis thaliana] gene_id:MGN6.11~pir||T08938~strong similarity to unknown protein
  misc_feature (1)..(388): Homolog of NCBI NO: 37535750 NR Description: unknown protein [Oryza sativa (japonica
  misc_feature (5)..(387): Homolog of NCBI NO: 32487397 NR Description: OSJNBb0017I01.11 [Oryza sativa (japonica
  misc_feature (146)..(385): Homolog of NCBI NO: 15218643 NR Description: CBS domain containing protein [Arabidopsis >gi|26449327|dbj|BAC41791.1| unknown protein [Arabidopsis
  misc_feature (146)..(385): Homolog of NCBI NO: 7487793 NR Description: hypothetical protein T8F5.10 - Arabidopsis
  misc_feature (130)..(385): Homolog of NCBI NO: 19386732 NR Description: P0678F11.21 [Oryza sativa (japonica
MALSLLSYNVSDLCLGKPPLRCLSSSSSSVSDAIAALKSSEDTFLSVWNCNHDDDNNTECECLGKISMADVICHLSKDHDHSLCALNSSVSVLLPKTRSIVLHVQPSCSLIEAIDLIIKGAQNLIVPIHTKPYTKKKQHNDNVSVTTTTHSNGQRFCWITQEDIIQFLLGFIAAFSPLPAMSLSDLGVINSTHTVVAVDYHSSASAVVSAVSNALAVQTSVAVVDGEGDDPFTSLIGEISPMTLTCCDETAAAAVATLSAGDLMAYIDGANPPESLVQIVRNRLEDKGLIGLMSLFDSLSSYSTSSGYSSEEEAPVRTTSYGRSMSSSARMARKSEAIVCNPKSSLMAVMIQAVAHRVNYAWVVEKDGCFVGMVTFVDILKVFRKFLENDM

SEQ ID NO: 104058 - protein, 324 aa, Arabidopsis thaliana
  peptide (1)..(324): Ceres Seq. ID no. 13614218
  misc_feature (269)..(317): Pfam Name: CBS domain Pfam Description: CBS domain
  misc_feature (1)..(324): Homolog of NCBI NO: 30687603 NR Description: expressed protein [Arabidopsis thaliana]
  misc_feature (1)..(324): Homolog of NCBI NO: 27754524 NR Description: unknown protein [Arabidopsis thaliana]
  misc_feature (1)..(307): Homolog of NCBI NO: 7486257 NR Description: hypothetical protein F27G19.60 - Arabidopsis >gi|4972071|emb|CAB43878.1| hypothetical protein [Arabidopsis >gi|7269600|emb|CAB81396.1| hypothetical protein [Arabidopsis
  misc_feature (1)..(305): Homolog of NCBI NO: 15238832 NR Description: expressed protein [Arabidopsis thaliana] gene_id:MGN6.11~pir||T08938~strong similarity to unknown protein
  misc_feature (1)..(321): Homolog of NCBI NO: 37535750 NR Description: unknown protein [Oryza sativa (japonica
  misc_feature (1)..(320): Homolog of NCBI NO: 32487397 NR Description: OSJNBb0017I01.11 [Oryza sativa (japonica
  misc_feature (79)..(318): Homolog of NCBI NO: 15218643 NR Description: CBS domain containing protein [Arabidopsis >gi|26449327|dbj|BAC41791.1| unknown protein [Arabidopsis
  misc_feature (79)..(318): Homolog of NCBI NO: 7487793 NR Description: hypothetical protein T8F5.10 - Arabidopsis
  misc_feature (63)..(318): Homolog of NCBI NO: 19386732 NR Description: P0678F11.21 [Oryza sativa (japonica
MADVICHLSKDHDHSLCALNSSVSVLLPKTRSIVLHVQPSCSLIEAIDLIIKGAQNLIVPIHTKPYTKKKQHNDNVSVTTTTHSNGQRFCWITQEDIIQFLLGFIAAFSPLPAMSLSDLGVINSTHTVVAVDYHSSASAVVSAVSNALAVQTSVAVVDGEGDDPFTSLIGEISPMTLTCCDETAAAAVATLSAGDLMAYIDGANPPESLVQIVRNRLEDKGLIGLMSLFDSLSSYSTSSGYSSEEEAPVRTTSYGRSMSSSARMARKSEAIVCNPKSSLMAVMIQAVAHRVNYAWVVEKDGCFVGMVTFVDILKVFRKFLENDM

SEQ ID NO: 104059 - protein, 211 aa, Arabidopsis thaliana
  peptide (1)..(211): Ceres Seq. ID no. 13614219
  misc_feature (156)..(204): Pfam Name: CBS domain Pfam Description: CBS domain
  misc_feature (1)..(211): Homolog of NCBI NO: 30687603 NR Description: expressed protein [Arabidopsis thaliana]
  misc_feature (1)..(211): Homolog of NCBI NO: 27754524 NR Description: unknown protein [Arabidopsis thaliana]
  misc_feature (1)..(194): Homolog of NCBI NO: 7486257 NR Description: hypothetical protein F27G19.60 - Arabidopsis >gi|4972071|emb|CAB43878.1| hypothetical protein [Arabidopsis >gi|7269600|emb|CAB81396.1| hypothetical protein [Arabidopsis
  misc_feature (1)..(192): Homolog of NCBI NO: 15238832 NR Description: expressed protein [Arabidopsis thaliana] gene_id:MGN6.11~pir||T08938~strong similarity to unknown protein
  misc_feature (1)..(208): Homolog of NCBI NO: 37535750 NR Description: unknown protein [Oryza sativa (japonica
  misc_feature (1)..(207): Homolog of NCBI NO: 32487397 NR Description: OSJNBb0017I01.11 [Oryza sativa (japonica
  misc_feature (1)..(205): Homolog of NCBI NO: 15218643 NR Description: CBS domain containing protein [Arabidopsis >gi|26449327|dbj|BAC41791.1| unknown protein [Arabidopsis
  misc_feature (1)..(205): Homolog of NCBI NO: 7487793 NR Description: hypothetical protein T8F5.10 - Arabidopsis
  misc_feature (1)..(205): Homolog of NCBI NO: 19386732 NR Description: P0678F11.21 [Oryza sativa (japonica
MSLSDLGVINSTHTVVAVDYHSSASAVVSAVSNALAVQTSVAVVDGEGDDPFTSLIGEISPMTLTCCDETAAAAVATLSAGDLMAYIDGANPPESLVQIVRNRLEDKGLIGLMSLFDSLSSYSTSSGYSSEEEAPVRTTSYGRSMSSSARMARKSEAIVCNPKSSLMAVMIQAVAHRVNYAWVVEKDGCFVGMVTFVDILKVFRKFLENDM

SEQ ID NO: 104060 - DNA, 973 bp, Arabidopsis thaliana
  misc_feature (1)..(973): Ceres Seq. ID no. 13614224
  misc_feature: MA Experiment ID: 108435 Result: Down-regulated in Transcription
  misc_feature: MA Experiment 108435 PARAMETER Experiment Name: At_stm_Mutants_cDNA_P Parameter: Plant Line Value: wt Landsburg vs stm
  misc_feature: MA Experiment 108435 PARAMETER Experiment Name: At_stm_Mutants_cDNA_P Parameter: Tissue Value: Shoot Apical Meristem Region
  misc_feature: MA Experiment ID: 108461 Result: Up-regulated in Transcription
  misc_feature: MA Experiment 108461 PARAMETER Experiment Name: At_Germinating_Seeds_cDNA_P Parameter: Age (day) Value: 1 vs. 0
  misc_feature: MA Experiment 108461 PARAMETER Experiment Name: At_Germinating_Seeds_cDNA_P Parameter: Tissue Value: Germinating Seeds
  misc_feature: MA Experiment ID: 108462 Result: Up-regulated in Transcription
  misc_feature: MA Experiment 108462 PARAMETER Experiment Name: At_Germinating_Seeds_cDNA_P Parameter: Age (day) Value: 2 vs. 0
  misc_feature: MA Experiment 108462 PARAMETER Experiment Name: At_Germinating_Seeds_cDNA_P Parameter: Tissue Value: Germinating Seeds
  misc_feature: MA Experiment ID: 108463 Result: Up-regulated in Transcription
  misc_feature: MA Experiment 108463 PARAMETER Experiment Name: At_Germinating_Seeds_cDNA_P Parameter: Age (day) Value: 3 vs. 0
  misc_feature: MA Experiment 108463 PARAMETER Experiment Name: At_Germinating_Seeds_cDNA_P Parameter: Tissue Value: Germinating Seeds
  misc_feature: MA Experiment ID: 108488 Result: Up-regulated in Transcription
  misc_feature: MA Experiment ID: 108573 Result: Down-regulated in Transcription
  misc_feature: MA Experiment 108573 PARAMETER Experiment Name: At_Drought_cDNA_P Parameter: Timepoint (hr) Value: 6
  misc_feature: MA Experiment 108573 PARAMETER Experiment Name: At_Drought_cDNA_P Parameter: Tissue Value: Aerial
  misc_feature: MA Experiment 108573 PARAMETER Experiment Name: At_Drought_cDNA_P Parameter: Treatment Value: Drought vs. No Drought
  misc_feature: MA Experiment ID: 108576 Result: Down-regulated in Transcription
  misc_feature: MA Experiment 108576 PARAMETER Experiment Name: At_42deg_Heat_cDNA_P Parameter: Temperature (deg C) Value: 42 vs. 22
  misc_feature: MA Experiment 108576 PARAMETER Experiment Name: At_42deg_Heat_cDNA_P Parameter: Timepoint (hr) Value: 1
  misc_feature: MA Experiment 108576 PARAMETER Experiment Name: At_42deg_Heat_cDNA_P Parameter: Tissue Value: Aerial
  misc_feature: MA Experiment ID: 108585 Result: Down-regulated in Transcription
  misc_feature: MA Experiment 108585 PARAMETER Experiment Name: At_5mM_NaNP_cDNA_P Parameter: Timepoint (hr) Value: 6
  misc_feature: MA Experiment 108585 PARAMETER Experiment Name: At_5mM_NaNP_cDNA_P Parameter: Tissue Value: Aerial
  misc_feature: MA Experiment 108585 PARAMETER Experiment Name: At_5mM_NaNP_cDNA_P Parameter: Treatment Value: null
  misc_feature: MA Experiment ID: 108595 Result: Down-regulated in Transcription
  misc_feature: MA Experiment 108595 PARAMETER Experiment Name: At_Ler-pi_Ovule_cDNA_P Parameter: Plant Line Value: null
  misc_feature: MA Experiment ID: 20000111 Result: Down-regulated in Transcription
  misc_feature: MA Experiment 20000111 PARAMETER Experiment Name: At_42deg_Heat_cDNA_P Parameter: Temperature (deg C) Value: 42 vs. 22
  misc_feature: MA Experiment 20000111 PARAMETER Experiment Name: At_42deg_Heat_cDNA_P Parameter: Timepoint (hr) Value: 6
  misc_feature: MA Experiment 20000111 PARAMETER Experiment Name: At_42deg_Heat_cDNA_P Parameter: Tissue Value: Aerial
  misc_feature: MA Experiment ID: 20000112 Result: Down-regulated in Transcription
  misc_feature: MA Experiment 20000112 PARAMETER Experiment Name: At_42deg_Heat_cDNA_P Parameter: Temperature (deg C) Value: 42 vs. 22
  misc_feature: MA Experiment 20000112 PARAMETER Experiment Name: At_42deg_Heat_cDNA_P Parameter: Timepoint (hr) Value: 2
  misc_feature: MA Experiment 20000112 PARAMETER Experiment Name: At_42deg_Heat_cDNA_P Parameter: Tissue Value: Aerial
  misc_feature: MA Experiment ID: 20000179 Result: Up-regulated in Transcription
  misc_feature: MA Experiment 20000179 PARAMETER Experiment Name: At_Germinating_Seeds_P Parameter: Age (hr) Value: 6 vs. 0
  misc_feature: MA Experiment 20000179 PARAMETER Experiment Name: At_Germinating_Seeds_P Parameter: Tissue Value: Germinating Seeds
  misc_feature: MA Experiment ID: 20000180 Result: Up-regulated in Transcription
  misc_feature: MA Experiment 20000180 PARAMETER Experiment Name: At_Germinating_Seeds_P Parameter: Age (hr) Value: 24 vs. 0
  misc_feature: MA Experiment 20000180 PARAMETER Experiment Name: At_Germinating_Seeds_P Parameter: Tissue Value: Germinating Seeds
  misc_feature: MA Experiment ID: 20000185 Result: Down-regulated in Transcription
  misc_feature: MA Experiment 20000185 PARAMETER Experiment Name: At_Roots__P Parameter: Age (day) Value: 7 vs. 21
  misc_feature: MA Experiment 20000185 PARAMETER Experiment Name: At_Roots__P Parameter: Organism Value: A. thaliana
  misc_feature: MA Experiment 20000185 PARAMETER Experiment Name: At_Roots__P Parameter: Tissue Value: Roots vs. Whole Plant
  misc_feature: MA Experiment ID: 20000224 Result: Up-regulated in Transcription
  misc_feature: MA Experiment ID: 20000227 Result: Down-regulated in Transcription
  misc_feature: MA Experiment 20000227 PARAMETER Experiment Name: At_Root-Tips-vs-Tops_P Parameter: Tissue Value: Root Tips vs. Root Tops
  misc_feature: MA Experiment ID: 20000438 Result: Up-regulated in Transcription
  misc_feature: MA Experiment 20000438 PARAMETER Experiment Name: At_Shoots__P Parameter: Age (day) Value: 14
  misc_feature: MA Experiment 20000438 PARAMETER Experiment Name: At_Shoots__P Parameter: Tissue Value: Shoots vs. Whole Plant
  misc_feature: MA Experiment ID: 20000439 Result: Down-regulated in Transcription
  misc_feature: MA Experiment 20000439 PARAMETER Experiment Name: At_Roots__P Parameter: Age (day) Value: 14 vs. 21
  misc_feature: MA Experiment 20000439 PARAMETER Experiment Name: At_Roots__P Parameter: Organism Value: A. thaliana
  misc_feature: MA Experiment 20000439 PARAMETER Experiment Name: At_Roots__P Parameter: Tissue Value: Roots vs. Whole Plant
  misc_feature: MA Experiment ID: 20000794 Result: Down-regulated in Transcription
  misc_feature: MA Experiment 20000794 PARAMETER Experiment Name: At_Petals_P Parameter: Age (day) Value: 23-25 days
  misc_feature: MA Experiment 20000794 PARAMETER Experiment Name: At_Petals_P Parameter: Plant Line Value: WS
  misc_feature: MA Experiment 20000794 PARAMETER Experiment Name: At_Petals_P Parameter: Tissue Value: Petals vs. Whole plant
  misc_feature: MA Experiment ID: 20001248 Result: Down-regulated in Transcription
  misc_feature: MA Experiment 20001248 PARAMETER Experiment Name: At_Far-red-induction_P Parameter: Age (day) Value: 7
  misc_feature: MA Experiment 20001248 PARAMETER Experiment Name: At_Far-red-induction_P Parameter: Light Value: Far-red vs. White
  misc_feature: MA Experiment 20001248 PARAMETER Experiment Name: At_Far-red-induction_P Parameter: Organism Value: A. thaliana
  misc_feature: MA Experiment 20001248 PARAMETER Experiment Name: At_Far-red-induction_P Parameter: Plant Line Value: Columbia
  misc_feature: MA Experiment 20001248 PARAMETER Experiment Name: At_Far-red-induction_P Parameter: Timepoint (hr) Value: 4
  misc_feature: MA Experiment 20001248 PARAMETER Experiment Name: At_Far-red-induction_P Parameter: Tissue Value: Whole Plant
  misc_feature: MA Experiment ID: 20001450 Result: Down-regulated in Transcription
  misc_feature: MA Experiment 20001450 PARAMETER Experiment Name: At_Far-red-induction_P Parameter: Age (day) Value: 7
  misc_feature: MA Experiment 20001450 PARAMETER Experiment Name: At_Far-red-induction_P Parameter: Light Value: Far-red vs. White
  misc_feature: MA Experiment 20001450 PARAMETER Experiment Name: At_Far-red-induction_P Parameter: Organism Value: A. thaliana
  misc_feature: MA Experiment 20001450 PARAMETER Experiment Name: At_Far-red-induction_P Parameter: Plant Line Value: Columbia
  misc_feature: MA Experiment 20001450 PARAMETER Experiment Name: At_Far-red-induction_P Parameter: Timepoint (hr) Value: 8
  misc_feature: MA Experiment 20001450 PARAMETER Experiment Name: At_Far-red-induction_P Parameter: Tissue Value: Whole Plant
  misc_feature: MA Experiment ID: 20001557 Result: Down-regulated in Transcription
  misc_feature: MA Experiment 20001557 PARAMETER Experiment Name: At_Drought_Soil_Dry_P Parameter: Age (day) Value: 27
  misc_feature: MA Experiment 20001557 PARAMETER Experiment Name: At_Drought_Soil_Dry_P Parameter: Organism Value: A. thaliana
  misc_feature: MA Experiment 20001557 PARAMETER Experiment Name: At_Drought_Soil_Dry_P Parameter: Plant Line Value: WS
  misc_feature: MA Experiment 20001557 PARAMETER Experiment Name: At_Drought_Soil_Dry_P Parameter: Post Timepoint (hr) Value: 3
  misc_feature: MA Experiment 20001557 PARAMETER Experiment Name: At_Drought_Soil_Dry_P Parameter: Post-Treatment Value: Re-Water vs. No Drought
  misc_feature: MA Experiment 20001557 PARAMETER Experiment Name: At_Drought_Soil_Dry_P Parameter: Timepoint (day) Value: 13
  misc_feature: MA Experiment 20001557 PARAMETER Experiment Name: At_Drought_Soil_Dry_P Parameter: Treatment Value: Drought vs. No Drought
aagcaccacatgttcagattttttcctaacaagaagaaaagaagtcgcagtttcatcgtctttcttccattatcgtgcaattaaattctctcattttcaagaaaatatctgaaaaaacagaaacttaacagaagcagcttcgatcaagagatggcttcacttacttcaatagccacgccttacccatcttcatcgcaggctttgcgtctgaaatcctccggaaacactcttttctctgccggagttcgatcggcagcaatggtttccggtcacaaaacgcttaagattcaatgcacttcaaccaaacctgccaaacctgcagctgaagtcgattggagacagaagagagagcttctattggagaaaagggtgagaagtgtggacgtgaaggaagctcaacggttacaaaaagaaaacaactttgtgattcttgatgtaagaccagaggcagagtacaaggcgggtcatcctccgggagctatcaatgtggagatgtacagactcataagggaatggacggcatgggacatagctcgccgtcttggctttgctttctttggtatcttctctggcacagaagagaaccctgagtttattcaaagtgtagaagctaaacttgacaaagaggcaaagatcatagtagcttgttcatccgcgggtacaatgaagccgacacaaaatcttcccgaaggccaacaatcgaggtctctcatagctgcttatcttctggtccttaacggctataagaacgtatttcacctagaaggtggaatctacacatggggcaaggaaggtcttcctgttgaaacaattgaagaagactaaccaacttctttactctagagttgtccagttttgtatatctgtccatttcagttagttgcatttagagatttggcttttcagagagtgttttgaggtttgtaaaacttcagactttaccatgaaatccagcaaactcgaccggaatcca

SEQ ID NO: 104061 - protein, 224 aa, Arabidopsis thaliana; identical to SEQ ID NO: 29403
  peptide (1)..(224): Ceres Seq. ID no. 13614225
  misc_feature (78)..(214): Pfam Name: Rhodanese-like domain Pfam Description: Rhodanese-like domain
  misc_feature (1)..(224): Homolog of NCBI NO: 18417050 NR Description: rhodanese-like domain protein [Arabidopsis >gi|15215616|gb|AAK91353.1| AT4g27700/T29A15_190 [Arabidopsis >gi|20334878|gb|AAM16195.1| AT4g27700/T29A15_190 [Arabidopsis
  misc_feature (1)..(224): Homolog of NCBI NO: 21553366 NR Description: unknown [Arabidopsis thaliana]
  misc_feature (1)..(224): Homolog of NCBI NO: 7487511 NR Description: hypothetical protein T29A15.190 - Arabidopsis >gi|4469021|emb|CAB38282.1| hypothetical protein [Arabidopsis >gi|7269624|emb|CAB81420.1| hypothetical protein [Arabidopsis
  misc_feature (74)..(122): Homolog of NCBI NO: 30250144 NR Description: putative transmembrane protein [Nitrosomonas ATCC 19718] >gi|30139251|emb|CAD86124.1| putative transmembrane
  misc_feature (189)..(218): Homolog of NCBI NO: 30250144 NR Description: putative transmembrane protein [Nitrosomonas ATCC 19718] >gi|30139251|emb|CAD86124.1| putative transmembrane
  misc_feature (66)..(223): Homolog of NCBI NO: 18491227 NR Description: putative rhodanese family protein [Arabidopsis
  misc_feature (66)..(223): Homolog of NCBI NO: 18398296 NR Description: rhodanese-like domain protein [Arabidopsis >gi|6403493|gb|AAF07833.1|AC010871_9 unknown protein [Arabidopsis >gi|26983812|gb|AAN86158.1| putative rhodanese family protein

SEQ ID NO: 104062 - protein, 188 aa, Arabidopsis thaliana; identical to SEQ ID NO: 29404
  peptide (1)..(188): Ceres Seq. ID no. 13614226
  misc_feature (42)..(178): Pfam Name: Rhodanese-like domain Pfam Description: Rhodanese-like domain
  misc_feature (1)..(188): Homolog of NCBI NO: 18417050 NR Description: rhodanese-like domain protein [Arabidopsis >gi|15215616|gb|AAK91353.1| AT4g27700/T29A15_190 [Arabidopsis >gi|20334878|gb|AAM16195.1| AT4g27700/T29A15_190 [Arabidopsis
  misc_feature (1)..(188): Homolog of NCBI NO: 21553366 NR Description: unknown [Arabidopsis thaliana]
  misc_feature (1)..(188): Homolog of NCBI NO: 7487511 NR Description: hypothetical protein T29A15.190 - Arabidopsis >gi|4469021|emb|CAB38282.1| hypothetical protein [Arabidopsis >gi|7269624|emb|CAB81420.1| hypothetical protein [Arabidopsis
  misc_feature (38)..(86): Homolog of NCBI NO: 30250144 NR Description: putative transmembrane protein [Nitrosomonas ATCC 19718] >gi|30139251|emb|CAD86124.1| putative transmembrane
  misc_feature (153)..(182): Homolog of NCBI NO: 30250144 NR Description: putative transmembrane protein [Nitrosomonas ATCC 19718] >gi|30139251|emb|CAD86124.1| putative transmembrane
  misc_feature (30)..(187): Homolog of NCBI NO: 18491227 NR Description: putative rhodanese family protein [Arabidopsis
  misc_feature (30)..(187): Homolog of NCBI NO: 18398296 NR Description: rhodanese-like domain protein [Arabidopsis >gi|6403493|gb|AAF07833.1|AC010871_9 unknown protein [Arabidopsis >gi|26983812|gb|AAN86158.1| putative rhodanese family protein

SEQ ID NO: 104063 - DNA, 1043 bp, Arabidopsis thaliana
  misc_feature (1)..(1043): Ceres Seq. ID no. 13614227
  misc_feature: MA Experiment ID: 20001450 Result: Up-regulated in Transcription
  misc_feature: MA Experiment 20001450 PARAMETER Experiment Name: At_Far-red-induction_P Parameter: Age (day) Value: 7
  misc_feature: MA Experiment 20001450 PARAMETER Experiment Name: At_Far-red-induction_P Parameter: Light Value: Far-red vs. White
  misc_feature: MA Experiment 20001450 PARAMETER Experiment Name: At_Far-red-induction_P Parameter: Organism Value: A. thaliana
  misc_feature: MA Experiment 20001450 PARAMETER Experiment Name: At_Far-red-induction_P Parameter: Plant Line Value: Columbia
  misc_feature: MA Experiment 20001450 PARAMETER Experiment Name: At_Far-red-induction_P Parameter: Timepoint (hr) Value: 8
  misc_feature: MA Experiment 20001450 PARAMETER Experiment Name: At_Far-red-induction_P Parameter: Tissue Value: Whole Plant
gagaaaacggagcgagagagatgtatctgaagagaccgatatggagcgatggcgcgtcagcaacgccggagaatccatcagaatcggagaccggagaagaatcagacgcggcgtcgatggtagtcgaagagctggtgacttctctcaatacacagagactttacagggagctgacactatccctcaggaccggtttacgcgatgcttgcgctgaattctccttccttcgcatccgtggtcttagatctcttctcaaaactctccgaactgtcgctgattcagattcaatcattcgtctcttctctcatacccaaaccatttccgatctccaactggttccggtgctttttcaacattcattgaaagaagcggaggatgataaagtgacgagcttggatcatatattcagtgtggagccgatgaagataacaagtccttctacggatgctgaggttgctgttgctcttagagttctcgaaggatgctgccttctccatcctcagagcactgtcctggctcataagcatggtgcagtccgcgtaatgatgaatgtattatcaacacgaggagtacttgagcaaggagcctgcttggatgccttaatctcagtattgctggattcatcagcaaatcaggtggattttggagcttgcaatggcattgaagaggttgcaatgctcatgcgagacaaacaagctgatgaaaacctcaggttaagatgcggagagttcttactactgttagttggacacgtaaatgggaaggatcgatctccaatagcgagtgtaaatgaagacatcaggcgcctcttgggtgaaaaatctgcttctttaatatgggcggcgagtcaattcggttcaacaggtgatcctgaacaaagaatcacggcgcttcatatccaggctggtagagtgctcgagtctcttgacttgtactaactgtcaaactacttttgttttttccttatttacataataccaagttattattatgtgtaacaatgtaacaacactcatgaaaatagagttgtttaatgatgttcc

SEQ ID NO: 104064 - protein, 311 aa, Arabidopsis thaliana
  peptide (1)..(311): Ceres Seq. ID no. 13614228
  misc_feature (7)..(311): Homolog of NCBI NO: 30687718 NR Description: expressed protein [Arabidopsis thaliana] unknown protein [Arabidopsis thaliana]
  misc_feature (7)..(238): Homolog of NCBI NO: 7452470 NR Description: hypothetical protein T29A15.240 - Arabidopsis >gi|4469026|emb|CAB38287.1| hypothetical protein [Arabidopsis >gi|7269629|emb|CAB81425.1| hypothetical protein [Arabidopsis
  misc_feature (238)..(311): Homolog of NCBI NO: 7452470 NR Description: hypothetical protein T29A15.240 - Arabidopsis >gi|4469026|emb|CAB38287.1| hypothetical protein [Arabidopsis >gi|7269629|emb|CAB81425.1| hypothetical protein [Arabidopsis
  misc_feature (17)..(237): Homolog of NCBI NO: 34898066 NR Description: ESTs AU030224(E50782),AU077702(E50782) correspond a region of the predicted gene.~Similar to Arabidopsis thaliana
  misc_feature (11)..(179): Homolog of NCBI NO: 37536150 NR Description: hypothetical protein [Oryza sativa (japonica group)] >gi|10122050|gb|AAG13439.1| hypothetical protein [Oryza
ENGAREMYLKRPIWSDGASATPENPSESETGEESDAASMVVEELVTSLNTQRLYRELTLSLRTGLRDACAEFSFLRIRGLRSLLKTLRTVADSDSIIRLFSHTQTISDLQLVPVLFQHSLKEAEDDKVTSLDHIFSVEPMKITSPSTDAEVAVALRVLEGCCLLHPQSTVLAHKHGAVRVMMNVLSTRGVLEQGACLDALISVLLDSSANQVDFGACNGIEEVAMLMRDKQADENLRLRCGEFLLLLVGHVNGKDRSPIASVNEDIRRLLGEKSASLIWAASQFGSTGDPEQRITALHIQAGRVLESLDLY

SEQ ID NO: 104065 - protein, 305 aa, Arabidopsis thaliana
  peptide (1)..(305): Ceres Seq. ID no. 13614229
  misc_feature (1)..(305): Homolog of NCBI NO: 30687718 NR Description: expressed protein [Arabidopsis thaliana] unknown protein [Arabidopsis thaliana]
  misc_feature (1)..(232): Homolog of NCBI NO: 7452470 NR Description: hypothetical protein T29A15.240 - Arabidopsis >gi|4469026|emb|CAB38287.1| hypothetical protein [Arabidopsis >gi|7269629|emb|CAB81425.1| hypothetical protein [Arabidopsis
  misc_feature (232)..(305): Homolog of NCBI NO: 7452470 NR Description: hypothetical protein T29A15.240 - Arabidopsis >gi|4469026|emb|CAB38287.1| hypothetical protein [Arabidopsis >gi|7269629|emb|CAB81425.1| hypothetical protein [Arabidopsis
  misc_feature (11)..(231): Homolog of NCBI NO: 34898066 NR Description: ESTs AU030224(E50782),AU077702(E50782) correspond a region of the predicted gene.~Similar to Arabidopsis thaliana
  misc_feature (5)..(173): Homolog of NCBI NO: 37536150 NR Description: hypothetical protein [Oryza sativa (japonica group)] >gi|10122050|gb|AAG13439.1| hypothetical protein [Oryza
MYLKRPIWSDGASATPENPSESETGEESDAASMVVEELVTSLNTQRLYRELTLSLRTGLRDACAEFSFLRIRGLRSLLKTLRTVADSDSIIRLFSHTQTISDLQLVPVLFQHSLKEAEDDKVTSLDHIFSVEPMKITSPSTDAEVAVALRVLEGCCLLHPQSTVLAHKHGAVRVMMNVLSTRGVLEQGACLDALISVLLDSSANQVDFGACNGIEEVAMLMRDKQADENLRLRCGEFLLLLVGHVNGKDRSPIASVNEDIRRLLGEKSASLIWAASQFGSTGDPEQRITALHIQAGRVLESLDLY

SEQ ID NO: 104066 - protein, 273 aa, Arabidopsis thaliana
  peptide (1)..(273): Ceres Seq. ID no. 13614230
  misc_feature (1)..(273): Homolog of NCBI NO: 30687718 NR Description: expressed protein [Arabidopsis thaliana] unknown protein [Arabidopsis thaliana]
  misc_feature (1)..(200): Homolog of NCBI NO: 7452470 NR Description: hypothetical protein T29A15.240 - Arabidopsis >gi|4469026|emb|CAB38287.1| hypothetical protein [Arabidopsis >gi|7269629|emb|CAB81425.1| hypothetical protein [Arabidopsis
  misc_feature (200)..(273): Homolog of NCBI NO: 7452470 NR Description: hypothetical protein T29A15.240 - Arabidopsis >gi|4469026|emb|CAB38287.1| hypothetical protein [Arabidopsis >gi|7269629|emb|CAB81425.1| hypothetical protein [Arabidopsis
  misc_feature (1)..(199): Homolog of NCBI NO: 34898066 NR Description: ESTs AU030224(E50782),AU077702(E50782) correspond a region of the predicted gene.~Similar to Arabidopsis thaliana
  misc_feature (1)..(141): Homolog of NCBI NO: 37536150 NR Description: hypothetical protein [Oryza sativa (japonica group)] >gi|10122050|gb|AAG13439.1| hypothetical protein [Oryza
MVVEELVTSLNTQRLYRELTLSLRTGLRDACAEFSFLRIRGLRSLLKTLRTVADSDSIIRLFSHTQTISDLQLVPVLFQHSLKEAEDDKVTSLDHIFSVEPMKITSPSTDAEVAVALRVLEGCCLLHPQSTVLAHKHGAVRVMMNVLSTRGVLEQGACLDALISVLLDSSANQVDFGACNGIEEVAMLMRDKQADENLRLRCGEFLLLLVGHVNGKDRSPIASVNEDIRRLLGEKSASLIWAASQFGSTGDPEQRITALHIQAGRVLESLDLY

SEQ ID NO: 104067 - DNA, 1598 bp, Arabidopsis thaliana
  misc_feature (1)..(1598): Ceres Seq. ID no. 13614235
  misc_feature: MA Experiment ID: 108434 Result: Up-regulated in Transcription
  misc_feature: MA Experiment 108434 PARAMETER Experiment Name: At_Root_Tips_cDNA_P Parameter: Tissue Value: Root Tips
  misc_feature: MA Experiment ID: 108577 Result: Up-regulated in Transcription
  misc_feature: MA Experiment 108577 PARAMETER Experiment Name: At_42deg_Heat_cDNA_P Parameter: Temperature (deg C) Value: 42 vs. 22
  misc_feature: MA Experiment 108577 PARAMETER Experiment Name: At_42deg_Heat_cDNA_P Parameter: Timepoint (hr) Value: 6
  misc_feature: MA Experiment 108577 PARAMETER Experiment Name: At_42deg_Heat_cDNA_P Parameter: Tissue Value: Aerial
  misc_feature: MA Experiment ID: 108579 Result: Up-regulated in Transcription
  misc_feature: MA Experiment 108579 PARAMETER Experiment Name: At_4deg_Cold_cDNA_P Parameter: Temperature (deg C) Value: 4 vs. 22
  misc_feature: MA Experiment 108579 PARAMETER Experiment Name: At_4deg_Cold_cDNA_P Parameter: Timepoint (hr) Value: 6
  misc_feature: MA Experiment 108579 PARAMETER Experiment Name: At_4deg_Cold_cDNA_P Parameter: Tissue Value: Aerial
  misc_feature: MA Experiment ID: 20000089 Result: Down-regulated in Transcription
  misc_feature: MA Experiment ID: 20000090 Result: Down-regulated in Transcription
  misc_feature: MA Experiment ID: 20000093 Result: Up-regulated in Transcription
  misc_feature: MA Experiment 20000093 PARAMETER Experiment Name: At_42deg_Heat_cDNA_P Parameter: Temperature (deg C) Value: 42 vs. 22
  misc_feature: MA Experiment 20000093 PARAMETER Experiment Name: At_42deg_Heat_cDNA_P Parameter: Timepoint (hr) Value: 0.5
  misc_feature: MA Experiment 20000093 PARAMETER Experiment Name: At_42deg_Heat_cDNA_P Parameter: Tissue Value: Aerial
  misc_feature: MA Experiment ID: 20000144 Result: Up-regulated in Transcription
  misc_feature: MA Experiment 20000144 PARAMETER Experiment Name: At_42deg_Heat_cDNA_P Parameter: Temperature (deg C) Value: 42 vs. 22
  misc_feature: MA Experiment 20000144 PARAMETER Experiment Name: At_42deg_Heat_cDNA_P Parameter: Timepoint (hr) Value: 1
  misc_feature: MA Experiment 20000144 PARAMETER Experiment Name: At_42deg_Heat_cDNA_P Parameter: Tissue Value: Aerial
  misc_feature: MA Experiment ID: 20000171 Result: Up-regulated in Transcription
  misc_feature: MA Experiment 20000171 PARAMETER Experiment Name: At_42deg_Heat_P Parameter: Age (day) Value: 14
  misc_feature: MA Experiment 20000171 PARAMETER Experiment Name: At_42deg_Heat_P Parameter: Organism Value: A. thaliana
  misc_feature: MA Experiment 20000171 PARAMETER Experiment Name: At_42deg_Heat_P Parameter: Plant Line Value: WS
  misc_feature: MA Experiment 20000171 PARAMETER Experiment Name: At_42deg_Heat_P Parameter: Temperature (deg C) Value: 42 vs. 22
  misc_feature: MA Experiment 20000171 PARAMETER Experiment Name: At_42deg_Heat_P Parameter: Timepoint (hr) Value: 1
  misc_feature: MA Experiment 20000171 PARAMETER Experiment Name: At_42deg_Heat_P Parameter: Tissue Value: Aerial
  misc_feature: MA Experiment ID: 20000173 Result: Up-regulated in Transcription
  misc_feature: MA Experiment 20000173 PARAMETER Experiment Name: At_42deg_Heat_P Parameter: Age (day) Value: 14
  misc_feature: MA Experiment 20000173 PARAMETER Experiment Name: At_42deg_Heat_P Parameter: Organism Value: A. thaliana
  misc_feature: MA Experiment 20000173 PARAMETER Experiment Name: At_42deg_Heat_P Parameter: Plant Line Value: WS
  misc_feature: MA Experiment 20000173 PARAMETER Experiment Name: At_42deg_Heat_P Parameter: Temperature (deg C) Value: 42 vs. 22
  misc_feature: MA Experiment 20000173 PARAMETER Experiment Name: At_42deg_Heat_P Parameter: Timepoint (hr) Value: 6
  misc_feature: MA Experiment 20000173 PARAMETER Experiment Name: At_42deg_Heat_P Parameter: Tissue Value: Aerial
  misc_feature: MA Experiment ID: 20000179 Result: Down-regulated in Transcription
  misc_feature: MA Experiment 20000179 PARAMETER Experiment Name: At_Germinating_Seeds_P Parameter: Age (hr) Value: 6 vs. 0
  misc_feature: MA Experiment 20000179 PARAMETER Experiment Name: At_Germinating_Seeds_P Parameter: Tissue Value: Germinating Seeds
  misc_feature: MA Experiment ID: 20000180 Result: Down-regulated in Transcription
  misc_feature: MA Experiment 20000180 PARAMETER Experiment Name: At_Germinating_Seeds_P Parameter: Age (hr) Value: 24 vs. 0
  misc_feature: MA Experiment 20000180 PARAMETER Experiment Name: At_Germinating_Seeds_P Parameter: Tissue Value: Germinating Seeds
  misc_feature: MA Experiment ID: 20000184 Result: Up-regulated in Transcription
  misc_feature: MA Experiment 20000184 PARAMETER Experiment Name: At_Shoots__P Parameter: Age (day) Value: 7
  misc_feature: MA Experiment 20000184 PARAMETER Experiment Name: At_Shoots__P Parameter: Tissue Value: Shoots vs. Whole Plant
  misc_feature: MA Experiment ID: 20000185 Result: Up-regulated in Transcription
  misc_feature: MA Experiment 20000185 PARAMETER Experiment Name: At_Roots__P Parameter: Age (day) Value: 7 vs. 21
  misc_feature: MA Experiment 20000185 PARAMETER Experiment Name: At_Roots__P Parameter: Organism Value: A. thaliana
  misc_feature: MA Experiment 20000185 PARAMETER Experiment Name: At_Roots__P Parameter: Tissue Value: Roots vs. Whole Plant
  misc_feature: MA Experiment ID: 20000436 Result: Up-regulated in Transcription
  misc_feature: MA Experiment 20000436 PARAMETER Experiment Name: At_Drought_P Parameter: Age (day) Value: 7
  misc_feature: MA Experiment 20000436 PARAMETER Experiment Name: At_Drought_P Parameter: Organism Value: A. thaliana
  misc_feature: MA Experiment 20000436 PARAMETER Experiment Name: At_Drought_P Parameter: Plant Line Value: WS
  misc_feature: MA Experiment 20000436 PARAMETER Experiment Name: At_Drought_P Parameter: Timepoint (hr) Value: 12
  misc_feature: MA Experiment 20000436 PARAMETER Experiment Name: At_Drought_P Parameter: Tissue Value: Whole Plant
  misc_feature: MA Experiment 20000436 PARAMETER Experiment Name: At_Drought_P Parameter: Treatment Value: Drought vs. No Drought
  misc_feature: MA Experiment ID: 20000438 Result: Up-regulated in Transcription
  misc_feature: MA Experiment 20000438 PARAMETER Experiment Name: At_Shoots__P Parameter: Age (day) Value: 14
  misc_feature: MA Experiment 20000438 PARAMETER Experiment Name: At_Shoots__P Parameter: Tissue Value: Shoots vs. Whole Plant
  misc_feature: MA Experiment ID: 20000439 Result: Up-regulated in Transcription
  misc_feature: MA Experiment 20000439 PARAMETER Experiment Name: At_Roots__P Parameter: Age (day) Value: 14 vs. 21
  misc_feature: MA Experiment 20000439 PARAMETER Experiment Name: At_Roots__P Parameter: Organism Value: A. thaliana
  misc_feature: MA Experiment 20000439 PARAMETER Experiment Name: At_Roots__P Parameter: Tissue Value: Roots vs. Whole Plant
ctcttgttttctttttccctcttctccaaggaatctggaaaaaattaaaccttttttctaaatccctggaaatcagaaaacttcctattgagaaaccatagattcgatccaagcctttgattgtatcaaaatctctgcttcaccaagaatttgggttgatacagaagaaaaaagttaaatggttgaggcagagcgcgcggagaatagttggattgcttcggaaacgtctccgtcgtcgtctccggtggtaatagaaagcagtgatttttcgataactgatggaatgagagatgtgagcggatttggtatagcttctcgacctcagttggacaagggtttgtcggaaaacaatatagggttcacggaaagagttttctctgccgccggagctgcggttttgtccgccgttactctaaatcctcttgacgttgtcaagactcgattgcaagctcaagccgccggaatgtcgtactctcacccactcagtaactccattggacgcatggcattttttggcccaaacatgatgtttgcagacttgagatgttctccttcatgtgcacgcgctggtgttgaaggtactgtttctatttgcccaccggattgtttccagtacaaaggaacatttgatgtcttcaccaagatcatacgacaggagggtctgggacgcctttggagagggactaatgctggtcttgccctagctgtgcccatggttgggatatatctcccattctatgatatgttccgcaaccggttggaagaattatctcgggagaaagctcctgctatgacattttgtgtgcctactgtggcagggtctttagcgcggtccttagcttgtacagtctgctatcctattgatcttgcaagaacgcgtatgcaggcattcaaagaagcaaaagccggtgtgaagcctccgggagtttttaaaactctagttggtgttttctctgaagtcaggacagcaaataaccttgaaagtagcttgcacaactatcgtggtctctggagaggcttgggtgcacagcttgcccgtgatgttccattctcagcaatctgctggtcgaccctcgagccaataaaaaagaggctccttggagttgcgggcaatgatacaaatcttgttggtgttttcggtgcaaccttttctgctggatttatagctggaagtatcgctgctgctgctacttgtcctcttgacgttgcaagaacaagaagacagatagagaaggaccctggtagggcattgatgatgacgacacgacagacactaatagaggtttggagggatggagggatgagaggactgttcatgggaatgggtccacgagtggcacgtgcaggaccatcggtagggatagtggtttccttctacgaagtggtcaagtatgttctgcatcgccatgcttcatcatgaccctgcaaagtcactaatctcctaaacatggatctgtggatacggctttaggttgtagcttcttttttcaagttaacagaataagttaaacaggctcaatgctccagaaacccgagtttcctctgtttatgagccttaattttgtccagttattaaataccggctgtttttaatgttt

SEQ ID NO: 104068 - protein, 413 aa, Arabidopsis thaliana; identical to SEQ ID NO: 42489
  peptide (1)..(413): Ceres Seq. ID no. 13614236
  misc_feature (1)..(413): Homolog of NCBI NO: 18417093 NR Description: mitochondrial carrier protein family [Arabidopsis >gi|16226567|gb|AAL16202.1|AF428433_1 AT4g27940/T13J8_50 thaliana] >gi|21553497|gb|AAM62590.1| unknown [Arabidopsis
  misc_feature (166)..(351): Homolog of NCBI NO: 7486963 NR Description: hypothetical protein T13J8.50 - Arabidopsis >gi|4455353|emb|CAB36763.1| putative protein [Arabidopsis >gi|7269648|emb|CAB79596.1| putative protein [Arabidopsis
  misc_feature (36)..(162): Homolog of NCBI NO: 7486963 NR Description: hypothetical protein T13J8.50 - Arabidopsis >gi|4455353|emb|CAB36763.1| putative protein [Arabidopsis >gi|7269648|emb|CAB79596.1| putative protein [Arabidopsis
  misc_feature (55)..(412): Homolog of NCBI NO: 40253478 NR Description: putative mitochondrial carrier protein [Oryza
  misc_feature (49)..(408): Homolog of NCBI NO: 30690323 NR Description: mitochondrial carrier protein family [Arabidopsis
  misc_feature (49)..(408): Homolog of NCBI NO: 19310377 NR Description: At2g46320/F11C10.1 [Arabidopsis thaliana]
  misc_feature (49)..(408): Homolog of NCBI NO: 25408981 NR Description: hypothetical protein At2g46320 [imported] - thaliana >gi|20197376|gb|AAM15049.1| hypothetical protein
  misc_feature (139)..(411): Homolog of NCBI NO: 34904154 NR Description: P0417G05.20 [Oryza sativa (japonica
  misc_feature (159)..(408): Homolog of NCBI NO: 30690327 NR Description: mitochondrial carrier protein family [Arabidopsis
  misc_feature (210)..(409): Homolog of NCBI NO: 11359936 NR Description: hypothetical protein DKFZp434C119.1 - human hypothetical protein [Homo sapiens]

SEQ ID NO: 104069 - protein, 378 aa, Arabidopsis thaliana; identical to SEQ ID NO: 42490
  peptide (1)..(378): Ceres Seq. ID no. 13614237
  misc_feature (1)..(378): Homolog of NCBI NO: 18417093 NR Description: mitochondrial carrier protein family [Arabidopsis >gi|16226567|gb|AAL16202.1|AF428433_1 AT4g27940/T13J8_50 thaliana] >gi|21553497|gb|AAM62590.1| unknown [Arabidopsis
  misc_feature (131)..(316): Homolog of NCBI NO: 7486963 NR Description: hypothetical protein T13J8.50 - Arabidopsis >gi|4455353|emb|CAB36763.1| putative protein [Arabidopsis >gi|7269648|emb|CAB79596.1| putative protein [Arabidopsis
  misc_feature (1)..(127): Homolog of NCBI NO: 7486963 NR Description: hypothetical protein T13J8.50 - Arabidopsis >gi|4455353|emb|CAB36763.1| putative protein [Arabidopsis >gi|7269648|emb|CAB79596.1| putative protein [Arabidopsis
  misc_feature (20)..(377): Homolog of NCBI NO: 40253478 NR Description: putative mitochondrial carrier protein [Oryza
  misc_feature (14)..(373): Homolog of NCBI NO: 30690323 NR Description: mitochondrial carrier protein family [Arabidopsis
  misc_feature (14)..(373): Homolog of NCBI NO: 19310377 NR Description: At2g46320/F11C10.1 [Arabidopsis thaliana]
  misc_feature (14)..(373): Homolog of NCBI NO: 25408981 NR Description: hypothetical protein At2g46320 [imported] - thaliana >gi|20197376|gb|AAM15049.1| hypothetical protein
  misc_feature (104)..(376): Homolog of NCBI NO: 34904154 NR Description: P0417G05.20 [Oryza sativa (japonica
  misc_feature (124)..(373): Homolog of NCBI NO: 30690327 NR Description: mitochondrial carrier protein family [Arabidopsis
  misc_feature (175)..(374): Homolog of NCBI NO: 11359936 NR Description: hypothetical protein DKFZp434C119.1 - human hypothetical protein [Homo sapiens]

SEQ ID NO: 104070 - protein, 318 aa, Arabidopsis thaliana; identical to SEQ ID NO: 42491
  peptide (1)..(318): Ceres Seq. ID no. 13614238
  misc_feature (1)..(318): Homolog of NCBI NO: 18417093 NR Description: mitochondrial carrier protein family [Arabidopsis >gi|16226567|gb|AAL16202.1|AF428433_1 AT4g27940/T13J8_50 thaliana] >gi|21553497|gb|AAM62590.1| unknown [Arabidopsis
  misc_feature (71)..(256): Homolog of NCBI NO: 7486963 NR Description: hypothetical protein T13J8.50 - Arabidopsis >gi|4455353|emb|CAB36763.1| putative protein [Arabidopsis >gi|7269648|emb|CAB79596.1| putative protein [Arabidopsis
  misc_feature (1)..(67): Homolog of NCBI NO: 7486963 NR Description: hypothetical protein T13J8.50 - Arabidopsis >gi|4455353|emb|CAB36763.1| putative protein [Arabidopsis >gi|7269648|emb|CAB79596.1| putative protein [Arabidopsis
  misc_feature (1)..(317): Homolog of NCBI NO: 40253478 NR Description: putative mitochondrial carrier protein [Oryza
  misc_feature (1)..(313): Homolog of NCBI NO: 30690323 NR Description: mitochondrial carrier protein family [Arabidopsis
  misc_feature (1)..(313): Homolog of NCBI NO: 19310377 NR Description: At2g46320/F11C10.1 [Arabidopsis thaliana]
  misc_feature (1)..(313): Homolog of NCBI NO: 25408981 NR Description: hypothetical protein At2g46320 [imported] - thaliana >gi|20197376|gb|AAM15049.1| hypothetical protein
  misc_feature (44)..(316): Homolog of NCBI NO: 34904154 NR Description: P0417G05.20 [Oryza sativa (japonica
  misc_feature (64)..(313): Homolog of NCBI NO: 30690327 NR Description: mitochondrial carrier protein family [Arabidopsis
  misc_feature (115)..(314): Homolog of NCBI NO: 11359936 NR Description: hypothetical protein DKFZp434C119.1 - human hypothetical protein [Homo sapiens]

SEQ ID NO: 104071 - DNA, 907 bp, Arabidopsis thaliana
  misc_feature (1)..(907): Ceres Seq. ID no. 13614239
  misc_feature: MA Experiment ID: 108435 Result: Down-regulated in Transcription
  misc_feature: MA Experiment 108435 PARAMETER Experiment Name: At_stm_Mutants_cDNA_P Parameter: Plant Line Value: wt Landsburg vs stm
  misc_feature: MA Experiment 108435 PARAMETER Experiment Name: At_stm_Mutants_cDNA_P Parameter: Tissue Value: Shoot Apical Meristem Region
  misc_feature: MA Experiment ID: 108461 Result: Up-regulated in Transcription
  misc_feature: MA Experiment 108461 PARAMETER Experiment Name: At_Germinating_Seeds_cDNA_P Parameter: Age (day) Value: 1 vs. 0
  misc_feature: MA Experiment 108461 PARAMETER Experiment Name: At_Germinating_Seeds_cDNA_P Parameter: Tissue Value: Germinating Seeds
  misc_feature: MA Experiment ID: 108462 Result: Up-regulated in Transcription
  misc_feature: MA Experiment 108462 PARAMETER Experiment Name: At_Germinating_Seeds_cDNA_P Parameter: Age (day) Value: 2 vs. 0
  misc_feature: MA Experiment 108462 PARAMETER Experiment Name: At_Germinating_Seeds_cDNA_P Parameter: Tissue Value: Germinating Seeds
  misc_feature: MA Experiment ID: 108463 Result: Up-regulated in Transcription
  misc_feature: MA Experiment 108463 PARAMETER Experiment Name: At_Germinating_Seeds_cDNA_P Parameter: Age (day) Value: 3 vs. 0
  misc_feature: MA Experiment 108463 PARAMETER Experiment Name: At_Germinating_Seeds_cDNA_P Parameter: Tissue Value: Germinating Seeds
  misc_feature: MA Experiment ID: 108464 Result: Up-regulated in Transcription
  misc_feature: MA Experiment 108464 PARAMETER Experiment Name: At_Germinating_Seeds_cDNA_P Parameter: Age (day) Value: 4 vs. 0
  misc_feature: MA Experiment 108464 PARAMETER Experiment Name: At_Germinating_Seeds_cDNA_P Parameter: Tissue Value: Germinating Seeds
  misc_feature: MA Experiment ID: 108594 Result: Up-regulated in Transcription
  misc_feature: MA Experiment 108594 PARAMETER Experiment Name: At_Ler-rhl_Root_cDNA_P Parameter: Plant Line Value: null
  misc_feature: MA Experiment ID: 20000180 Result: Up-regulated in Transcription
  misc_feature: MA Experiment 20000180 PARAMETER Experiment Name: At_Germinating_Seeds_P Parameter: Age (hr) Value: 24 vs. 0
  misc_feature: MA Experiment 20000180 PARAMETER Experiment Name: At_Germinating_Seeds_P Parameter: Tissue Value: Germinating Seeds
  misc_feature: MA Experiment ID: 20000264 Result: Down-regulated in Transcription
  misc_feature: MA Experiment 20000264 PARAMETER Experiment Name: At_Open_Flower_P Parameter: Age (day) Value: 21
  misc_feature: MA Experiment 20000264 PARAMETER Experiment Name: At_Open_Flower_P Parameter: Plant Line Value: WS
  misc_feature: MA Experiment 20000264 PARAMETER Experiment Name: At_Open_Flower_P Parameter: Tissue Value: Open Flower vs. Whole Plant
  misc_feature: MA Experiment ID: 20000265 Result: Down-regulated in Transcription
  misc_feature: MA Experiment 20000265 PARAMETER Experiment Name: At_Open_Flower_P Parameter: Age (day) Value: 21
  misc_feature: MA Experiment 20000265 PARAMETER Experiment Name: At_Open_Flower_P Parameter: Plant Line Value: WS
  misc_feature: MA Experiment 20000265 PARAMETER Experiment Name: At_Open_Flower_P Parameter: Tissue Value: Closed Flower vs. Whole Plant
agtccgcgaaaaaatggcgtttctctgttcgtctctcccaagttcatcctctatcgccattttcggcgacccaaacacagatggatcatcacgctcgtatctttcgattccttcattgaagttacggttccgtcccgtcgctgcttcctcacacatttgtgctccagcgatcgacaagtcgactttcgtcatatccgaatcggtgtcagaagatgagctttgggctgcagcttgtctccgcgtacgaaccttcaacgaactcaatccttctgcttacaatatccaagatcatagaagatacttggcagagcgtgaattcgaggcgcttaaggagagaacttcagggaagagggaagggtttacgcgggtcgcttgcataaatgctacccttccattgtcgcaattatcaagctcttttgaggatttatgctctgcatgtaagttctctgatggcatagaagacagagttgtggtgggaagccttgatcttaaccaatgtcgttggcttcctgatgaaattgctggaacaaaaccagaggggattggtgtggattttgctagagcatacttgagcaacgtctgtgttgcaaaagagctgcatcgtaatggagttggttacaaacttattgacaagtctaagagagttgctggagaatggggcataacggatatgtacgtgcatgtgacggtagacaatgaagcagcgaagagtctatacatgaaaagtgggtttgagcaagagaccgctgagccagcgtggcaagctcgatacctcaataggccacaacggctcctcctctggctcgcccttcctacctccccaatcatgtccatgtaattgtaaattttccaatatatccaatatgtcaacctgttcttggcaatcaataaaagctttataactctc

SEQ ID NO: 104072 - protein, 278 aa, Arabidopsis thaliana; identical to SEQ ID NO: 28714
  peptide (1)..(278): Ceres Seq. ID no. 13614240
  misc_feature (150)..(245): Pfam Name: Acetyltransferase (GNAT) family Pfam Description: Acetyltransferase (GNAT) family
  misc_feature (5)..(278): Homolog of NCBI NO: 18417112 NR Description: GCN5-related N-acetyltransferase (GNAT) family thaliana] >gi|15081771|gb|AAK82540.1| AT4g28030/T13J8_140 thaliana] >gi|22137098|gb|AAM91394.1| At4g28030/T13J8_140
  misc_feature (5)..(278): Homolog of NCBI NO: 21536955 NR Description: unknown [Arabidopsis thaliana]
  misc_feature (64)..(270): Homolog of NCBI NO: 28812153 NR Description: B1015H11.33 [Oryza sativa (japonica
  misc_feature (5)..(97): Homolog of NCBI NO: 7486953 NR Description: hypothetical protein T13J8.140 - Arabidopsis >gi|4455362|emb|CAB36772.1| putative protein [Arabidopsis >gi|7269657|emb|CAB79605.1| putative protein [Arabidopsis
  misc_feature (182)..(266): Homolog of NCBI NO: 23126552 NR Description: hypothetical protein [Nostoc punctiforme]
  misc_feature (189)..(266): Homolog of NCBI NO: 17232456 NR Description: hypothetical protein [Nostoc sp. PCC 7120]
  misc_feature (62)..(245): Homolog of NCBI NO: 30678254 NR Description: GCN5-related N-acetyltransferase (GNAT) family thaliana] >gi|27413497|gb|AAO11666.1| hypothetical protein
  misc_feature (172)..(276): Homolog of NCBI NO: 16329719 NR Description: unknown protein [Synechocystis sp. PCC 6803]
  misc_feature (106)..(266): Homolog of NCBI NO: 23041456 NR Description: hypothetical protein [Trichodesmium erythraeum

SEQ ID NO: 104073 - protein, 274 aa, Arabidopsis thaliana; identical to SEQ ID NO: 28715
  peptide (1)..(274): Ceres Seq. ID no. 13614241
  misc_feature (146)..(241): Pfam Name: Acetyltransferase (GNAT) family Pfam Description: Acetyltransferase (GNAT) family
  misc_feature (1)..(274): Homolog of NCBI NO: 18417112 NR Description: GCN5-related N-acetyltransferase (GNAT) family thaliana] >gi|15081771|gb|AAK82540.1| AT4g28030/T13J8_140 thaliana] >gi|22137098|gb|AAM91394.1| At4g28030/T13J8_140
  misc_feature (1)..(274): Homolog of NCBI NO: 21536955 NR Description: unknown [Arabidopsis thaliana]
  misc_feature (60)..(266): Homolog of NCBI NO: 28812153 NR Description: B1015H11.33 [Oryza sativa (japonica
  misc_feature (1)..(93): Homolog of NCBI NO: 7486953 NR Description: hypothetical protein T13J8.140 - Arabidopsis >gi|4455362|emb|CAB36772.1| putative protein [Arabidopsis >gi|7269657|emb|CAB79605.1| putative protein [Arabidopsis
  misc_feature (178)..(262): Homolog of NCBI NO: 23126552 NR Description: hypothetical protein [Nostoc punctiforme]
  misc_feature (185)..(262): Homolog of NCBI NO: 17232456 NR Description: hypothetical protein [Nostoc sp. PCC 7120]
  misc_feature (58)..(241): Homolog of NCBI NO: 30678254 NR Description: GCN5-related N-acetyltransferase (GNAT) family thaliana] >gi|27413497|gb|AAO11666.1| hypothetical protein
  misc_feature (168)..(272): Homolog of NCBI NO: 16329719 NR Description: unknown protein [Synechocystis sp. PCC 6803]
  misc_feature (102)..(262): Homolog of NCBI NO: 23041456 NR Description: hypothetical protein [Trichodesmium erythraeum

SEQ ID NO: 104074 - DNA, 1211 bp, Arabidopsis thaliana
  misc_feature (1)..(1211): Ceres Seq. ID no. 13614242
  misc_feature: MA Experiment ID: 20000184 Result: Up-regulated in Transcription
  misc_feature: MA Experiment 20000184 PARAMETER Experiment Name: At_Shoots__P Parameter: Age (day) Value: 7
  misc_feature: MA Experiment 20000184 PARAMETER Experiment Name: At_Shoots__P Parameter: Tissue Value: Shoots vs. Whole Plant
  misc_feature: MA Experiment ID: 20000495 Result: Up-regulated in Transcription
  misc_feature: MA Experiment 20000495 PARAMETER Experiment Name: At_Guard_Cells_P Parameter: Harvest Date Value: 8/2/2002
  misc_feature: MA Experiment 20000495 PARAMETER Experiment Name: At_Guard_Cells_P Parameter: Organism Value: A. thaliana
  misc_feature: MA Experiment 20000495 PARAMETER Experiment Name: At_Guard_Cells_P Parameter: Tissue Value: Guard Cells vs. Leaves
aggctgcttttcttcgtgaatctcagaatcttaaaagactcagatttgagaaaacgtttcaatatctaaatccatttctctccctctctctttagccatttagaatgaagaaaagtctcactctactcatcctcctcctctgttctctcctcttctccaccgtcttgagcaacctactcgtcgaaccggtccaacccaacaccgtaccagccttccccgtcgaaacccaagctcaaagctgccgacttgacctctccaacgagctattcggtggcgtcaacgaagcttgcggaagaaaccttgaccggagtcgatgttgccctgttttagccgcttggctcttcgcagctcacgctcgctctgctctccagttaccagctcctgctccaacgccggaatcttctgatcccgacgaacccatgaagcctgacgactctcagaagtgcgtcaacacattgcaaagtgcgcttttgactaaacaaatcaagatccctcagcctaattctagctgtgacgcaatcttgtgcttctgtggtattcgtctccaccagattagctcactctcttgtcccgccgctttcaatgtctcctccggcttcaaaaacgcaactccgaccgccgccgtgaagaatcttgaaaaagaatgccggaactcttcttactccggttgtaccagatgcctcggtgctcttcaaaagctaaaggtaagaggaggaaacaagaagacaacaacagagagagggactaagatgatgagcaaagattgccagctcatgggactcacatggctactagctcgtaacaaaacggcatacattcccactgtttcggctgtgttaagagctattatgtatagtccacacccacctcacctcaacaagtgtagtcctgaccaagagaacatgcctttagcagttgactctctacagtttcaaaagagcttctcttcatcatctcatctttttggggttttaccgtttttacccttagtcctttgtatctttctctttctactgtgatttttttctgtattttttggtcgggaggggtaaagagagtcacgtgaagctacaagacagttatgtgtatgtaaatgctgtgctctttttttggttctgcaaactcttaaccctcattttttggttttaactgtgttttgtcccatttaacactttgtacgaggtcttgaaattttaaaaaatcatcttggc

SEQ ID NO: 104075 - protein, 304 aa, Arabidopsis thaliana
  peptide (1)..(304): Ceres Seq. ID no. 13614243
  misc_feature (1)..(304): Homolog of NCBI NO: 18417127 NR Description: expressed protein [Arabidopsis thaliana]
  misc_feature (1)..(304): Homolog of NCBI NO: 21593735 NR Description: unknown [Arabidopsis thaliana]
  misc_feature (10)..(304): Homolog of NCBI NO: 34394002 NR Description: unknown protein [Oryza sativa (japonica
  misc_feature (81)..(283): Homolog of NCBI NO: 18401752 NR Description: expressed protein [Arabidopsis thaliana] emb|CAB36779.1~gene_id:MRC8.3~similar to unknown protein thaliana] >gi|15451206|gb|AAK96874.1| Unknown protein
  misc_feature (4)..(220): Homolog of NCBI NO: 18401752 NR Description: expressed protein [Arabidopsis thaliana] emb|CAB36779.1~gene_id:MRC8.3~similar to unknown protein thaliana] >gi|15451206|gb|AAK96874.1| Unknown protein
MKKSLTLLILLLCSLLFSTVLSNLLVEPVQPNTVPAFPVETQAQSCRLDLSNELFGGVNEACGRNLDRSRCCPVLAAWLFAAHARSALQLPAPAPTPESSDPDEPMKPDDSQKCVNTLQSALLTKQIKIPQPNSSCDAILCFCGIRLHQISSLSCPAAFNVSSGFKNATPTAAVKNLEKECRNSSYSGCTRCLGALQKLKVRGGNKKTTTERGTKMMSKDCQLMGLTWLLARNKTAYIPTVSAVLRAIMYSPHPPHLNKCSPDQENMPLAVDSLQFQKSFSSSSHLFGVLPFLPLVLCIFLFLL

SEQ ID NO: 104076 - protein, 199 aa, Arabidopsis thaliana; identical to SEQ ID NO: 37675
  peptide (1)..(199): Ceres Seq. ID no. 13614244
  misc_feature (1)..(199): Homolog of NCBI NO: 18417127 NR Description: expressed protein [Arabidopsis thaliana]
  misc_feature (1)..(199): Homolog of NCBI NO: 21593735 NR Description: unknown [Arabidopsis thaliana]
  misc_feature (1)..(199): Homolog of NCBI NO: 34394002 NR Description: unknown protein [Oryza sativa (japonica
  misc_feature (1)..(178): Homolog of NCBI NO: 18401752 NR Description: expressed protein [Arabidopsis thaliana] emb|CAB36779.1~gene_id:MRC8.3~similar to unknown protein thaliana] >gi|15451206|gb|AAK96874.1| Unknown protein
  misc_feature (1)..(115): Homolog of NCBI NO: 18401752 NR Description: expressed protein [Arabidopsis thaliana] emb|CAB36779.1~gene_id:MRC8.3~similar to unknown protein thaliana] >gi|15451206|gb|AAK96874.1| Unknown protein

SEQ ID NO: 104077 - DNA, 1215 bp, Arabidopsis thaliana
  misc_feature (1)..(1215): Ceres Seq. ID no. 13614245
  misc_feature: MA Experiment ID: 108434 Result: Down-regulated in Transcription
  misc_feature: MA Experiment 108434 PARAMETER Experiment Name: At_Root_Tips_cDNA_P Parameter: Tissue Value: Root Tips
  misc_feature: MA Experiment ID: 108501 Result: Down-regulated in Transcription
  misc_feature: MA Experiment 108501 PARAMETER Experiment Name: At_ap2_floral_buds_cDNA_P Parameter: Plant Line Value: ap2 (Ler.)
  misc_feature: MA Experiment 108501 PARAMETER Experiment Name: At_ap2_floral_buds_cDNA_P Parameter: Tissue Value: Closed Flower
  misc_feature: MA Experiment ID: 20000171 Result: Up-regulated in Transcription
  misc_feature: MA Experiment 20000171 PARAMETER Experiment Name: At_42deg_Heat_P Parameter: Age (day) Value: 14
  misc_feature: MA Experiment 20000171 PARAMETER Experiment Name: At_42deg_Heat_P Parameter: Organism Value: A. thaliana
  misc_feature: MA Experiment 20000171 PARAMETER Experiment Name: At_42deg_Heat_P Parameter: Plant Line Value: WS
  misc_feature: MA Experiment 20000171 PARAMETER Experiment Name: At_42deg_Heat_P Parameter: Temperature (deg C) Value: 42 vs. 22
  misc_feature: MA Experiment 20000171 PARAMETER Experiment Name: At_42deg_Heat_P Parameter: Timepoint (hr) Value: 1
  misc_feature: MA Experiment 20000171 PARAMETER Experiment Name: At_42deg_Heat_P Parameter: Tissue Value: Aerial
  misc_feature: MA Experiment ID: 20000437 Result: Up-regulated in Transcription
  misc_feature: MA Experiment 20000437 PARAMETER Experiment Name: At_Drought_P Parameter: Age (day) Value: 8
  misc_feature: MA Experiment 20000437 PARAMETER Experiment Name: At_Drought_P Parameter: Organism Value: A. thaliana
  misc_feature: MA Experiment 20000437 PARAMETER Experiment Name: At_Drought_P Parameter: Plant Line Value: WS
  misc_feature: MA Experiment 20000437 PARAMETER Experiment Name: At_Drought_P Parameter: Timepoint (hr) Value: 24
  misc_feature: MA Experiment 20000437 PARAMETER Experiment Name: At_Drought_P Parameter: Tissue Value: Whole Plant
  misc_feature: MA Experiment 20000437 PARAMETER Experiment Name: At_Drought_P Parameter: Treatment Value: Drought vs. No Drought
tttgaaacgtcagggaaagagaatcccgcaatactctctcctctctcttttttttttttttctgggtcgaagtttggttctttgttggataatgatggtttttgacagtgaatctaacctagaccgattcttacgctgcactacaccgattgtgcctgcctattccctcccaaagacacagatcaagaaccttaatcctctatggtatccgttggagagccagagcgtcgagtatttcaggttgggagatttttgggattgtttcgacgagtggagtgcttacggtgcaggtgtccccattgtatcggaaacgggcgaaacattggtccaatactatgttccttacctctctgcaatccagattttcacctctcattctgttatcaatactcttagggaggagacagaatcaggggattcagggagcgagtcgtgtagcgaggagtggagatgggaaggatgttcttcgtctgaagaagggtttgatcatcaagaacctctcgatcgcctcggttactcttacttgcagtatttcgagagatgtacaccttactctagagtccctctcatggataagatcaaagagttgggagaaagatacgtagggttgaggtcattgaggagtgttgatctgtctcctgcgagttggatggctgttgcttggtatccaatctatcacattcccatgaatagaagcataaaagacttgtctacttgcttcctcacttaccacacgctttcttcatctttccaagatgtaaaaagggaagaggagaaggagaggataagtgtgagtgcatttgggatggccacttacaagatgcaagggaggctatgggataatgatagattgctttgctttttgagcgtagcagattcttggctaaagcagctaagggtccaccaccatgacttcacctacttcaccactactactcattatctttgatatatgtagtgttttagatcattacttggttaacagtctatttagctttgttgtttaagagtagcacatatcaataatgttggattgttgttacttgggactctttgggaaggataggtactgactttttcttcacaagacttttatatcataaatttagtttggggtcagattgatgatgatgggctcaatacatttattcttttctaatgttttgtggctttctgtttgtacaaacgcacgttctcttgattttggtatccttc

SEQ ID NO: 104078 - protein, 315 aa, Arabidopsis thaliana
  peptide (1)..(315): Ceres Seq. ID no. 13614246
  misc_feature (38)..(308): Pfam Name: Protein of unknown function (DUF789) Pfam Description: Protein of unknown function (DUF789)
  misc_feature (31)..(315): Homolog of NCBI NO: 18417136 NR Description: expressed protein [Arabidopsis thaliana]
  misc_feature (32)..(315): Homolog of NCBI NO: 21594686 NR Description: unknown [Arabidopsis thaliana]
  misc_feature (31)..(315): Homolog of NCBI NO: 30687867 NR Description: expressed protein [Arabidopsis thaliana]
  misc_feature (58)..(315): Homolog of NCBI NO: 19310572 NR Description: unknown protein [Arabidopsis thaliana]
  misc_feature (24)..(251): Homolog of NCBI NO: 7486201 NR Description: hypothetical protein F26K10.30 - Arabidopsis >gi|7269669|emb|CAB79617.1| putative protein [Arabidopsis
  misc_feature (37)..(308): Homolog of NCBI NO: 18379117 NR Description: expressed protein [Arabidopsis thaliana]
  misc_feature (37)..(308): Homolog of NCBI NO: 18958013 NR Description: At1g03610/F21B7_13 [Arabidopsis thaliana]
  misc_feature (37)..(251): Homolog of NCBI NO: 9280648 NR Description: F21B7.22 [Arabidopsis thaliana]
  misc_feature (225)..(313): Homolog of NCBI NO: 9280648 NR Description: F21B7.22 [Arabidopsis thaliana]
  misc_feature (32)..(279): Homolog of NCBI NO: 22328289 NR Description: expressed protein [Arabidopsis thaliana] AT4g03420/F9H3_4 [Arabidopsis thaliana]
LKRQGKRIPQYSLLSLFFFFLGRSLVLCWIMMVFDSESNLDRFLRCTTPIVPAYSLPKTQIKNLNPLWYPLESQSVEYFRLGDFWDCFDEWSAYGAGVPIVSETGETLVQYYVPYLSAIQIFTSHSVINTLREETESGDSGSESCSEEWRWEGCSSSEEGFDHQEPLDRLGYSYLQYFERCTPYSRVPLMDKIKELGERYVGLRSLRSVDLSPASWMAVAWYPIYHIPMNRSIKDLSTCFLTYHTLSSSFQDVKREEEKERISVSAFGMATYKMQGRLWDNDRLLCFLSVADSWLKQLRVHHHDFTYFTTTTHYL

SEQ ID NO: 104079 - protein, 285 aa, Arabidopsis thaliana; identical to SEQ ID NO: 27729
  peptide (1)..(285): Ceres Seq. ID no. 13614247
  misc_feature (8)..(278): Pfam Name: Protein of unknown function (DUF789) Pfam Description: Protein of unknown function (DUF789)
  misc_feature (1)..(285): Homolog of NCBI NO: 18417136 NR Description: expressed protein [Arabidopsis thaliana]
  misc_feature (2)..(285): Homolog of NCBI NO: 21594686 NR Description: unknown [Arabidopsis thaliana]
  misc_feature (1)..(285): Homolog of NCBI NO: 30687867 NR Description: expressed protein [Arabidopsis thaliana]
  misc_feature (28)..(285): Homolog of NCBI NO: 19310572 NR Description: unknown protein [Arabidopsis thaliana]
  misc_feature (1)..(221): Homolog of NCBI NO: 7486201 NR Description: hypothetical protein F26K10.30 - Arabidopsis >gi|7269669|emb|CAB79617.1| putative protein [Arabidopsis
  misc_feature (7)..(278): Homolog of NCBI NO: 18379117 NR Description: expressed protein [Arabidopsis thaliana]
  misc_feature (7)..(278): Homolog of NCBI NO: 18958013 NR Description: At1g03610/F21B7_13 [Arabidopsis thaliana]
  misc_feature (7)..(221): Homolog of NCBI NO: 9280648 NR Description: F21B7.22 [Arabidopsis thaliana]
  misc_feature (195)..(283): Homolog of NCBI NO: 9280648 NR Description: F21B7.22 [Arabidopsis thaliana]
  misc_feature (2)..(249): Homolog of NCBI NO: 22328289 NR Description: expressed protein [Arabidopsis thaliana] AT4g03420/F9H3_4 [Arabidopsis thaliana]

SEQ ID NO: 104080 - protein, 284 aa, Arabidopsis thaliana; identical to SEQ ID NO: 27730
  peptide (1)..(284): Ceres Seq. ID no. 13614248
  misc_feature (7)..(277): Pfam Name: Protein of unknown function (DUF789) Pfam Description: Protein of unknown function (DUF789)
  misc_feature (1)..(284): Homolog of NCBI NO: 18417136 NR Description: expressed protein [Arabidopsis thaliana]
  misc_feature (1)..(284): Homolog of NCBI NO: 21594686 NR Description: unknown [Arabidopsis thaliana]
  misc_feature (1)..(284): Homolog of NCBI NO: 30687867 NR Description: expressed protein [Arabidopsis thaliana]
  misc_feature (27)..(284): Homolog of NCBI NO: 19310572 NR Description: unknown protein [Arabidopsis thaliana]
  misc_feature (1)..(220): Homolog of NCBI NO: 7486201 NR Description: hypothetical protein F26K10.30 - Arabidopsis >gi|7269669|emb|CAB79617.1| putative protein [Arabidopsis
  misc_feature (6)..(277): Homolog of NCBI NO: 18379117 NR Description: expressed protein [Arabidopsis thaliana]
  misc_feature (6)..(277): Homolog of NCBI NO: 18958013 NR Description: At1g03610/F21B7_13 [Arabidopsis thaliana]
  misc_feature (6)..(220): Homolog of NCBI NO: 9280648 NR Description: F21B7.22 [Arabidopsis thaliana]
  misc_feature (194)..(282): Homolog of NCBI NO: 9280648 NR Description: F21B7.22 [Arabidopsis thaliana]
  misc_feature (1)..(248): Homolog of NCBI NO: 22328289 NR Description: expressed protein [Arabidopsis thaliana] AT4g03420/F9H3_4 [Arabidopsis thaliana]

SEQ ID NO: 104081 - DNA, 1388 bp, Arabidopsis thaliana
  misc_feature (1)..(1388): Ceres Seq. ID no. 13614266
  misc_feature: MA Experiment ID: 108573 Result: Up-regulated in Transcription
  misc_feature: MA Experiment 108573 PARAMETER Experiment Name: At_Drought_cDNA_P Parameter: Timepoint (hr) Value: 6
  misc_feature: MA Experiment 108573 PARAMETER Experiment Name: At_Drought_cDNA_P Parameter: Tissue Value: Aerial
  misc_feature: MA Experiment 108573 PARAMETER Experiment Name: At_Drought_cDNA_P Parameter: Treatment Value: Drought vs. No Drought
  misc_feature: MA Experiment ID: 108576 Result: Up-regulated in Transcription
  misc_feature: MA Experiment 108576 PARAMETER Experiment Name: At_42deg_Heat_cDNA_P Parameter: Temperature (deg C) Value: 42 vs. 22
  misc_feature: MA Experiment 108576 PARAMETER Experiment Name: At_42deg_Heat_cDNA_P Parameter: Timepoint (hr) Value: 1
  misc_feature: MA Experiment 108576 PARAMETER Experiment Name: At_42deg_Heat_cDNA_P Parameter: Tissue Value: Aerial
  misc_feature: MA Experiment ID: 108577 Result: Up-regulated in Transcription
  misc_feature: MA Experiment 108577 PARAMETER Experiment Name: At_42deg_Heat_cDNA_P Parameter: Temperature (deg C) Value: 42 vs. 22
  misc_feature: MA Experiment 108577 PARAMETER Experiment Name: At_42deg_Heat_cDNA_P Parameter: Timepoint (hr) Value: 6
  misc_feature: MA Experiment 108577 PARAMETER Experiment Name: At_42deg_Heat_cDNA_P Parameter: Tissue Value: Aerial
  misc_feature: MA Experiment ID: 20000093 Result: Up-regulated in Transcription
  misc_feature: MA Experiment 20000093 PARAMETER Experiment Name: At_42deg_Heat_cDNA_P Parameter: Temperature (deg C) Value: 42 vs. 22
  misc_feature: MA Experiment 20000093 PARAMETER Experiment Name: At_42deg_Heat_cDNA_P Parameter: Timepoint (hr) Value: 0.5
  misc_feature: MA Experiment 20000093 PARAMETER Experiment Name: At_42deg_Heat_cDNA_P Parameter: Tissue Value: Aerial
  misc_feature: MA Experiment ID: 20000111 Result: Up-regulated in Transcription
  misc_feature: MA Experiment 20000111 PARAMETER Experiment Name: At_42deg_Heat_cDNA_P Parameter: Temperature (deg C) Value: 42 vs. 22
  misc_feature: MA Experiment 20000111 PARAMETER Experiment Name: At_42deg_Heat_cDNA_P Parameter: Timepoint (hr) Value: 6
  misc_feature: MA Experiment 20000111 PARAMETER Experiment Name: At_42deg_Heat_cDNA_P Parameter: Tissue Value: Aerial
  misc_feature: MA Experiment ID: 20000112 Result: Up-regulated in Transcription
  misc_feature: MA Experiment 20000112 PARAMETER Experiment Name: At_42deg_Heat_cDNA_P Parameter: Temperature (deg C) Value: 42 vs. 22
  misc_feature: MA Experiment 20000112 PARAMETER Experiment Name: At_42deg_Heat_cDNA_P Parameter: Timepoint (hr) Value: 2
  misc_feature: MA Experiment 20000112 PARAMETER Experiment Name: At_42deg_Heat_cDNA_P Parameter: Tissue Value: Aerial
  misc_feature: MA Experiment ID: 20000113 Result: Up-regulated in Transcription
  misc_feature: MA Experiment 20000113 PARAMETER Experiment Name: At_42deg_Heat_cDNA_P Parameter: Temperature (deg C) Value: 42 vs. 22
  misc_feature: MA Experiment 20000113 PARAMETER Experiment Name: At_42deg_Heat_cDNA_P Parameter: Timepoint (hr) Value: 8
  misc_feature: MA Experiment 20000113 PARAMETER Experiment Name: At_42deg_Heat_cDNA_P Parameter: Tissue Value: Aerial
  misc_feature: MA Experiment ID: 20000144 Result: Up-regulated in Transcription
  misc_feature: MA Experiment 20000144 PARAMETER Experiment Name: At_42deg_Heat_cDNA_P Parameter: Temperature (deg C) Value: 42 vs. 22
  misc_feature: MA Experiment 20000144 PARAMETER Experiment Name: At_42deg_Heat_cDNA_P Parameter: Timepoint (hr) Value: 1
  misc_feature: MA Experiment 20000144 PARAMETER Experiment Name: At_42deg_Heat_cDNA_P Parameter: Tissue Value: Aerial
  misc_feature: MA Experiment ID: 20000171 Result: Up-regulated in Transcription
  misc_feature: MA Experiment 20000171 PARAMETER Experiment Name: At_42deg_Heat_P Parameter: Age (day) Value: 14
  misc_feature: MA Experiment 20000171 PARAMETER Experiment Name: At_42deg_Heat_P Parameter: Organism Value: A. thaliana
  misc_feature: MA Experiment 20000171 PARAMETER Experiment Name: At_42deg_Heat_P Parameter: Plant Line Value: WS
  misc_feature: MA Experiment 20000171 PARAMETER Experiment Name: At_42deg_Heat_P Parameter: Temperature (deg C) Value: 42 vs. 22
  misc_feature: MA Experiment 20000171 PARAMETER Experiment Name: At_42deg_Heat_P Parameter: Timepoint (hr) Value: 1
  misc_feature: MA Experiment 20000171 PARAMETER Experiment Name: At_42deg_Heat_P Parameter: Tissue Value: Aerial
  misc_feature: MA Experiment ID: 20000173 Result: Up-regulated in Transcription
  misc_feature: MA Experiment 20000173 PARAMETER Experiment Name: At_42deg_Heat_P Parameter: Age (day) Value: 14
  misc_feature: MA Experiment 20000173 PARAMETER Experiment Name: At_42deg_Heat_P Parameter: Organism Value: A. thaliana
  misc_feature: MA Experiment 20000173 PARAMETER Experiment Name: At_42deg_Heat_P Parameter: Plant Line Value: WS
  misc_feature: MA Experiment 20000173 PARAMETER Experiment Name: At_42deg_Heat_P Parameter: Temperature (deg C) Value: 42 vs. 22
  misc_feature: MA Experiment 20000173 PARAMETER Experiment Name: At_42deg_Heat_P Parameter: Timepoint (hr) Value: 6
  misc_feature: MA Experiment 20000173 PARAMETER Experiment Name: At_42deg_Heat_P Parameter: Tissue Value: Aerial
  misc_feature: MA Experiment ID: 20000185 Result: Down-regulated in Transcription
  misc_feature: MA Experiment 20000185 PARAMETER Experiment Name: At_Roots__P Parameter: Age (day) Value: 7 vs. 21
  misc_feature: MA Experiment 20000185 PARAMETER Experiment Name: At_Roots__P Parameter: Organism Value: A. thaliana
  misc_feature: MA Experiment 20000185 PARAMETER Experiment Name: At_Roots__P Parameter: Tissue Value: Roots vs. Whole Plant
  misc_feature: MA Experiment ID: 20000227 Result: Down-regulated in Transcription
  misc_feature: MA Experiment 20000227 PARAMETER Experiment Name: At_Root-Tips-vs-Tops_P Parameter: Tissue Value: Root Tips vs. Root Tops
  misc_feature: MA Experiment ID: 20000234 Result: Down-regulated in Transcription
  misc_feature: MA Experiment 20000234 PARAMETER Experiment Name: At_Siliques_P Parameter: Age (day) Value: 21
  misc_feature: MA Experiment 20000234 PARAMETER Experiment Name: At_Siliques_P Parameter: Organism Value: A. thaliana
  misc_feature: MA Experiment 20000234 PARAMETER Experiment Name: At_Siliques_P Parameter: Plant Line Value: WS
  misc_feature: MA Experiment 20000234 PARAMETER Experiment Name: At_Siliques_P Parameter: Tissue Value: Less Than 5mm Siliques vs. Whole Plant
  misc_feature: MA Experiment ID: 20000235 Result: Down-regulated in Transcription
  misc_feature: MA Experiment 20000235 PARAMETER Experiment Name: At_Siliques_P Parameter: Age (day) Value: 21
  misc_feature: MA Experiment 20000235 PARAMETER Experiment Name: At_Siliques_P Parameter: Organism Value: A. thaliana
  misc_feature: MA Experiment 20000235 PARAMETER Experiment Name: At_Siliques_P Parameter: Plant Line Value: WS
  misc_feature: MA Experiment 20000235 PARAMETER Experiment Name: At_Siliques_P Parameter: Tissue Value: 5-10mm Siliques vs. Whole Plant
  misc_feature: MA Experiment ID: 20000264 Result: Down-regulated in Transcription
  misc_feature: MA Experiment 20000264 PARAMETER Experiment Name: At_Open_Flower_P Parameter: Age (day) Value: 21
  misc_feature: MA Experiment 20000264 PARAMETER Experiment Name: At_Open_Flower_P Parameter: Plant Line Value: WS
  misc_feature: MA Experiment 20000264 PARAMETER Experiment Name: At_Open_Flower_P Parameter: Tissue Value: Open Flower vs. Whole Plant
  misc_feature: MA Experiment ID: 20000265 Result: Down-regulated in Transcription
  misc_feature: MA Experiment 20000265 PARAMETER Experiment Name: At_Open_Flower_P Parameter: Age (day) Value: 21
  misc_feature: MA Experiment 20000265 PARAMETER Experiment Name: At_Open_Flower_P Parameter: Plant Line Value: WS
  misc_feature: MA Experiment 20000265 PARAMETER Experiment Name: At_Open_Flower_P Parameter: Tissue Value: Closed Flower vs. Whole Plant
  misc_feature: MA Experiment ID: 20000438 Result: Down-regulated in Transcription
  misc_feature: MA Experiment 20000438 PARAMETER Experiment Name: At_Shoots__P Parameter: Age (day) Value: 14
  misc_feature: MA Experiment 20000438 PARAMETER Experiment Name: At_Shoots__P Parameter: Tissue Value: Shoots vs. Whole Plant
  misc_feature: MA Experiment ID: 20001558 Result: Down-regulated in Transcription
  misc_feature: MA Experiment 20001558 PARAMETER Experiment Name: At_Drought_Soil_Dry_P Parameter: Age (day) Value: 27
  misc_feature: MA Experiment 20001558 PARAMETER Experiment Name: At_Drought_Soil_Dry_P Parameter: Organism Value: A. thaliana
  misc_feature: MA Experiment 20001558 PARAMETER Experiment Name: At_Drought_Soil_Dry_P Parameter: Plant Line Value: WS
  misc_feature: MA Experiment 20001558 PARAMETER Experiment Name: At_Drought_Soil_Dry_P Parameter: Post Timepoint (hr) Value: 6
  misc_feature: MA Experiment 20001558 PARAMETER Experiment Name: At_Drought_Soil_Dry_P Parameter: Post-Treatment Value: Re-Water vs. No Drought
  misc_feature: MA Experiment 20001558 PARAMETER Experiment Name: At_Drought_Soil_Dry_P Parameter: Timepoint (day) Value: 13
  misc_feature: MA Experiment 20001558 PARAMETER Experiment Name: At_Drought_Soil_Dry_P Parameter: Treatment Value: Drought vs. No Drought
  misc_feature: MA Experiment ID: 20001911 Result: Up-regulated in Transcription
  misc_feature: MA Experiment 20001911 PARAMETER Experiment Name: At_Drought_Reproduction_P Parameter: Age (day) Value: 40
  misc_feature: MA Experiment 20001911 PARAMETER Experiment Name: At_Drought_Reproduction_P Parameter: Organism Value: A. thaliana
  misc_feature: MA Experiment 20001911 PARAMETER Experiment Name: At_Drought_Reproduction_P Parameter: Plant Line Value: WS
  misc_feature: MA Experiment 20001911 PARAMETER Experiment Name: At_Drought_Reproduction_P Parameter: Timepoint (day) Value: 10
  misc_feature: MA Experiment 20001911 PARAMETER Experiment Name: At_Drought_Reproduction_P Parameter: Tissue Value: Flowers
  misc_feature: MA Experiment 20001911 PARAMETER Experiment Name: At_Drought_Reproduction_P Parameter: Treatment Value: Drought vs. No Drought
ctctctctctcgttaacgcttcggcgaaaaatccacgagtcagcttttactgatttgtacaaaaaatggatggatcaaagcatccatcagtctttcagaagctacatggacaatcttacttgatcaatagactttctccgagtgtgcaagctcgtggttactgtgtctctggtgcttatgtcaatggaggtttgcagagtctattgcagccaactagccatggcgttggctcgtctcttatacctcatggttcatttcctgtattagctcacgctcctagtgagaaaactggtactggtttcttgatcgatttccttatgggaggagtctcagctgctgtttcgaagacggcagccgcgcctatagagcgtgtgaagctcttgattcagaatcaagatgaaatgatcaaagctgggcgtctctctgagccatataaaggaatcagtgattgttttgctcgaacagtcaaagacgaaggaatgcttgctctttggagaggaaacactgccaatgttatcagatacttccccactcaggctttaaactttgcgttcaaagattacttcaagaggctgtttaacttcaagaaagaaaaagatggctactggaagtggtttgcagggaacctggcgtctggtggtgcagctggtgcatcatctctgctttttgtgtactctttggattacgctcgtacccgtttagccaatgatgcgaaggcggccaagaaaggtggtcagcggcagtttaatggcatggtcgacgtgtacaagaagactatagcctctgatggcattgtcgggctttaccgtggtttcaacatctcatgcgttggaattgtcgtgtaccgggggctttactttggattgtatgattccttgaagcctgtggttctagttgatggtctccaggatagcttccttgctagtttcttactgggatggggaatcaccattggagctggattggcgtcttacccaattgacacggttcgcagaagaatgatgatgacgtcaggtgaagcagtgaagtacaagagctctcttcaggccttctctcagatcgtcaagaacgaaggggccaagtcactcttcaagggtgcaggtgccaacatccttcgtgcggttgcaggcgctggtgtactggccggctatgacaagctccagctcattgtgttgggtaagaagtatggctctggtggtggctaaacgatgaggatgatgaaagaatagcccttgaggtctgtgaatgaataaagcagtgtgtccgttcgtataaatgttgcttttagaatatagagtgtctctgtcaagttgtggccctttgtcttagttctatacttctatgacttttgttgacaaaagaataaatacaaagaaaaccaataccat

SEQ ID NO: 104082 - protein, 379 aa, Arabidopsis thaliana; identical to SEQ ID NO: 37651
  peptide (1)..(379): Ceres Seq. ID no. 13614267
  misc_feature (1)..(379): Homolog of NCBI NO: 15235280 NR Description: mitochondrial ADP,ATP carrier protein, putative
  misc_feature (1)..(379): Homolog of NCBI NO: 21593729 NR Description: ADP,ATP carrier-like protein [Arabidopsis
  misc_feature (4)..(378): Homolog of NCBI NO: 399015 NR Description: ADP,ATP carrier protein, mitochondrial precursor translocase) (Adenine nucleotide translocator) (ANT)
  misc_feature (2)..(378): Homolog of NCBI NO: 100424 NR Description: ADP,ATP carrier protein precursor - potato
  misc_feature (2)..(378): Homolog of NCBI NO: 113456 NR Description: ADP,ATP carrier protein 1, mitochondrial (ADP/ATP translocase 1) (Adenine nucleotide translocator 1) (ANT
  misc_feature (2)..(378): Homolog of NCBI NO: 113460 NR Description: ADP,ATP carrier protein 2, mitochondrial (ADP/ATP translocase 2) (Adenine nucleotide translocator 2) (ANT
  misc_feature (4)..(378): Homolog of NCBI NO: 485517 NR Description: ADP,ATP carrier protein - rice
  misc_feature (1)..(378): Homolog of NCBI NO: 3334115 NR Description: ADP,ATP carrier protein 1, mitochondrial (ADP/ATP translocase 1) (Adenine nucleotide translocator 1) (ANT
  misc_feature (2)..(378): Homolog of NCBI NO: 113457 NR Description: ADP,ATP carrier protein, mitochondrial precursor translocase) (Adenine nucleotide translocator) (ANT)
  misc_feature (2)..(378): Homolog of NCBI NO: 22166 NR Description: adenine nucleotide translocator [Zea mays]

SEQ ID NO: 104083 - protein, 295 aa, Arabidopsis thaliana; identical to SEQ ID NO: 37652
  peptide (1)..(295): Ceres Seq. ID no. 13614268
  misc_feature (1)..(295): Homolog of NCBI NO: 15235280 NR Description: mitochondrial ADP,ATP carrier protein, putative
  misc_feature (1)..(295): Homolog of NCBI NO: 21593729 NR Description: ADP,ATP carrier-like protein [Arabidopsis
  misc_feature (1)..(294): Homolog of NCBI NO: 399015 NR Description: ADP,ATP carrier protein, mitochondrial precursor translocase) (Adenine nucleotide translocator) (ANT)
  misc_feature (1)..(294): Homolog of NCBI NO: 100424 NR Description: ADP,ATP carrier protein precursor - potato
  misc_feature (1)..(294): Homolog of NCBI NO: 113456 NR Description: ADP,ATP carrier protein 1, mitochondrial (ADP/ATP translocase 1) (Adenine nucleotide translocator 1) (ANT
  misc_feature (1)..(294): Homolog of NCBI NO: 113460 NR Description: ADP,ATP carrier protein 2, mitochondrial (ADP/ATP translocase 2) (Adenine nucleotide translocator 2) (ANT
  misc_feature (1)..(294): Homolog of NCBI NO: 485517 NR Description: ADP,ATP carrier protein - rice
  misc_feature (1)..(294): Homolog of NCBI NO: 3334115 NR Description: ADP,ATP carrier protein 1, mitochondrial (ADP/ATP translocase 1) (Adenine nucleotide translocator 1) (ANT
  misc_feature (1)..(294): Homolog of NCBI NO: 113457 NR Description: ADP,ATP carrier protein, mitochondrial precursor translocase) (Adenine nucleotide translocator) (ANT)
  misc_feature (1)..(294): Homolog of NCBI NO: 22166 NR Description: adenine nucleotide translocator [Zea mays]

SEQ ID NO: 104084 - protein, 267 aa, Arabidopsis thaliana; identical to SEQ ID NO: 37653
  peptide (1)..(267): Ceres Seq. ID no. 13614269
  misc_feature (1)..(267): Homolog of NCBI NO: 15235280 NR Description: mitochondrial ADP,ATP carrier protein, putative
  misc_feature (1)..(267): Homolog of NCBI NO: 21593729 NR Description: ADP,ATP carrier-like protein [Arabidopsis
  misc_feature (1)..(266): Homolog of NCBI NO: 399015 NR Description: ADP,ATP carrier protein, mitochondrial precursor translocase) (Adenine nucleotide translocator) (ANT)
  misc_feature (1)..(266): Homolog of NCBI NO: 100424 NR Description: ADP,ATP carrier protein precursor - potato
  misc_feature (1)..(266): Homolog of NCBI NO: 113456 NR Description: ADP,ATP carrier protein 1, mitochondrial (ADP/ATP translocase 1) (Adenine nucleotide translocator 1) (ANT
  misc_feature (1)..(266): Homolog of NCBI NO: 113460 NR Description: ADP,ATP carrier protein 2, mitochondrial (ADP/ATP translocase 2) (Adenine nucleotide translocator 2) (ANT
  misc_feature (1)..(266): Homolog of NCBI NO: 485517 NR Description: ADP,ATP carrier protein - rice
  misc_feature (1)..(266): Homolog of NCBI NO: 3334115 NR Description: ADP,ATP carrier protein 1, mitochondrial (ADP/ATP translocase 1) (Adenine nucleotide translocator 1) (ANT
  misc_feature (1)..(266): Homolog of NCBI NO: 113457 NR Description: ADP,ATP carrier protein, mitochondrial precursor translocase) (Adenine nucleotide translocator) (ANT)
  misc_feature (1)..(266): Homolog of NCBI NO: 22166 NR Description: adenine nucleotide translocator [Zea mays]

SEQ ID NO: 104085 - DNA, 1284 bp, Arabidopsis thaliana
  misc_feature (1)..(1284): Ceres Seq. ID no. 13614270
  misc_feature: MA Experiment ID: 108464 Result: Up-regulated in Transcription
  misc_feature: MA Experiment 108464 PARAMETER Experiment Name: At_Germinating_Seeds_cDNA_P Parameter: Age (day) Value: 4 vs. 0
  misc_feature: MA Experiment 108464 PARAMETER Experiment Name: At_Germinating_Seeds_cDNA_P Parameter: Tissue Value: Germinating Seeds
  misc_feature: MA Experiment ID: 108489 Result: Up-regulated in Transcription
  misc_feature: MA Experiment ID: 20000171 Result: Up-regulated in Transcription
  misc_feature: MA Experiment 20000171 PARAMETER Experiment Name: At_42deg_Heat_P Parameter: Age (day) Value: 14
  misc_feature: MA Experiment 20000171 PARAMETER Experiment Name: At_42deg_Heat_P Parameter: Organism Value: A. thaliana
  misc_feature: MA Experiment 20000171 PARAMETER Experiment Name: At_42deg_Heat_P Parameter: Plant Line Value: WS
  misc_feature: MA Experiment 20000171 PARAMETER Experiment Name: At_42deg_Heat_P Parameter: Temperature (deg C) Value: 42 vs. 22
  misc_feature: MA Experiment 20000171 PARAMETER Experiment Name: At_42deg_Heat_P Parameter: Timepoint (hr) Value: 1
  misc_feature: MA Experiment 20000171 PARAMETER Experiment Name: At_42deg_Heat_P Parameter: Tissue Value: Aerial
  misc_feature: MA Experiment ID: 20000264 Result: Up-regulated in Transcription
  misc_feature: MA Experiment 20000264 PARAMETER Experiment Name: At_Open_Flower_P Parameter: Age (day) Value: 21
  misc_feature: MA Experiment 20000264 PARAMETER Experiment Name: At_Open_Flower_P Parameter: Plant Line Value: WS
  misc_feature: MA Experiment 20000264 PARAMETER Experiment Name: At_Open_Flower_P Parameter: Tissue Value: Open Flower vs. Whole Plant
  misc_feature: MA Experiment ID: 20000794 Result: Up-regulated in Transcription
  misc_feature: MA Experiment 20000794 PARAMETER Experiment Name: At_Petals_P Parameter: Age (day) Value: 23-25 days
  misc_feature: MA Experiment 20000794 PARAMETER Experiment Name: At_Petals_P Parameter: Plant Line Value: WS
  misc_feature: MA Experiment 20000794 PARAMETER Experiment Name: At_Petals_P Parameter: Tissue Value: Petals vs. Whole plant
  misc_feature: MA Experiment ID: 20001905 Result: Up-regulated in Transcription
  misc_feature: MA Experiment 20001905 PARAMETER Experiment Name: At_Drought_Reproduction_P Parameter: Age (day) Value: 40
  misc_feature: MA Experiment 20001905 PARAMETER Experiment Name: At_Drought_Reproduction_P Parameter: Organism Value: A. thaliana
  misc_feature: MA Experiment 20001905 PARAMETER Experiment Name: At_Drought_Reproduction_P Parameter: Plant Line Value: WS
  misc_feature: MA Experiment 20001905 PARAMETER Experiment Name: At_Drought_Reproduction_P Parameter: Timepoint (day) Value: 10
  misc_feature: MA Experiment 20001905 PARAMETER Experiment Name: At_Drought_Reproduction_P Parameter: Tissue Value: Rosettes
  misc_feature: MA Experiment 20001905 PARAMETER Experiment Name: At_Drought_Reproduction_P Parameter: Treatment Value: Drought vs. No Drought
ttgttgatattactctcttaaatatatattttcgtacattaacacagacatatataaagctaaagatttcttcacgtaatgggtttgaaagatattgggtccaaattgccaccggggtttcgatttcatccaagtgatgaagagttggtttgtcattatctttgcaacaagattagggccaaatctgatcatggtgatgttgatgatgatgatgatgatgttgatgaagctttgaagggttctactgatcttgtggagattgacttgcatatctgtgagccatgggagcttcctgatgtggcaaagttaaacgcaaaggaatggtacttcttcagtttccgtgatcgaaagtatgctactggatatcgcacgaacagagcgacagtaagcggatactggaaagcaacaggaaaagatcgaacggtgatggatccacgtacaaggcaattggtagggatgagaaaaacactagtgttctacagaaacagagcaccaaatgggatcaaaactacttggatcatgcacgagttccgtcttgagtgtcctaacatcccacctaaggaagactgggtcttgtgcagagtgttcaacaaaggcagagactcatcgctacaagacaataattattataacaatgataatcagacgcaaaggcttgaagttaatgacgctccggatcttaattacaacaatcagttgccacctttgctatcatcccctcctcataatcatcaacatgagaagatgaaaatccaagtttgtgatcagtgggagcagctaatgaagcagccttcaaggaccaccggccacccctatcatcaccattgtcatcatcaaaccatagcatgtggttgggagcagatgatgatcggttcgctgtcatcaccttcgagtcatggccctgatcacgagtccttgctaaatttgctttacgtcgacaataacaacagtgtcaacatcagtggtgatcatcatcagaattatgagaagattttgttgtcatcactagacatgacgagtttggatcacgacaagacatgtatgggatcatcatcggatggtggtatggtctctgatcttcacatggaatgtggtggattgagttttgagaccgaaaatatcctcgctttccaatgaacataattcaaggggttcgccaatttgttgattcgtgaattatacaaacattttatctatagatttatcacattatcaaacatgtaagttgtgtggcatttgggtatagggtttgtgtgattctaggtttttaggacgatgtatgtt

SEQ ID NO: 104086 - protein, 352 aa, Arabidopsis thaliana; identical to SEQ ID NO: 23194
  peptide (1)..(352): Ceres Seq. ID no. 13614271
  misc_feature (10)..(154): Pfam Name: No apical meristem (NAM) protein Pfam Description: No apical meristem (NAM) protein
  misc_feature (1)..(352): Homolog of NCBI NO: 18417214 NR Description: No apical meristem (NAM) protein family
  misc_feature (1)..(352): Homolog of NCBI NO: 21593065 NR Description: NAM / CUC2-like protein [Arabidopsis thaliana]
  misc_feature (156)..(352): Homolog of NCBI NO: 7485899 NR Description: hypothetical protein F20O9.220 - Arabidopsis
  misc_feature (1)..(284): Homolog of NCBI NO: 7485899 NR Description: hypothetical protein F20O9.220 - Arabidopsis
  misc_feature (1)..(181): Homolog of NCBI NO: 32482946 NR Description: OSJNBb0072M01.11 [Oryza sativa (japonica
  misc_feature (2)..(215): Homolog of NCBI NO: 37535380 NR Description: putative NAM (no apical meristem) protein [Oryza
  misc_feature (58)..(177): Homolog of NCBI NO: 15148912 NR Description: NAC domain protein NAC1 [Phaseolus vulgaris]
  misc_feature (6)..(32): Homolog of NCBI NO: 15148912 NR Description: NAC domain protein NAC1 [Phaseolus vulgaris]
  misc_feature (10)..(225): Homolog of NCBI NO: 15224139 NR Description: No apical meristem (NAM) protein family thaliana] >gi|30682415|ref|NP_850054.1| No apical meristem (NAM) family [Arabidopsis thaliana] >gi|25352290|pir||E84636 NAM (no
  misc_feature (6)..(213): Homolog of NCBI NO: 38636961 NR Description: putative NAC domain protein NAC1 [Oryza sativa

SEQ ID NO: 104087 - protein, 236 aa, Arabidopsis thaliana; identical to SEQ ID NO: 23195
  peptide (1)..(236): Ceres Seq. ID no. 13614272
  misc_feature (1)..(236): Homolog of NCBI NO: 18417214 NR Description: No apical meristem (NAM) protein family
  misc_feature (1)..(236): Homolog of NCBI NO: 21593065 NR Description: NAM / CUC2-like protein [Arabidopsis thaliana]
  misc_feature (40)..(236): Homolog of NCBI NO: 7485899 NR Description: hypothetical protein F20O9.220 - Arabidopsis
  misc_feature (1)..(168): Homolog of NCBI NO: 7485899 NR Description: hypothetical protein F20O9.220 - Arabidopsis
  misc_feature (1)..(65): Homolog of NCBI NO: 32482946 NR Description: OSJNBb0072M01.11 [Oryza sativa (japonica
  misc_feature (1)..(99): Homolog of NCBI NO: 37535380 NR Description: putative NAM (no apical meristem) protein [Oryza
  misc_feature (1)..(61): Homolog of NCBI NO: 15148912 NR Description: NAC domain protein NAC1 [Phaseolus vulgaris]
  misc_feature (1)..(109): Homolog of NCBI NO: 15224139 NR Description: No apical meristem (NAM) protein family thaliana] >gi|30682415|ref|NP_850054.1| No apical meristem (NAM) family [Arabidopsis thaliana] >gi|25352290|pir||E84636 NAM (no
  misc_feature (1)..(97): Homolog of NCBI NO: 38636961 NR Description: putative NAC domain protein NAC1 [Oryza sativa
  misc_feature (1)..(100): Homolog of NCBI NO: 15222818 NR Description: NAC1 / No apical meristem (NAM) protein family thaliana] >gi|6649236|gb|AAF21437.1|AF198054_1 NAC1 [Arabidopsis >gi|8778319|gb|AAF79328.1|AC002304_21 F14J16.32 [Arabidopsis

SEQ ID NO: 104088 - protein, 226 aa, Arabidopsis thaliana; identical to SEQ ID NO: 23196
  peptide (1)..(226): Ceres Seq. ID no. 13614273
  misc_feature (1)..(226): Homolog of NCBI NO: 18417214 NR Description: No apical meristem (NAM) protein family
  misc_feature (1)..(226): Homolog of NCBI NO: 21593065 NR Description: NAM / CUC2-like protein [Arabidopsis thaliana]
  misc_feature (30)..(226): Homolog of NCBI NO: 7485899 NR Description: hypothetical protein F20O9.220 - Arabidopsis
  misc_feature (1)..(158): Homolog of NCBI NO: 7485899 NR Description: hypothetical protein F20O9.220 - Arabidopsis
  misc_feature (1)..(55): Homolog of NCBI NO: 32482946 NR Description: OSJNBb0072M01.11 [Oryza sativa (japonica
  misc_feature (1)..(89): Homolog of NCBI NO: 37535380 NR Description: putative NAM (no apical meristem) protein [Oryza
  misc_feature (1)..(51): Homolog of NCBI NO: 15148912 NR Description: NAC domain protein NAC1 [Phaseolus vulgaris]
  misc_feature (1)..(99): Homolog of NCBI NO: 15224139 NR Description: No apical meristem (NAM) protein family thaliana] >gi|30682415|ref|NP_850054.1| No apical meristem (NAM) family [Arabidopsis thaliana] >gi|25352290|pir||E84636 NAM (no
  misc_feature (1)..(87): Homolog of NCBI NO: 38636961 NR Description: putative NAC domain protein NAC1 [Oryza sativa
  misc_feature (1)..(90): Homolog of NCBI NO: 15222818 NR Description: NAC1 / No apical meristem (NAM) protein family thaliana] >gi|6649236|gb|AAF21437.1|AF198054_1 NAC1 [Arabidopsis >gi|8778319|gb|AAF79328.1|AC002304_21 F14J16.32 [Arabidopsis

SEQ ID NO: 104089 - DNA, 2034 bp, Arabidopsis thaliana
  misc_feature (1)..(2034): Ceres Seq. ID no. 13614285
  misc_feature: MA Experiment ID: 20000185 Result: Up-regulated in Transcription
  misc_feature: MA Experiment 20000185 PARAMETER Experiment Name: At_Roots__P Parameter: Age (day) Value: 7 vs. 21
  misc_feature: MA Experiment 20000185 PARAMETER Experiment Name: At_Roots__P Parameter: Organism Value: A. thaliana
  misc_feature: MA Experiment 20000185 PARAMETER Experiment Name: At_Roots__P Parameter: Tissue Value: Roots vs. Whole Plant
  misc_feature: MA Experiment ID: 20000264 Result: Up-regulated in Transcription
  misc_feature: MA Experiment 20000264 PARAMETER Experiment Name: At_Open_Flower_P Parameter: Age (day) Value: 21
  misc_feature: MA Experiment 20000264 PARAMETER Experiment Name: At_Open_Flower_P Parameter: Plant Line Value: WS
  misc_feature: MA Experiment 20000264 PARAMETER Experiment Name: At_Open_Flower_P Parameter: Tissue Value: Open Flower vs. Whole Plant
  misc_feature: MA Experiment ID: 20000265 Result: Up-regulated in Transcription
  misc_feature: MA Experiment 20000265 PARAMETER Experiment Name: At_Open_Flower_P Parameter: Age (day) Value: 21
  misc_feature: MA Experiment 20000265 PARAMETER Experiment Name: At_Open_Flower_P Parameter: Plant Line Value: WS
  misc_feature: MA Experiment 20000265 PARAMETER Experiment Name: At_Open_Flower_P Parameter: Tissue Value: Closed Flower vs. Whole Plant
  misc_feature: MA Experiment ID: 20000438 Result: Up-regulated in Transcription
  misc_feature: MA Experiment 20000438 PARAMETER Experiment Name: At_Shoots__P Parameter: Age (day) Value: 14
  misc_feature: MA Experiment 20000438 PARAMETER Experiment Name: At_Shoots__P Parameter: Tissue Value: Shoots vs. Whole Plant
  misc_feature: MA Experiment ID: 20000439 Result: Up-regulated in Transcription
  misc_feature: MA Experiment 20000439 PARAMETER Experiment Name: At_Roots__P Parameter: Age (day) Value: 14 vs. 21
  misc_feature: MA Experiment 20000439 PARAMETER Experiment Name: At_Roots__P Parameter: Organism Value: A. thaliana
  misc_feature: MA Experiment 20000439 PARAMETER Experiment Name: At_Roots__P Parameter: Tissue Value: Roots vs. Whole Plant
  misc_feature: MA Experiment ID: 20001451 Result: Down-regulated in Transcription
  misc_feature: MA Experiment 20001451 PARAMETER Experiment Name: At_Far-red-induction_P Parameter: Age (day) Value: 7
  misc_feature: MA Experiment 20001451 PARAMETER Experiment Name: At_Far-red-induction_P Parameter: Light Value: Far-red vs. White
  misc_feature: MA Experiment 20001451 PARAMETER Experiment Name: At_Far-red-induction_P Parameter: Organism Value: A. thaliana
  misc_feature: MA Experiment 20001451 PARAMETER Experiment Name: At_Far-red-induction_P Parameter: Plant Line Value: Columbia
  misc_feature: MA Experiment 20001451 PARAMETER Experiment Name: At_Far-red-induction_P Parameter: Timepoint (hr) Value: 24
  misc_feature: MA Experiment 20001451 PARAMETER Experiment Name: At_Far-red-induction_P Parameter: Tissue Value: Whole Plant
gactgtctctcttccctcgtaaacatcgctgtctctaaagatggcctctctctcaggcctatactcttcttctccatctctcaaacctgccaaaaaccattcctttaaagcattgccggcgcaatctcgagattccttctctttcccacatacctccaaacccaccaatctaccgttgactctctcctcggctcgttctgtggcacgcgacatttctcatgcggattcgaagaaagagcttcttaaggatccggatgcgttgtggaagcgatacctcgattggttttatcagcagaaagagcttgggttgtatctggatattagtcgggtcggatttaccgatgagtttgtggctgaaatggagccaaggtttcaagctgcgtttaaggctatggaggatcttgaaaaagggtctatagcgaatcctgatgaaggaagaatggttggacattactggcttaggaactctaagctcgcacctaagcctactttaaagaccttgatcgagaacacacttgattctatttgcgctttctccgacgacataatctctggaaagataaagccaccatcttctcctgagggtcgttttactcagatactttctgttggcattggaggctcggctcttggacctcaatttgtcgctgaggccttggctcctgataatcctccattgaagataagattcattgacaacaccgaccctgctggaattgatcatcagattgcacaacttgggccagagctggcctcgactttagtagttgtcatctcaaagagtggaggtactcctgaaactagaaatggactactggaagtgcagaaagcattccgtgaagctggtctgaatttcgcaaaacagggtgttgcaataacccaagagaactcattactggataatacggcaagaattgaaggttggctagctagatttcctatgtacgactgggtgggtggaagaacatcaataatgtctgcagttggtctgcttccagcagcactacaggggattaatgttagggagatgcttactggtgctgctttaatggatgaggctactaggacaacttcgatcaagaataaccctgcagcgctcttagctatgtgttggtactgggcttccaatggcgttggttccaaggatatggttgtccttccttacaaggatagcttattgctatttagtcggtatctgcagcagctggtcatggaatcactaggaaaggagtttgatcttgacggtaacactgttaatcaagggttaactgtgtatggaaataagggaagcacagatcagcacgcctacattcaacagctgagagatggtgtgcacaatttctttgcaaccttcatagaagtgttacgggacagaccccctggtcacgattgggagcttgagccaggtgtcacttgtggagactatctctttgggatgctacagggaactagatctgctttatatgcaaacggtagagaatccatcagtgttacaatccaggaagtgacaccaacatctgttggggctattatagctctttatgaaagagctgttggtttatatgcctcaattgtgaacataaatgcttaccaccaacccggtgtggaagctgggaaaaaggcagcagcagaagttctcgccctgcaaaagcgggtattgtcagttcttaatgaagccacttgtaaagatccggtagagccattgacactggaagagatagctgatcgttgtcatgctcctgaggaaatagaaatgatatacaagatcatagcgcacatgtctgcaaacgacagagttctgatagcagaaggaaactgtggatcgccacgaagtatcaaagtgtatttgggcgagtgcaatgtggatgacctgtacgcataacaaaacccaacactttctcaaactccaaactctcattctctccattccttatttctttctgccatgtctatgattttgaaaaagaaaaagattgcaataagagccaggaaacacttgtgtacttgttttgaaataaagataatttcagaatg

SEQ ID NO: 104090 - protein, 613 aa, Arabidopsis thaliana
  peptide (1)..(613): Ceres Seq. ID no. 13614286
  misc_feature (93)..(541): Pfam Name: Phosphoglucose isomerase Pfam Description: Phosphoglucose isomerase
  misc_feature (1)..(613): Homolog of NCBI NO: 6690395 NR Description: phosphoglucose isomerase precursor [Arabidopsis
  misc_feature (2)..(613): Homolog of NCBI NO: 7484671 NR Description: glucose-6-phosphate isomerase (EC 5.3.1.9)
  misc_feature (70)..(601): Homolog of NCBI NO: 23125809 NR Description: hypothetical protein [Nostoc punctiforme]
  misc_feature (70)..(603): Homolog of NCBI NO: 17228545 NR Description: glucose-6-phosphate isomerase [Nostoc sp. PCC
  misc_feature (73)..(601): Homolog of NCBI NO: 23040343 NR Description: hypothetical protein [Trichodesmium erythraeum
  misc_feature (70)..(600): Homolog of NCBI NO: 22298259 NR Description: glucose-6-phosphate isomerase
  misc_feature (74)..(601): Homolog of NCBI NO: 16330760 NR Description: glucose-6-phosphate isomerase [Synechocystis sp.
  misc_feature (70)..(583): Homolog of NCBI NO: 23053592 NR Description: hypothetical protein [Geobacter metallireducens]
  misc_feature (70)..(604): Homolog of NCBI NO: 33862986 NR Description: Phosphoglucose isomerase (PGI) [Prochlorococcus str. MIT 9313] >gi|33634903|emb|CAE20889.1| Phosphoglucose
  misc_feature (72)..(601): Homolog of NCBI NO: 33240396 NR Description: Glucose-6-phosphate isomerase [Prochlorococcus
MASLSGLYSSSPSLKPAKNHSFKALPAQSRDSFSFPHTSKPTNLPLTLSSARSVARDISHADSKKELLKDPDALWKRYLDWFYQQKELGLYLDISRVGFTDEFVAEMEPRFQAAFKAMEDLEKGSIANPDEGRMVGHYWLRNSKLAPKPTLKTLIENTLDSICAFSDDIISGKIKPPSSPEGRFTQILSVGIGGSALGPQFVAEALAPDNPPLKIRFIDNTDPAGIDHQIAQLGPELASTLVVVISKSGGTPETRNGLLEVQKAFREAGLNFAKQGVAITQENSLLDNTARIEGWLARFPMYDWVGGRTSIMSAVGLLPAALQGINVREMLTGAALMDEATRTTSIKNNPAALLAMCWYWASNGVGSKDMVVLPYKDSLLLFSRYLQQLVMESLGKEFDLDGNTVNQGLTVYGNKGSTDQHAYIQQLRDGVHNFFATFIEVLRDRPPGHDWELEPGVTCGDYLFGMLQGTRSALYANGRESISVTIQEVTPTSVGAIIALYERAVGLYASIVNINAYHQPGVEAGKKAAAEVLALQKRVLSVLNEATCKDPVEPLTLEEIADRCHAPEEIEMIYKIIAHMSANDRVLIAEGNCGSPRSIKVYLGECNVDDLYA

SEQ ID NO: 104091 - protein, 507 aa, Arabidopsis thaliana
  peptide (1)..(507): Ceres Seq. ID no. 13614287
  misc_feature (1)..(435): Pfam Name: Phosphoglucose isomerase Pfam Description: Phosphoglucose isomerase
  misc_feature (1)..(507): Homolog of NCBI NO: 6690395 NR Description: phosphoglucose isomerase precursor [Arabidopsis
  misc_feature (1)..(507): Homolog of NCBI NO: 7484671 NR Description: glucose-6-phosphate isomerase (EC 5.3.1.9)
  misc_feature (1)..(495): Homolog of NCBI NO: 23125809 NR Description: hypothetical protein [Nostoc punctiforme]
  misc_feature (1)..(497): Homolog of NCBI NO: 17228545 NR Description: glucose-6-phosphate isomerase [Nostoc sp. PCC
  misc_feature (1)..(495): Homolog of NCBI NO: 23040343 NR Description: hypothetical protein [Trichodesmium erythraeum
  misc_feature (1)..(494): Homolog of NCBI NO: 22298259 NR Description: glucose-6-phosphate isomerase
  misc_feature (1)..(495): Homolog of NCBI NO: 16330760 NR Description: glucose-6-phosphate isomerase [Synechocystis sp.
  misc_feature (1)..(477): Homolog of NCBI NO: 23053592 NR Description: hypothetical protein [Geobacter metallireducens]
  misc_feature (1)..(498): Homolog of NCBI NO: 33862986 NR Description: Phosphoglucose isomerase (PGI) [Prochlorococcus str. MIT 9313] >gi|33634903|emb|CAE20889.1| Phosphoglucose
  misc_feature (1)..(495): Homolog of NCBI NO: 33240396 NR Description: Glucose-6-phosphate isomerase [Prochlorococcus
MEPRFQAAFKAMEDLEKGSIANPDEGRMVGHYWLRNSKLAPKPTLKTLIENTLDSICAFSDDIISGKIKPPSSPEGRFTQILSVGIGGSALGPQFVAEALAPDNPPLKIRFIDNTDPAGIDHQIAQLGPELASTLVVVISKSGGTPETRNGLLEVQKAFREAGLNFAKQGVAITQENSLLDNTARIEGWLARFPMYDWVGGRTSIMSAVGLLPAALQGINVREMLTGAALMDEATRTTSIKNNPAALLAMCWYWASNGVGSKDMVVLPYKDSLLLFSRYLQQLVMESLGKEFDLDGNTVNQGLTVYGNKGSTDQHAYIQQLRDGVHNFFATFIEVLRDRPPGHDWELEPGVTCGDYLFGMLQGTRSALYANGRESISVTIQEVTPTSVGAIIALYERAVGLYASIVNINAYHQPGVEAGKKAAAEVLALQKRVLSVLNEATCKDPVEPLTLEEIADRCHAPEEIEMIYKIIAHMSANDRVLIAEGNCGSPRSIKVYLGECNVDDLYA

SEQ ID NO: 104092 - protein, 496 aa, Arabidopsis thaliana
  peptide (1)..(496): Ceres Seq. ID no. 13614288
  misc_feature (1)..(424): Pfam Name: Phosphoglucose isomerase Pfam Description: Phosphoglucose isomerase
  misc_feature (1)..(496): Homolog of NCBI NO: 6690395 NR Description: phosphoglucose isomerase precursor [Arabidopsis
  misc_feature (1)..(496): Homolog of NCBI NO: 7484671 NR Description: glucose-6-phosphate isomerase (EC 5.3.1.9)
  misc_feature (1)..(484): Homolog of NCBI NO: 23125809 NR Description: hypothetical protein [Nostoc punctiforme]
  misc_feature (1)..(486): Homolog of NCBI NO: 17228545 NR Description: glucose-6-phosphate isomerase [Nostoc sp. PCC
  misc_feature (1)..(484): Homolog of NCBI NO: 23040343 NR Description: hypothetical protein [Trichodesmium erythraeum
  misc_feature (1)..(483): Homolog of NCBI NO: 22298259 NR Description: glucose-6-phosphate isomerase
  misc_feature (1)..(484): Homolog of NCBI NO: 16330760 NR Description: glucose-6-phosphate isomerase [Synechocystis sp.
  misc_feature (1)..(466): Homolog of NCBI NO: 23053592 NR Description: hypothetical protein [Geobacter metallireducens]
  misc_feature (1)..(487): Homolog of NCBI NO: 33862986 NR Description: Phosphoglucose isomerase (PGI) [Prochlorococcus str. MIT 9313] >gi|33634903|emb|CAE20889.1| Phosphoglucose
  misc_feature (1)..(484): Homolog of NCBI NO: 33240396 NR Description: Glucose-6-phosphate isomerase [Prochlorococcus
MEDLEKGSIANPDEGRMVGHYWLRNSKLAPKPTLKTLIENTLDSICAFSDDIISGKIKPPSSPEGRFTQILSVGIGGSALGPQFVAEALAPDNPPLKIRFIDNTDPAGIDHQIAQLGPELASTLVVVISKSGGTPETRNGLLEVQKAFREAGLNFAKQGVAITQENSLLDNTARIEGWLARFPMYDWVGGRTSIMSAVGLLPAALQGINVREMLTGAALMDEATRTTSIKNNPAALLAMCWYWASNGVGSKDMVVLPYKDSLLLFSRYLQQLVMESLGKEFDLDGNTVNQGLTVYGNKGSTDQHAYIQQLRDGVHNFFATFIEVLRDRPPGHDWELEPGVTCGDYLFGMLQGTRSALYANGRESISVTIQEVTPTSVGAIIALYERAVGLYASIVNINAYHQPGVEAGKKAAAEVLALQKRVLSVLNEATCKDPVEPLTLEEIADRCHAPEEIEMIYKIIAHMSANDRVLIAEGNCGSPRSIKVYLGECNVDDLYA

SEQ ID NO: 104093 - DNA, 1053 bp, Arabidopsis thaliana
  misc_feature (1)..(1053): Ceres Seq. ID no. 13614292
  misc_feature: MA Experiment ID: 108569 Result: Up-regulated in Transcription
  misc_feature: MA Experiment 108569 PARAMETER Experiment Name: At_0.001%_MeJA__cDNA_P Parameter: Timepoint (hr) Value: 6
  misc_feature: MA Experiment 108569 PARAMETER Experiment Name: At_0.001%_MeJA__cDNA_P Parameter: Tissue Value: Aerial
  misc_feature: MA Experiment 108569 PARAMETER Experiment Name: At_0.001%_MeJA__cDNA_P Parameter: Treatment Value: 0.001% MeJA vs. No Treatment
  misc_feature: MA Experiment ID: 108579 Result: Down-regulated in Transcription
  misc_feature: MA Experiment 108579 PARAMETER Experiment Name: At_4deg_Cold_cDNA_P Parameter: Temperature (deg C) Value: 4 vs. 22
  misc_feature: MA Experiment 108579 PARAMETER Experiment Name: At_4deg_Cold_cDNA_P Parameter: Timepoint (hr) Value: 6
  misc_feature: MA Experiment 108579 PARAMETER Experiment Name: At_4deg_Cold_cDNA_P Parameter: Tissue Value: Aerial
  misc_feature: MA Experiment ID: 108595 Result: Down-regulated in Transcription
  misc_feature: MA Experiment 108595 PARAMETER Experiment Name: At_Ler-pi_Ovule_cDNA_P Parameter: Plant Line Value: null
  misc_feature: MA Experiment ID: 20000224 Result: Down-regulated in Transcription
  misc_feature: MA Experiment ID: 20001560 Result: Down-regulated in Transcription
  misc_feature: MA Experiment 20001560 PARAMETER Experiment Name: At_Drought_Soil_Dry_P Parameter: Age (day) Value: 28
  misc_feature: MA Experiment 20001560 PARAMETER Experiment Name: At_Drought_Soil_Dry_P Parameter: Organism Value: A. thaliana
  misc_feature: MA Experiment 20001560 PARAMETER Experiment Name: At_Drought_Soil_Dry_P Parameter: Plant Line Value: WS
  misc_feature: MA Experiment 20001560 PARAMETER Experiment Name: At_Drought_Soil_Dry_P Parameter: Post Timepoint (hr) Value: None
  misc_feature: MA Experiment 20001560 PARAMETER Experiment Name: At_Drought_Soil_Dry_P Parameter: Post-Treatment Value: None
  misc_feature: MA Experiment 20001560 PARAMETER Experiment Name: At_Drought_Soil_Dry_P Parameter: Timepoint (day) Value: 14
  misc_feature: MA Experiment 20001560 PARAMETER Experiment Name: At_Drought_Soil_Dry_P Parameter: Treatment Value: Drought vs. No Drought
  misc_feature: MA Experiment ID: 20001905 Result: Down-regulated in Transcription
  misc_feature: MA Experiment 20001905 PARAMETER Experiment Name: At_Drought_Reproduction_P Parameter: Age (day) Value: 40
  misc_feature: MA Experiment 20001905 PARAMETER Experiment Name: At_Drought_Reproduction_P Parameter: Organism Value: A. thaliana
  misc_feature: MA Experiment 20001905 PARAMETER Experiment Name: At_Drought_Reproduction_P Parameter: Plant Line Value: WS
  misc_feature: MA Experiment 20001905 PARAMETER Experiment Name: At_Drought_Reproduction_P Parameter: Timepoint (day) Value: 10
  misc_feature: MA Experiment 20001905 PARAMETER Experiment Name: At_Drought_Reproduction_P Parameter: Tissue Value: Rosettes
  misc_feature: MA Experiment 20001905 PARAMETER Experiment Name: At_Drought_Reproduction_P Parameter: Treatment Value: Drought vs. No Drought
atccaactatccatccatcatcggtcagtccccaaagtcggcggaagaagatggtgtcgccgaaaatagcaccgtcgatgctgtcatcggacttcgcaaatctagcggcggaggccaatcggatgatcgatttgggcgccaactggcttcacatggatattatggacgggcattttgtccctaatcttacgattggtgctcctgtcatcgagagtttgcgaaagcacactaatgcatatcttgattgccaccttatggtgacgaaccccatggattacgttgcacagatggctaaagctggggcttctggtttcacattccacgtcgaggtggcccaagataattggcaacaacttgtcgagaagattaagtctactgggatgagaccaggcgtggctctaaagcctggaacacctgttgaacaagtctatcctctggttgaagggacaactccggttgaaatggttcttgtgatgactgtagaacctggatttggaggccagaagtttatgcctgacatgatggacaaggtccgggcattgaggcaaaaatacccaacacttgatattcaggtggatggcggcttaggcccttcaacgatcgacacagcggctgcagcaggcgccaactgtattgttgctggaagttcagtgtttggagctccggagccaggagatgtcatctcccttctgaggaccagtgttgagaaagcccaacccaccacttgaaagctgcacgtggtggcggtggtgctgagacggcgttgtattctcatcggaagatggtacctcttcgtttctctcaaggttaaaaagctggtcctttatgttttaaaatcatctcgtgaatcgtgatacttagtcttggttccaagaactgtataacgtcattttgagttattaattccctcaccacacagattatttcataggagttgggtaccaagagtagtgtgcaatgtataattagtaatttaataaacgtattaggttcagtcattttggaatggttataattatgaatacaagtatacaacatgaacattccagtgtt

SEQ ID NO: 104094 - protein, 241 aa, Arabidopsis thaliana; identical to SEQ ID NO: 26294
  peptide (1)..(241): Ceres Seq. ID no. 13614293
  misc_feature (21)..(221): Pfam Name: Ribulose-phosphate 3 epimerase family Pfam Description: Ribulose-phosphate 3 epimerase family
  misc_feature (17)..(241): Homolog of NCBI NO: 18395962 NR Description: D-ribulose-5-phosphate 3-epimerase -related
  misc_feature (17)..(241): Homolog of NCBI NO: 6091725 NR Description: putative D-ribulose-5-phosphate 3-epimerase
  misc_feature (18)..(241): Homolog of NCBI NO: 15221735 NR Description: D-ribulose-5-phosphate-3-epimerase -related
  misc_feature (21)..(238): Homolog of NCBI NO: 28373310 NR Description: Chain A, The Structure Of The Cytosolic
  misc_feature (17)..(240): Homolog of NCBI NO: 19114917 NR Description: putative ribulose phosphate 3-epimerase
  misc_feature (17)..(236): Homolog of NCBI NO: 6322341 NR Description: D-ribulose-5-Phosphate 3-epimerase; Rpe1p
  misc_feature (21)..(237): Homolog of NCBI NO: 27532955 NR Description: ribulose-5-phosphate-3-epimerase [Mus musculus]
  misc_feature (21)..(237): Homolog of NCBI NO: 40385883 NR Description: ribulose-5-phosphate-3-epimerase isoform 1;
  misc_feature (22)..(237): Homolog of NCBI NO: 39581355 NR Description: Hypothetical protein CBG15299 [Caenorhabditis
  misc_feature (20)..(237): Homolog of NCBI NO: 17552948 NR Description: D-ribulose-5-Phosphate 3-epimerase (24.4 kD) elegans] >gi|14574055|gb|AAK68310.1|U28991_8 Hypothetical protein

SEQ ID NO: 104095 - protein, 225 aa, Arabidopsis thaliana; identical to SEQ ID NO: 26295
  peptide (1)..(225): Ceres Seq. ID no. 13614294
  misc_feature (5)..(205): Pfam Name: Ribulose-phosphate 3 epimerase family Pfam Description: Ribulose-phosphate 3 epimerase family
  misc_feature (1)..(225): Homolog of NCBI NO: 18395962 NR Description: D-ribulose-5-phosphate 3-epimerase -related
  misc_feature (1)..(225): Homolog of NCBI NO: 6091725 NR Description: putative D-ribulose-5-phosphate 3-epimerase
  misc_feature (2)..(225): Homolog of NCBI NO: 15221735 NR Description: D-ribulose-5-phosphate-3-epimerase -related
  misc_feature (5)..(222): Homolog of NCBI NO: 28373310 NR Description: Chain A, The Structure Of The Cytosolic
  misc_feature (1)..(224): Homolog of NCBI NO: 19114917 NR Description: putative ribulose phosphate 3-epimerase
  misc_feature (1)..(220): Homolog of NCBI NO: 6322341 NR Description: D-ribulose-5-Phosphate 3-epimerase; Rpe1p
  misc_feature (5)..(221): Homolog of NCBI NO: 27532955 NR Description: ribulose-5-phosphate-3-epimerase [Mus musculus]
  misc_feature (5)..(221): Homolog of NCBI NO: 40385883 NR Description: ribulose-5-phosphate-3-epimerase isoform 1;
  misc_feature (6)..(221): Homolog of NCBI NO: 39581355 NR Description: Hypothetical protein CBG15299 [Caenorhabditis
  misc_feature (4)..(221): Homolog of NCBI NO: 17552948 NR Description: D-ribulose-5-Phosphate 3-epimerase (24.4 kD) elegans] >gi|14574055|gb|AAK68310.1|U28991_8 Hypothetical protein

SEQ ID NO: 104096 - protein, 216 aa, Arabidopsis thaliana; identical to SEQ ID NO: 26296
  peptide (1)..(216): Ceres Seq. ID no. 13614295
  misc_feature (1)..(196): Pfam Name: Ribulose-phosphate 3 epimerase family Pfam Description: Ribulose-phosphate 3 epimerase family
  misc_feature (1)..(216): Homolog of NCBI NO: 18395962 NR Description: D-ribulose-5-phosphate 3-epimerase -related
  misc_feature (1)..(216): Homolog of NCBI NO: 6091725 NR Description: putative D-ribulose-5-phosphate 3-epimerase
  misc_feature (1)..(216): Homolog of NCBI NO: 15221735 NR Description: D-ribulose-5-phosphate-3-epimerase -related
  misc_feature (1)..(213): Homolog of NCBI NO: 28373310 NR Description: Chain A, The Structure Of The Cytosolic
  misc_feature (1)..(215): Homolog of NCBI NO: 19114917 NR Description: putative ribulose phosphate 3-epimerase
  misc_feature (1)..(211): Homolog of NCBI NO: 6322341 NR Description: D-ribulose-5-Phosphate 3-epimerase; Rpe1p
  misc_feature (1)..(212): Homolog of NCBI NO: 27532955 NR Description: ribulose-5-phosphate-3-epimerase [Mus musculus]
  misc_feature (1)..(212): Homolog of NCBI NO: 40385883 NR Description: ribulose-5-phosphate-3-epimerase isoform 1;
  misc_feature (1)..(212): Homolog of NCBI NO: 39581355 NR Description: Hypothetical protein CBG15299 [Caenorhabditis
  misc_feature (1)..(212): Homolog of NCBI NO: 17552948 NR Description: D-ribulose-5-Phosphate 3-epimerase (24.4 kD) elegans] >gi|14574055|gb|AAK68310.1|U28991_8 Hypothetical protein

SEQ ID NO: 104097 - DNA, 1610 bp, Arabidopsis thaliana
  misc_feature (1)..(1610): Ceres Seq. ID no. 13614307
  misc_feature: MA Experiment ID: 20000184 Result: Up-regulated in Transcription
  misc_feature: MA Experiment 20000184 PARAMETER Experiment Name: At_Shoots__P Parameter: Age (day) Value: 7
  misc_feature: MA Experiment 20000184 PARAMETER Experiment Name: At_Shoots__P Parameter: Tissue Value: Shoots vs. Whole Plant
  misc_feature: MA Experiment ID: 20000185 Result: Down-regulated in Transcription
  misc_feature: MA Experiment 20000185 PARAMETER Experiment Name: At_Roots__P Parameter: Age (day) Value: 7 vs. 21
  misc_feature: MA Experiment 20000185 PARAMETER Experiment Name: At_Roots__P Parameter: Organism Value: A. thaliana
  misc_feature: MA Experiment 20000185 PARAMETER Experiment Name: At_Roots__P Parameter: Tissue Value: Roots vs. Whole Plant
  misc_feature: MA Experiment ID: 20000265 Result: Up-regulated in Transcription
  misc_feature: MA Experiment 20000265 PARAMETER Experiment Name: At_Open_Flower_P Parameter: Age (day) Value: 21
  misc_feature: MA Experiment 20000265 PARAMETER Experiment Name: At_Open_Flower_P Parameter: Plant Line Value: WS
  misc_feature: MA Experiment 20000265 PARAMETER Experiment Name: At_Open_Flower_P Parameter: Tissue Value: Closed Flower vs. Whole Plant
  misc_feature: MA Experiment ID: 20000286 Result: Up-regulated in Transcription
  misc_feature: MA Experiment 20000286 PARAMETER Experiment Name: At_Open_Flower_P Parameter: Age (day) Value: 21
  misc_feature: MA Experiment 20000286 PARAMETER Experiment Name: At_Open_Flower_P Parameter: Plant Line Value: WS
  misc_feature: MA Experiment 20000286 PARAMETER Experiment Name: At_Open_Flower_P Parameter: Tissue Value: Half Open vs. Whole Plant
  misc_feature: MA Experiment ID: 20000437 Result: Down-regulated in Transcription
  misc_feature: MA Experiment 20000437 PARAMETER Experiment Name: At_Drought_P Parameter: Age (day) Value: 8
  misc_feature: MA Experiment 20000437 PARAMETER Experiment Name: At_Drought_P Parameter: Organism Value: A. thaliana
  misc_feature: MA Experiment 20000437 PARAMETER Experiment Name: At_Drought_P Parameter: Plant Line Value: WS
  misc_feature: MA Experiment 20000437 PARAMETER Experiment Name: At_Drought_P Parameter: Timepoint (hr) Value: 24
  misc_feature: MA Experiment 20000437 PARAMETER Experiment Name: At_Drought_P Parameter: Tissue Value: Whole Plant
  misc_feature: MA Experiment 20000437 PARAMETER Experiment Name: At_Drought_P Parameter: Treatment Value: Drought vs. No Drought
  misc_feature: MA Experiment ID: 20000438 Result: Up-regulated in Transcription
  misc_feature: MA Experiment 20000438 PARAMETER Experiment Name: At_Shoots__P Parameter: Age (day) Value: 14
  misc_feature: MA Experiment 20000438 PARAMETER Experiment Name: At_Shoots__P Parameter: Tissue Value: Shoots vs. Whole Plant
  misc_feature: MA Experiment ID: 20000439 Result: Down-regulated in Transcription
  misc_feature: MA Experiment 20000439 PARAMETER Experiment Name: At_Roots__P Parameter: Age (day) Value: 14 vs. 21
  misc_feature: MA Experiment 20000439 PARAMETER Experiment Name: At_Roots__P Parameter: Organism Value: A. thaliana
  misc_feature: MA Experiment 20000439 PARAMETER Experiment Name: At_Roots__P Parameter: Tissue Value: Roots vs. Whole Plant
  misc_feature: MA Experiment ID: 20001558 Result: Up-regulated in Transcription
  misc_feature: MA Experiment 20001558 PARAMETER Experiment Name: At_Drought_Soil_Dry_P Parameter: Age (day) Value: 27
  misc_feature: MA Experiment 20001558 PARAMETER Experiment Name: At_Drought_Soil_Dry_P Parameter: Organism Value: A. thaliana
  misc_feature: MA Experiment 20001558 PARAMETER Experiment Name: At_Drought_Soil_Dry_P Parameter: Plant Line Value: WS
  misc_feature: MA Experiment 20001558 PARAMETER Experiment Name: At_Drought_Soil_Dry_P Parameter: Post Timepoint (hr) Value: 6
  misc_feature: MA Experiment 20001558 PARAMETER Experiment Name: At_Drought_Soil_Dry_P Parameter: Post-Treatment Value: Re-Water vs. No Drought
  misc_feature: MA Experiment 20001558 PARAMETER Experiment Name: At_Drought_Soil_Dry_P Parameter: Timepoint (day) Value: 13
  misc_feature: MA Experiment 20001558 PARAMETER Experiment Name: At_Drought_Soil_Dry_P Parameter: Treatment Value: Drought vs. No Drought
  misc_feature: MA Experiment ID: 20001560 Result: Up-regulated in Transcription
  misc_feature: MA Experiment 20001560 PARAMETER Experiment Name: At_Drought_Soil_Dry_P Parameter: Age (day) Value: 28
  misc_feature: MA Experiment 20001560 PARAMETER Experiment Name: At_Drought_Soil_Dry_P Parameter: Organism Value: A. thaliana
  misc_feature: MA Experiment 20001560 PARAMETER Experiment Name: At_Drought_Soil_Dry_P Parameter: Plant Line Value: WS
  misc_feature: MA Experiment 20001560 PARAMETER Experiment Name: At_Drought_Soil_Dry_P Parameter: Post Timepoint (hr) Value: None
  misc_feature: MA Experiment 20001560 PARAMETER Experiment Name: At_Drought_Soil_Dry_P Parameter: Post-Treatment Value: None
  misc_feature: MA Experiment 20001560 PARAMETER Experiment Name: At_Drought_Soil_Dry_P Parameter: Timepoint (day) Value: 14
  misc_feature: MA Experiment 20001560 PARAMETER Experiment Name: At_Drought_Soil_Dry_P Parameter: Treatment Value: Drought vs. No Drought
  misc_feature: MA Experiment ID: 20001910 Result: Down-regulated in Transcription
  misc_feature: MA Experiment 20001910 PARAMETER Experiment Name: At_Drought_Reproduction_P Parameter: Age (day) Value: 37
  misc_feature: MA Experiment 20001910 PARAMETER Experiment Name: At_Drought_Reproduction_P Parameter: Organism Value: A. thaliana
  misc_feature: MA Experiment 20001910 PARAMETER Experiment Name: At_Drought_Reproduction_P Parameter: Plant Line Value: WS
  misc_feature: MA Experiment 20001910 PARAMETER Experiment Name: At_Drought_Reproduction_P Parameter: Timepoint (day) Value: 7
  misc_feature: MA Experiment 20001910 PARAMETER Experiment Name: At_Drought_Reproduction_P Parameter: Tissue Value: Flowers
  misc_feature: MA Experiment 20001910 PARAMETER Experiment Name: At_Drought_Reproduction_P Parameter: Treatment Value: Drought vs. No Drought
  misc_feature: MA Experiment ID: 20001911 Result: Down-regulated in Transcription
  misc_feature: MA Experiment 20001911 PARAMETER Experiment Name: At_Drought_Reproduction_P Parameter: Age (day) Value: 40
  misc_feature: MA Experiment 20001911 PARAMETER Experiment Name: At_Drought_Reproduction_P Parameter: Organism Value: A. thaliana
  misc_feature: MA Experiment 20001911 PARAMETER Experiment Name: At_Drought_Reproduction_P Parameter: Plant Line Value: WS
  misc_feature: MA Experiment 20001911 PARAMETER Experiment Name: At_Drought_Reproduction_P Parameter: Timepoint (day) Value: 10
  misc_feature: MA Experiment 20001911 PARAMETER Experiment Name: At_Drought_Reproduction_P Parameter: Tissue Value: Flowers
  misc_feature: MA Experiment 20001911 PARAMETER Experiment Name: At_Drought_Reproduction_P Parameter: Treatment Value: Drought vs. No Drought
caatctcaaaaagtctccgacactctctagatttcctttgctccttcgttctggccatggcaatggcaaaactcgcaattttcaccactcttatggccatactcgtaatgacatctcaaggaaggattccaacagaaggaggagagaaagaagcagaggctgacagaattacgtcacttccaggtcagcctaacgtcacgttcgagcagttttccggctacgtcaccgtcgataaactctccggaagatcactcttttattggctcactgaagcttctgacctccctctctccaaacctctcgtaatttggctcaacggaggaccgggatgttcgtcggtagcgtacggtgcgtcggaggagattggaccattcaggataagcaaaggtggttccggtttgtatctcaacaagttcgcatggaactcaatctccaatctcttgttcctcgaagctcccgccggcgtcggcttctcttacactaaccgctcctccgatctcttcaacaccggtgatcgccgtaccgccaaagattcacttcagtttcttattcaatggcttcaccggtttccgagatacaaccaccgggaaatctacatcaccggcgagagttacgccggacattacgttcctcagctggccaaagagatcatgaattacaacaaacgatcaaagaatccgttaaatctcaaaggaatcatggttggaaacgcggtgacggacaatcactatgataacctaggaacggtttcgtattggtggagccacgcgatgatctctgatcggacgtatcatcagttgataagcacttgcgattttagtcgtcagaaggaatctgatgaatgcgaaaccctttattcttacgctatggagcaggagtttggtaacattgatcagtacaacatctatgcgccgccgtgtaacaagtcaagcgacggtggtggtagctacaatggttcttccggccgccggagtatgcggcttcctcaccttccccactccgtattgaggaaaatttccggttatgatccatgtaccgagagatatgcagagatctattataaccggcctgatgttcagaaagctcttcacgccaacaccaccaagattccgtataaatggacagcttgcagtgaggtgctaaaccggaattggaacgacacagattcaacggttctccctatataccgggaaatgattgccggcggaattagagtttgggttttcagtggtgacgtcgattcagttgtaccagtgacagctactagatactcactagcaagacttagtttgagtaccaaacttccttggtatccttggtatgtcaagaaacaggttggaggatggacggaagtgtatgaaggactaacgttcgtgacggttagaggagcaggtcacgaggtgccattgttcaagccacgtgctgcttttgagctttttaagtatttcttgagaggcaagccacttccaaaggcttaaaaaaattgaagtcaagagagagattgtaacatttgaaatcatgcccgagaaaaatgaaaatgtaaagtttgggttatgagatggtatttaattaaatctagtctattaatgacagcaagtatttaattattt

SEQ ID NO: 104098 - protein, 491 aa, Arabidopsis thaliana
  peptide (1)..(491): Ceres Seq. ID no. 13614308
  misc_feature (60)..(485): Pfam Name: Serine carboxypeptidase Pfam Description: Serine carboxypeptidase
  misc_feature (19)..(491): Homolog of NCBI NO: 15232847 NR Description: serine carboxypeptidase -related [Arabidopsis >gi|6513922|gb|AAF14826.1|AC011664_8 putative serine II [Arabidopsis thaliana] >gi|14335062|gb|AAK59795.1|
  misc_feature (21)..(491): Homolog of NCBI NO: 21593731 NR Description: putative serine carboxypeptidase II [Arabidopsis
  misc_feature (26)..(491): Homolog of NCBI NO: 13877871 NR Description: putative serine carboxypeptidase II [Arabidopsis
  misc_feature (26)..(491): Homolog of NCBI NO: 15234795 NR Description: serine carboxypeptidase -related [Arabidopsis
  misc_feature (30)..(491): Homolog of NCBI NO: 15224082 NR Description: serine carboxypeptidase -related [Arabidopsis
  misc_feature (56)..(491): Homolog of NCBI NO: 15224083 NR Description: serine carboxypeptidase -related [Arabidopsis
  misc_feature (19)..(490): Homolog of NCBI NO: 34895992 NR Description: putative carboxypeptidase D [Oryza sativa
  misc_feature (30)..(489): Homolog of NCBI NO: 15231911 NR Description: serine carboxypeptidase -related [Arabidopsis >gi|6648211|gb|AAF21209.1|AC013483_33 putative serine
  misc_feature (13)..(489): Homolog of NCBI NO: 34908012 NR Description: putative carboxypeptidase D [Oryza sativa
  misc_feature (50)..(489): Homolog of NCBI NO: 15227493 NR Description: serine carboxypeptidase -related [Arabidopsis
ISKSLRHSLDFLCSFVLAMAMAKLAIFTTLMAILVMTSQGRIPTEGGEKEAEADRITSLPGQPNVTFEQFSGYVTVDKLSGRSLFYWLTEASDLPLSKPLVIWLNGGPGCSSVAYGASEEIGPFRISKGGSGLYLNKFAWNSISNLLFLEAPAGVGFSYTNRSSDLFNTGDRRTAKDSLQFLIQWLHRFPRYNHREIYITGESYAGHYVPQLAKEIMNYNKRSKNPLNLKGIMVGNAVTDNHYDNLGTVSYWWSHAMISDRTYHQLISTCDFSRQKESDECETLYSYAMEQEFGNIDQYNIYAPPCNKSSDGGGSYNGSSGRRSMRLPHLPHSVLRKISGYDPCTERYAEIYYNRPDVQKALHANTTKIPYKWTACSEVLNRNWNDTDSTVLPIYREMIAGGIRVWVFSGDVDSVVPVTATRYSLARLSLSTKLPWYPWYVKKQVGGWTEVYEGLTFVTVRGAGHEVPLFKPRAAFELFKYFLRGKPLPKA

SEQ ID NO: 104099 - protein, 473 aa, Arabidopsis thaliana; identical to SEQ ID NO: 37661
  peptide (1)..(473): Ceres Seq. ID no. 13614309
  misc_feature (42)..(467): Pfam Name: Serine carboxypeptidase Pfam Description: Serine carboxypeptidase
  misc_feature (1)..(473): Homolog of NCBI NO: 15232847 NR Description: serine carboxypeptidase -related [Arabidopsis >gi|6513922|gb|AAF14826.1|AC011664_8 putative serine II [Arabidopsis thaliana] >gi|14335062|gb|AAK59795.1|
  misc_feature (3)..(473): Homolog of NCBI NO: 21593731 NR Description: putative serine carboxypeptidase II [Arabidopsis
  misc_feature (8)..(473): Homolog of NCBI NO: 13877871 NR Description: putative serine carboxypeptidase II [Arabidopsis
  misc_feature (8)..(473): Homolog of NCBI NO: 15234795 NR Description: serine carboxypeptidase -related [Arabidopsis
  misc_feature (12)..(473): Homolog of NCBI NO: 15224082 NR Description: serine carboxypeptidase -related [Arabidopsis
  misc_feature (38)..(473): Homolog of NCBI NO: 15224083 NR Description: serine carboxypeptidase -related [Arabidopsis
  misc_feature (1)..(472): Homolog of NCBI NO: 34895992 NR Description: putative carboxypeptidase D [Oryza sativa
  misc_feature (12)..(471): Homolog of NCBI NO: 15231911 NR Description: serine carboxypeptidase -related [Arabidopsis >gi|6648211|gb|AAF21209.1|AC013483_33 putative serine
  misc_feature (1)..(471): Homolog of NCBI NO: 34908012 NR Description: putative carboxypeptidase D [Oryza sativa
  misc_feature (32)..(471): Homolog of NCBI NO: 15227493 NR Description: serine carboxypeptidase -related [Arabidopsis

SEQ ID NO: 104100 - protein, 471 aa, Arabidopsis thaliana
  peptide (1)..(471): Ceres Seq. ID no. 13614310
  misc_feature (40)..(465): Pfam Name: Serine carboxypeptidase Pfam Description: Serine carboxypeptidase
  misc_feature (1)..(471): Homolog of NCBI NO: 15232847 NR Description: serine carboxypeptidase -related [Arabidopsis >gi|6513922|gb|AAF14826.1|AC011664_8 putative serine II [Arabidopsis thaliana] >gi|14335062|gb|AAK59795.1|
  misc_feature (1)..(471): Homolog of NCBI NO: 21593731 NR Description: putative serine carboxypeptidase II [Arabidopsis
  misc_feature (6)..(471): Homolog of NCBI NO: 13877871 NR Description: putative serine carboxypeptidase II [Arabidopsis
  misc_feature (6)..(471): Homolog of NCBI NO: 15234795 NR Description: serine carboxypeptidase -related [Arabidopsis
  misc_feature (10)..(471): Homolog of NCBI NO: 15224082 NR Description: serine carboxypeptidase -related [Arabidopsis
  misc_feature (36)..(471): Homolog of NCBI NO: 15224083 NR Description: serine carboxypeptidase -related [Arabidopsis
  misc_feature (1)..(470): Homolog of NCBI NO: 34895992 NR Description: putative carboxypeptidase D [Oryza sativa
  misc_feature (10)..(469): Homolog of NCBI NO: 15231911 NR Description: serine carboxypeptidase -related [Arabidopsis >gi|6648211|gb|AAF21209.1|AC013483_33 putative serine
  misc_feature (1)..(469): Homolog of NCBI NO: 34908012 NR Description: putative carboxypeptidase D [Oryza sativa
  misc_feature (30)..(469): Homolog of NCBI NO: 15227493 NR Description: serine carboxypeptidase -related [Arabidopsis
MAKLAIFTTLMAILVMTSQGRIPTEGGEKEAEADRITSLPGQPNVTFEQFSGYVTVDKLSGRSLFYWLTEASDLPLSKPLVIWLNGGPGCSSVAYGASEEIGPFRISKGGSGLYLNKFAWNSISNLLFLEAPAGVGFSYTNRSSDLFNTGDRRTAKDSLQFLIQWLHRFPRYNHREIYITGESYAGHYVPQLAKEIMNYNKRSKNPLNLKGIMVGNAVTDNHYDNLGTVSYWWSHAMISDRTYHQLISTCDFSRQKESDECETLYSYAMEQEFGNIDQYNIYAPPCNKSSDGGGSYNGSSGRRSMRLPHLPHSVLRKISGYDPCTERYAEIYYNRPDVQKALHANTTKIPYKWTACSEVLNRNWNDTDSTVLPIYREMIAGGIRVWVFSGDVDSVVPVTATRYSLARLSLSTKLPWYPWYVKKQVGGWTEVYEGLTFVTVRGAGHEVPLFKPRAAFELFKYFLRGKPLPKA

SEQ ID NO: 104101 - DNA, 1360 bp, Arabidopsis thaliana
  misc_feature (1)..(1360): Ceres Seq. ID no. 13614311
  misc_feature: MA Experiment ID: 108461 Result: Up-regulated in Transcription
  misc_feature: MA Experiment 108461 PARAMETER Experiment Name: At_Germinating_Seeds_cDNA_P Parameter: Age (day) Value: 1 vs. 0
  misc_feature: MA Experiment 108461 PARAMETER Experiment Name: At_Germinating_Seeds_cDNA_P Parameter: Tissue Value: Germinating Seeds
  misc_feature: MA Experiment ID: 108569 Result: Up-regulated in Transcription
  misc_feature: MA Experiment 108569 PARAMETER Experiment Name: At_0.001%_MeJA__cDNA_P Parameter: Timepoint (hr) Value: 6
  misc_feature: MA Experiment 108569 PARAMETER Experiment Name: At_0.001%_MeJA__cDNA_P Parameter: Tissue Value: Aerial
  misc_feature: MA Experiment 108569 PARAMETER Experiment Name: At_0.001%_MeJA__cDNA_P Parameter: Treatment Value: 0.001% MeJA vs. No Treatment
  misc_feature: MA Experiment ID: 108585 Result: Up-regulated in Transcription
  misc_feature: MA Experiment 108585 PARAMETER Experiment Name: At_5mM_NaNP_cDNA_P Parameter: Timepoint (hr) Value: 6
  misc_feature: MA Experiment 108585 PARAMETER Experiment Name: At_5mM_NaNP_cDNA_P Parameter: Tissue Value: Aerial
  misc_feature: MA Experiment 108585 PARAMETER Experiment Name: At_5mM_NaNP_cDNA_P Parameter: Treatment Value: null
  misc_feature: MA Experiment ID: 20000180 Result: Up-regulated in Transcription
  misc_feature: MA Experiment 20000180 PARAMETER Experiment Name: At_Germinating_Seeds_P Parameter: Age (hr) Value: 24 vs. 0
  misc_feature: MA Experiment 20000180 PARAMETER Experiment Name: At_Germinating_Seeds_P Parameter: Tissue Value: Germinating Seeds
  misc_feature: MA Experiment ID: 20000184 Result: Up-regulated in Transcription
  misc_feature: MA Experiment 20000184 PARAMETER Experiment Name: At_Shoots__P Parameter: Age (day) Value: 7
  misc_feature: MA Experiment 20000184 PARAMETER Experiment Name: At_Shoots__P Parameter: Tissue Value: Shoots vs. Whole Plant
  misc_feature: MA Experiment ID: 20000185 Result: Up-regulated in Transcription
  misc_feature: MA Experiment 20000185 PARAMETER Experiment Name: At_Roots__P Parameter: Age (day) Value: 7 vs. 21
  misc_feature: MA Experiment 20000185 PARAMETER Experiment Name: At_Roots__P Parameter: Organism Value: A. thaliana
  misc_feature: MA Experiment 20000185 PARAMETER Experiment Name: At_Roots__P Parameter: Tissue Value: Roots vs. Whole Plant
  misc_feature: MA Experiment ID: 20000234 Result: Up-regulated in Transcription
  misc_feature: MA Experiment 20000234 PARAMETER Experiment Name: At_Siliques_P Parameter: Age (day) Value: 21
  misc_feature: MA Experiment 20000234 PARAMETER Experiment Name: At_Siliques_P Parameter: Organism Value: A. thaliana
  misc_feature: MA Experiment 20000234 PARAMETER Experiment Name: At_Siliques_P Parameter: Plant Line Value: WS
  misc_feature: MA Experiment 20000234 PARAMETER Experiment Name: At_Siliques_P Parameter: Tissue Value: Less Than 5mm Siliques vs. Whole Plant
  misc_feature: MA Experiment ID: 20000235 Result: Up-regulated in Transcription
  misc_feature: MA Experiment 20000235 PARAMETER Experiment Name: At_Siliques_P Parameter: Age (day) Value: 21
  misc_feature: MA Experiment 20000235 PARAMETER Experiment Name: At_Siliques_P Parameter: Organism Value: A. thaliana
  misc_feature: MA Experiment 20000235 PARAMETER Experiment Name: At_Siliques_P Parameter: Plant Line Value: WS
  misc_feature: MA Experiment 20000235 PARAMETER Experiment Name: At_Siliques_P Parameter: Tissue Value: 5-10mm Siliques vs. Whole Plant
  misc_feature: MA Experiment ID: 20000264 Result: Up-regulated in Transcription
  misc_feature: MA Experiment 20000264 PARAMETER Experiment Name: At_Open_Flower_P Parameter: Age (day) Value: 21
  misc_feature: MA Experiment 20000264 PARAMETER Experiment Name: At_Open_Flower_P Parameter: Plant Line Value: WS
  misc_feature: MA Experiment 20000264 PARAMETER Experiment Name: At_Open_Flower_P Parameter: Tissue Value: Open Flower vs. Whole Plant
  misc_feature: MA Experiment ID: 20000265 Result: Up-regulated in Transcription
  misc_feature: MA Experiment 20000265 PARAMETER Experiment Name: At_Open_Flower_P Parameter: Age (day) Value: 21
  misc_feature: MA Experiment 20000265 PARAMETER Experiment Name: At_Open_Flower_P Parameter: Plant Line Value: WS
  misc_feature: MA Experiment 20000265 PARAMETER Experiment Name: At_Open_Flower_P Parameter: Tissue Value: Closed Flower vs. Whole Plant
  misc_feature: MA Experiment ID: 20000286 Result: Up-regulated in Transcription
  misc_feature: MA Experiment 20000286 PARAMETER Experiment Name: At_Open_Flower_P Parameter: Age (day) Value: 21
  misc_feature: MA Experiment 20000286 PARAMETER Experiment Name: At_Open_Flower_P Parameter: Plant Line Value: WS
  misc_feature: MA Experiment 20000286 PARAMETER Experiment Name: At_Open_Flower_P Parameter: Tissue Value: Half Open vs. Whole Plant
  misc_feature: MA Experiment ID: 20000439 Result: Up-regulated in Transcription
  misc_feature: MA Experiment 20000439 PARAMETER Experiment Name: At_Roots__P Parameter: Age (day) Value: 14 vs. 21
  misc_feature: MA Experiment 20000439 PARAMETER Experiment Name: At_Roots__P Parameter: Organism Value: A. thaliana
  misc_feature: MA Experiment 20000439 PARAMETER Experiment Name: At_Roots__P Parameter: Tissue Value: Roots vs. Whole Plant
  misc_feature: MA Experiment ID: 20001451 Result: Down-regulated in Transcription
  misc_feature: MA Experiment 20001451 PARAMETER Experiment Name: At_Far-red-induction_P Parameter: Age (day) Value: 7
  misc_feature: MA Experiment 20001451 PARAMETER Experiment Name: At_Far-red-induction_P Parameter: Light Value: Far-red vs. White
  misc_feature: MA Experiment 20001451 PARAMETER Experiment Name: At_Far-red-induction_P Parameter: Organism Value: A. thaliana
  misc_feature: MA Experiment 20001451 PARAMETER Experiment Name: At_Far-red-induction_P Parameter: Plant Line Value: Columbia
  misc_feature: MA Experiment 20001451 PARAMETER Experiment Name: At_Far-red-induction_P Parameter: Timepoint (hr) Value: 24
  misc_feature: MA Experiment 20001451 PARAMETER Experiment Name: At_Far-red-induction_P Parameter: Tissue Value: Whole Plant
  misc_feature: MA Experiment ID: 20001557 Result: Up-regulated in Transcription
  misc_feature: MA Experiment 20001557 PARAMETER Experiment Name: At_Drought_Soil_Dry_P Parameter: Age (day) Value: 27
  misc_feature: MA Experiment 20001557 PARAMETER Experiment Name: At_Drought_Soil_Dry_P Parameter: Organism Value: A. thaliana
  misc_feature: MA Experiment 20001557 PARAMETER Experiment Name: At_Drought_Soil_Dry_P Parameter: Plant Line Value: WS
  misc_feature: MA Experiment 20001557 PARAMETER Experiment Name: At_Drought_Soil_Dry_P Parameter: Post Timepoint (hr) Value: 3
  misc_feature: MA Experiment 20001557 PARAMETER Experiment Name: At_Drought_Soil_Dry_P Parameter: Post-Treatment Value: Re-Water vs. No Drought
  misc_feature: MA Experiment 20001557 PARAMETER Experiment Name: At_Drought_Soil_Dry_P Parameter: Timepoint (day) Value: 13
  misc_feature: MA Experiment 20001557 PARAMETER Experiment Name: At_Drought_Soil_Dry_P Parameter: Treatment Value: Drought vs. No Drought
  misc_feature: MA Experiment ID: 20001558 Result: Up-regulated in Transcription
  misc_feature: MA Experiment 20001558 PARAMETER Experiment Name: At_Drought_Soil_Dry_P Parameter: Age (day) Value: 27
  misc_feature: MA Experiment 20001558 PARAMETER Experiment Name: At_Drought_Soil_Dry_P Parameter: Organism Value: A. thaliana
  misc_feature: MA Experiment 20001558 PARAMETER Experiment Name: At_Drought_Soil_Dry_P Parameter: Plant Line Value: WS
  misc_feature: MA Experiment 20001558 PARAMETER Experiment Name: At_Drought_Soil_Dry_P Parameter: Post Timepoint (hr) Value: 6
  misc_feature: MA Experiment 20001558 PARAMETER Experiment Name: At_Drought_Soil_Dry_P Parameter: Post-Treatment Value: Re-Water vs. No Drought
  misc_feature: MA Experiment 20001558 PARAMETER Experiment Name: At_Drought_Soil_Dry_P Parameter: Timepoint (day) Value: 13
  misc_feature: MA Experiment 20001558 PARAMETER Experiment Name: At_Drought_Soil_Dry_P Parameter: Treatment Value: Drought vs. No Drought
  misc_feature: MA Experiment ID: 20001560 Result: Up-regulated in Transcription
  misc_feature: MA Experiment 20001560 PARAMETER Experiment Name: At_Drought_Soil_Dry_P Parameter: Age (day) Value: 28
  misc_feature: MA Experiment 20001560 PARAMETER Experiment Name: At_Drought_Soil_Dry_P Parameter: Organism Value: A. thaliana
  misc_feature: MA Experiment 20001560 PARAMETER Experiment Name: At_Drought_Soil_Dry_P Parameter: Plant Line Value: WS
  misc_feature: MA Experiment 20001560 PARAMETER Experiment Name: At_Drought_Soil_Dry_P Parameter: Post Timepoint (hr) Value: None
  misc_feature: MA Experiment 20001560 PARAMETER Experiment Name: At_Drought_Soil_Dry_P Parameter: Post-Treatment Value: None
  misc_feature: MA Experiment 20001560 PARAMETER Experiment Name: At_Drought_Soil_Dry_P Parameter: Timepoint (day) Value: 14
  misc_feature: MA Experiment 20001560 PARAMETER Experiment Name: At_Drought_Soil_Dry_P Parameter: Treatment Value: Drought vs. No Drought
  misc_feature: MA Experiment ID: 20001905 Result: Up-regulated in Transcription
  misc_feature: MA Experiment 20001905 PARAMETER Experiment Name: At_Drought_Reproduction_P Parameter: Age (day) Value: 40
  misc_feature: MA Experiment 20001905 PARAMETER Experiment Name: At_Drought_Reproduction_P Parameter: Organism Value: A. thaliana
  misc_feature: MA Experiment 20001905 PARAMETER Experiment Name: At_Drought_Reproduction_P Parameter: Plant Line Value: WS
  misc_feature: MA Experiment 20001905 PARAMETER Experiment Name: At_Drought_Reproduction_P Parameter: Timepoint (day) Value: 10
  misc_feature: MA Experiment 20001905 PARAMETER Experiment Name: At_Drought_Reproduction_P Parameter: Tissue Value: Rosettes
  misc_feature: MA Experiment 20001905 PARAMETER Experiment Name: At_Drought_Reproduction_P Parameter: Treatment Value: Drought vs. No Drought
ctcaaatctcacaatcttttctctccaaattctcttctctctgaatcaatccaatcatggttgagccggcgaacaccgttggaattccggtgaaccacatcccattgttgaaggatgagctcgatatcgtgatccccacgatccgtaacctcgatttcctggagatgtggaggccttttcttcagccttaccatctgattatcgtccaagatggagatccatcgaagaccattgctgtccctgaagggttcgattacgaactctacaacaggaacgacatcaaccgtatccttggtcctaaagcttcctgcatttccttcaaggactctgcttgtcgttgcttcggctacatggtctccaagaagaagtacatcttcactattgatgacgattgcttcgttgctaaggatccatctggaaaagctgtgaacgctcttgagcaacacatcaagaaccttctctgcccatcaactccatttttcttcaacaccttgtacgacccataccgtgaaggtgctgacttcgtccgtggataccctttcagtctccgtgagggtgtttccaccgctgtttcccacggtctgtggctcaacatccctgattacgatgcccctacccaacttgtgaagcctaaggaaaggaacacaaggtatgtggatgctgtcatgaccatcccaaagggaactcttttccctatgtgtggtatgaacttggcctttgaccgtgagctcattggtccggctatgtactttggtctcatgggtgatggtcagcctattggtcgctacgacgatatgtgggctggatggtgtatcaaggtgatctgtgaccatttgggattgggagtgaagacaggtttgccctacatttaccacagcaaagccagcaacccgtttgtgaacttgaagaaggagtacaagggaatcttctggcaggaggatatcattcctttcttccagagcgcaaagctcacgaaagaagctgtgacagttcaacaatgctacatggagctgtccaagttggtgaaggagaagctaagccccattgatccttactttgacaagcttgcagatgctatggtcacttggattgaagcttgggatgagcttaacccacccactaaagcttgagcagcaaaaaaaccaccaccgcagttttggttattagctcaacatatcatctatcttctccgttttgtttttgttttgtcttttctcaaattttccggcgattcttcagttcgtttttaagttgccggagtttatttaaatagtgaatggtgtagttctatttatgaccgagacaatctctcttttgaggtttttcgtttttgtttcaataataaaaaatcatatccctt

SEQ ID NO: 104102 - protein, 357 aa, Arabidopsis thaliana; identical to SEQ ID NO: 22476
  peptide (1)..(357): Ceres Seq. ID no. 13614312
  misc_feature (13)..(356): Pfam Name: Reversibly glycosylated polypeptide Pfam Description: Reversibly glycosylated polypeptide
  misc_feature (1)..(357): Homolog of NCBI NO: 15232865 NR Description: reversibly glycosylated polypeptide-1
  misc_feature (1)..(357): Homolog of NCBI NO: 2317729 NR Description: reversibly glycosylated polypeptide-1
  misc_feature (1)..(354): Homolog of NCBI NO: 15242351 NR Description: reversibly glycosylated polypeptide-3
  misc_feature (1)..(354): Homolog of NCBI NO: 2317731 NR Description: reversibly glycosylated polypeptide-2
  misc_feature (1)..(354): Homolog of NCBI NO: 21593071 NR Description: reversibly glycosylated polypeptide-3
  misc_feature (9)..(357): Homolog of NCBI NO: 34582499 NR Description: Alpha-1,4-glucan-protein synthase [UDP-forming] 2
  misc_feature (5)..(357): Homolog of NCBI NO: 4158221 NR Description: reversibly glycosylated polypeptide [Oryza sativa
  misc_feature (5)..(357): Homolog of NCBI NO: 34915190 NR Description: reversibly glycosylated polypeptide [Oryza sativa
  misc_feature (5)..(357): Homolog of NCBI NO: 4158232 NR Description: reversibly glycosylated polypeptide [Triticum
  misc_feature (5)..(357): Homolog of NCBI NO: 34588146 NR Description: Alpha-1,4-glucan-protein synthase [UDP-forming] glucose:protein transglucosylase) (UPTG) (Amylogenin) (Golgi

SEQ ID NO: 104103 - protein, 321 aa, Arabidopsis thaliana; identical to SEQ ID NO: 22477
  peptide (1)..(321): Ceres Seq. ID no. 13614313
  misc_feature (1)..(320): Pfam Name: Reversibly glycosylated polypeptide Pfam Description: Reversibly glycosylated polypeptide
  misc_feature (1)..(321): Homolog of NCBI NO: 15232865 NR Description: reversibly glycosylated polypeptide-1
  misc_feature (1)..(321): Homolog of NCBI NO: 2317729 NR Description: reversibly glycosylated polypeptide-1
  misc_feature (1)..(318): Homolog of NCBI NO: 15242351 NR Description: reversibly glycosylated polypeptide-3
  misc_feature (1)..(318): Homolog of NCBI NO: 2317731 NR Description: reversibly glycosylated polypeptide-2
  misc_feature (1)..(318): Homolog of NCBI NO: 21593071 NR Description: reversibly glycosylated polypeptide-3
  misc_feature (1)..(321): Homolog of NCBI NO: 34582499 NR Description: Alpha-1,4-glucan-protein synthase [UDP-forming] 2
  misc_feature (1)..(321): Homolog of NCBI NO: 4158221 NR Description: reversibly glycosylated polypeptide [Oryza sativa
  misc_feature (1)..(321): Homolog of NCBI NO: 34915190 NR Description: reversibly glycosylated polypeptide [Oryza sativa
  misc_feature (1)..(321): Homolog of NCBI NO: 4158232 NR Description: reversibly glycosylated polypeptide [Triticum
  misc_feature (1)..(321): Homolog of NCBI NO: 34588146 NR Description: Alpha-1,4-glucan-protein synthase [UDP-forming] glucose:protein transglucosylase) (UPTG) (Amylogenin) (Golgi

SEQ ID NO: 104104 - protein, 259 aa, Arabidopsis thaliana; identical to SEQ ID NO: 22478
  peptide (1)..(259): Ceres Seq. ID no. 13614314
  misc_feature (1)..(258): Pfam Name: Reversibly glycosylated polypeptide Pfam Description: Reversibly glycosylated polypeptide
  misc_feature (1)..(259): Homolog of NCBI NO: 15232865 NR Description: reversibly glycosylated polypeptide-1
  misc_feature (1)..(259): Homolog of NCBI NO: 2317729 NR Description: reversibly glycosylated polypeptide-1
  misc_feature (1)..(256): Homolog of NCBI NO: 15242351 NR Description: reversibly glycosylated polypeptide-3
  misc_feature (1)..(256): Homolog of NCBI NO: 2317731 NR Description: reversibly glycosylated polypeptide-2
  misc_feature (1)..(256): Homolog of NCBI NO: 21593071 NR Description: reversibly glycosylated polypeptide-3
  misc_feature (1)..(259): Homolog of NCBI NO: 34582499 NR Description: Alpha-1,4-glucan-protein synthase [UDP-forming] 2
  misc_feature (1)..(259): Homolog of NCBI NO: 4158221 NR Description: reversibly glycosylated polypeptide [Oryza sativa
  misc_feature (1)..(259): Homolog of NCBI NO: 34915190 NR Description: reversibly glycosylated polypeptide [Oryza sativa
  misc_feature (1)..(259): Homolog of NCBI NO: 4158232 NR Description: reversibly glycosylated polypeptide [Triticum
  misc_feature (1)..(259): Homolog of NCBI NO: 34588146 NR Description: Alpha-1,4-glucan-protein synthase [UDP-forming] glucose:protein transglucosylase) (UPTG) (Amylogenin) (Golgi

SEQ ID NO: 104105 - DNA, 2224 bp, Arabidopsis thaliana
  misc_feature (1)..(2224): Ceres Seq. ID no. 13614320
  misc_feature: MA Experiment ID: 108461 Result: Up-regulated in Transcription
  misc_feature: MA Experiment 108461 PARAMETER Experiment Name: At_Germinating_Seeds_cDNA_P Parameter: Age (day) Value: 1 vs. 0
  misc_feature: MA Experiment 108461 PARAMETER Experiment Name: At_Germinating_Seeds_cDNA_P Parameter: Tissue Value: Germinating Seeds
  misc_feature: MA Experiment ID: 20000227 Result: Up-regulated in Transcription
  misc_feature: MA Experiment 20000227 PARAMETER Experiment Name: At_Root-Tips-vs-Tops_P Parameter: Tissue Value: Root Tips vs. Root Tops
  misc_feature: MA Experiment ID: 20001557 Result: Up-regulated in Transcription
  misc_feature: MA Experiment 20001557 PARAMETER Experiment Name: At_Drought_Soil_Dry_P Parameter: Age (day) Value: 27
  misc_feature: MA Experiment 20001557 PARAMETER Experiment Name: At_Drought_Soil_Dry_P Parameter: Organism Value: A. thaliana
  misc_feature: MA Experiment 20001557 PARAMETER Experiment Name: At_Drought_Soil_Dry_P Parameter: Plant Line Value: WS
  misc_feature: MA Experiment 20001557 PARAMETER Experiment Name: At_Drought_Soil_Dry_P Parameter: Post Timepoint (hr) Value: 3
  misc_feature: MA Experiment 20001557 PARAMETER Experiment Name: At_Drought_Soil_Dry_P Parameter: Post-Treatment Value: Re-Water vs. No Drought
  misc_feature: MA Experiment 20001557 PARAMETER Experiment Name: At_Drought_Soil_Dry_P Parameter: Timepoint (day) Value: 13
  misc_feature: MA Experiment 20001557 PARAMETER Experiment Name: At_Drought_Soil_Dry_P Parameter: Treatment Value: Drought vs. No Drought
  misc_feature: MA Experiment ID: 20001905 Result: Down-regulated in Transcription
  misc_feature: MA Experiment 20001905 PARAMETER Experiment Name: At_Drought_Reproduction_P Parameter: Age (day) Value: 40
  misc_feature: MA Experiment 20001905 PARAMETER Experiment Name: At_Drought_Reproduction_P Parameter: Organism Value: A. thaliana
  misc_feature: MA Experiment 20001905 PARAMETER Experiment Name: At_Drought_Reproduction_P Parameter: Plant Line Value: WS
  misc_feature: MA Experiment 20001905 PARAMETER Experiment Name: At_Drought_Reproduction_P Parameter: Timepoint (day) Value: 10
  misc_feature: MA Experiment 20001905 PARAMETER Experiment Name: At_Drought_Reproduction_P Parameter: Tissue Value: Rosettes
  misc_feature: MA Experiment 20001905 PARAMETER Experiment Name: At_Drought_Reproduction_P Parameter: Treatment Value: Drought vs. No Drought
  misc_feature: MA Experiment ID: 20001911 Result: Down-regulated in Transcription
  misc_feature: MA Experiment 20001911 PARAMETER Experiment Name: At_Drought_Reproduction_P Parameter: Age (day) Value: 40
  misc_feature: MA Experiment 20001911 PARAMETER Experiment Name: At_Drought_Reproduction_P Parameter: Organism Value: A. thaliana
  misc_feature: MA Experiment 20001911 PARAMETER Experiment Name: At_Drought_Reproduction_P Parameter: Plant Line Value: WS
  misc_feature: MA Experiment 20001911 PARAMETER Experiment Name: At_Drought_Reproduction_P Parameter: Timepoint (day) Value: 10
  misc_feature: MA Experiment 20001911 PARAMETER Experiment Name: At_Drought_Reproduction_P Parameter: Tissue Value: Flowers
  misc_feature: MA Experiment 20001911 PARAMETER Experiment Name: At_Drought_Reproduction_P Parameter: Treatment Value: Drought vs. No Drought
actaaattaaatgaatagttttatttgtatattttaggcaagatggattatatataatgattaaataaattaaggtgtgtattcttcactaaatgtttgagatctatccgtcacactccagaggttaaactcagtcatctgtctttggggaggacaagcaagaacctcaccgacgattccataccaaacaaattcccgatctggaaacaactgacctgtgaaggtgaagtgtatcgctggaaatggcggtggccttccgtggaggccggggaggcgtcggatccggccaatctaccggacttcgtagtttcttctcctaccggatctttatctccgctttgttctcttttctcttcctcgccactttctccgtcgttcttaactcctctcgtcatcagcctcatcaggatcatacattgccgagtatgggcaacgcatatatgcagaggacgtttttggctttgcaatcggatccattgaaaactaggttggatctgatacacaagcaagccattgatcatttgacactggtgaatgcgtatgctgcttacgctaggaagctaaagcttgatgcttctaagcagcttaagctcttcgaagatttggctatcaacttctcggatttgcagtcgaaacctggtttgaaatctgctgtgtctgataatggtaatgctcttgaggaggattcgtttaggcagcttgagaaagaagtgaaggataaggtgaagacagcgaggatgatgatcgttgagtctaaagagagttatgatacacagcttaaaatccagaagttgaaagatacaatctttgctgtccaagaacagttgacaaaggctaagaaaaacggtgcggttgctagcttgatttcagccaagtcggttcctaaaagtcttcattgtttggccatgaggcttgtaggagagaggatctctaatcctgagaagtacaaggatgctccacctgacccagccgcagaggatccaactctttaccactatgcgattttctctgataatgtcattgctgtgtctgttgtggtgagatcggttgtgatgaacgctgaggagccatggaagcatgtcttccatgtggtgacagatcggatgaatctcgcagccatgaaggtgtggtttaagatgcgtcctttggaccgtggtgcccatgttgagattaaatccgtggaggatttcaagttcttaaactcttcctatgcgccggtcttgaggcagcttgagtctgccaagttgcagaagttttactttgagaatcaagctgagaacgcaactaaagattcacataacctcaagttcaagaaccccaagtatctctcgatgttgaaccatctcagattttacttaccagagatgtatccgaagctgaataagattttgttcttggacgatgatgttgtggtgcagaaagacgtgactggtttatggaaaatcaacttggatggcaaggtgaatggagccgttgagacatgttttggttcttttcatcgatatggtcaatacttaaacttctctcatcctttgatcaaagagaactttaaccccagtgcctgtgcttgggcctttggaatgaacatattcgatctcaatgcctggagacgcgagaagtgcaccgatcaataccattactggcagaacctgaatgaagacagaactctctggaaattgggaactctacctccgggattgatcacattctattcaaagacgaaatcattggacaaatcatggcatgtacttgggttaggctataacccgggagtgagcatggacgaaatcagaaatgcaggagtgattcattacaatggaaacatgaaaccgtggctagacattgcgatgaaccaatacaagtctctctggactaaatatgttgataacgaaatggagtttgtgcagatgtgcaattttggtctctaaagagagaacgatgaaaacaaacaaaccggaaagaggaaaaaatagggagaagaggtaacctcggatcgatgtgtttctgtctttctcggcattctttaactgatgatacgtttatctttatatagggttacaaaaaaaaagaagcattttgcttgttatttctgtcatagttttggtctttatttttattttgtaaactcttcacagcaatatgttctcccaagctacaatgtcttgttgtctttatttcatacttgtctgccttaagaatcatatagaagaaactctaaaggttt

SEQ ID NO: 104106 - protein, 561 aa, Arabidopsis thaliana; identical to SEQ ID NO: 39881
  peptide (1)..(561): Ceres Seq. ID no. 13614321
  misc_feature (1)..(561): Homolog of NCBI NO: 18396159 NR Description: glycosyltransferase family 8 [Arabidopsis >gi|26394254|sp|Q9FWA4|GLTR_ARATH Probable glycosyltransferase
  misc_feature (9)..(561): Homolog of NCBI NO: 15230806 NR Description: glycosyltransferase family 8 [Arabidopsis >gi|26398609|sp|Q9LSG3|QUA1_ARATH Glycosyltransferase QUASIMODO1 emb|CAB71043.1~gene_id:MJL12.8~similar to unknown protein
  misc_feature (124)..(558): Homolog of NCBI NO: 15233046 NR Description: glycosyltransferase family 8 [Arabidopsis
  misc_feature (106)..(557): Homolog of NCBI NO: 7271113 NR Description: 68 kDa protein [Cicer arietinum]
  misc_feature (153)..(558): Homolog of NCBI NO: 7485958 NR Description: hypothetical protein F22I13.40 - Arabidopsis >gi|4539335|emb|CAB37483.1| putative protein [Arabidopsis >gi|7270811|emb|CAB80492.1| putative protein [Arabidopsis
  misc_feature (153)..(558): Homolog of NCBI NO: 30691875 NR Description: glycosyltransferase family 8 [Arabidopsis
  misc_feature (102)..(558): Homolog of NCBI NO: 10177914 NR Description: emb|CAB71043.1~gene_id:MCA23.10~strong similarity
  misc_feature (102)..(558): Homolog of NCBI NO: 18422837 NR Description: glycosyltransferase family 8 [Arabidopsis >gi|15810327|gb|AAL07051.1| unknown protein [Arabidopsis >gi|20259235|gb|AAM14333.1| unknown protein [Arabidopsis
  misc_feature (142)..(558): Homolog of NCBI NO: 38423965 NR Description: putative glycosyltransferase [Oryza sativa
  misc_feature (152)..(557): Homolog of NCBI NO: 37533460 NR Description: hypothetical protein [Oryza sativa (japonica group)] >gi|20279459|gb|AAM18739.1| hypothetical protein [Oryza

SEQ ID NO: 104107 - protein, 500 aa, Arabidopsis thaliana; identical to SEQ ID NO: 39882
  peptide (1)..(500): Ceres Seq. ID no. 13614322
  misc_feature (1)..(500): Homolog of NCBI NO: 18396159 NR Description: glycosyltransferase family 8 [Arabidopsis >gi|26394254|sp|Q9FWA4|GLTR_ARATH Probable glycosyltransferase
  misc_feature (1)..(500): Homolog of NCBI NO: 15230806 NR Description: glycosyltransferase family 8 [Arabidopsis >gi|26398609|sp|Q9LSG3|QUA1_ARATH Glycosyltransferase QUASIMODO1 emb|CAB71043.1~gene_id:MJL12.8~similar to unknown protein
  misc_feature (63)..(497): Homolog of NCBI NO: 15233046 NR Description: glycosyltransferase family 8 [Arabidopsis
  misc_feature (45)..(496): Homolog of NCBI NO: 7271113 NR Description: 68 kDa protein [Cicer arietinum]
  misc_feature (92)..(497): Homolog of NCBI NO: 7485958 NR Description: hypothetical protein F22I13.40 - Arabidopsis >gi|4539335|emb|CAB37483.1| putative protein [Arabidopsis >gi|7270811|emb|CAB80492.1| putative protein [Arabidopsis
  misc_feature (92)..(497): Homolog of NCBI NO: 30691875 NR Description: glycosyltransferase family 8 [Arabidopsis
  misc_feature (41)..(497): Homolog of NCBI NO: 10177914 NR Description: emb|CAB71043.1~gene_id:MCA23.10~strong similarity
  misc_feature (41)..(497): Homolog of NCBI NO: 18422837 NR Description: glycosyltransferase family 8 [Arabidopsis >gi|15810327|gb|AAL07051.1| unknown protein [Arabidopsis >gi|20259235|gb|AAM14333.1| unknown protein [Arabidopsis
  misc_feature (81)..(497): Homolog of NCBI NO: 38423965 NR Description: putative glycosyltransferase [Oryza sativa
  misc_feature (91)..(496): Homolog of NCBI NO: 37533460 NR Description: hypothetical protein [Oryza sativa (japonica group)] >gi|20279459|gb|AAM18739.1| hypothetical protein [Oryza

SEQ ID NO: 104108 - protein, 495 aa, Arabidopsis thaliana; identical to SEQ ID NO: 39883
  peptide (1)..(495): Ceres Seq. ID no. 13614323
  misc_feature (1)..(495): Homolog of NCBI NO: 18396159 NR Description: glycosyltransferase family 8 [Arabidopsis >gi|26394254|sp|Q9FWA4|GLTR_ARATH Probable glycosyltransferase
  misc_feature (1)..(495): Homolog of NCBI NO: 15230806 NR Description: glycosyltransferase family 8 [Arabidopsis >gi|26398609|sp|Q9LSG3|QUA1_ARATH Glycosyltransferase QUASIMODO1 emb|CAB71043.1~gene_id:MJL12.8~similar to unknown protein
  misc_feature (58)..(492): Homolog of NCBI NO: 15233046 NR Description: glycosyltransferase family 8 [Arabidopsis
  misc_feature (40)..(491): Homolog of NCBI NO: 7271113 NR Description: 68 kDa protein [Cicer arietinum]
  misc_feature (87)..(492): Homolog of NCBI NO: 7485958 NR Description: hypothetical protein F22I13.40 - Arabidopsis >gi|4539335|emb|CAB37483.1| putative protein [Arabidopsis >gi|7270811|emb|CAB80492.1| putative protein [Arabidopsis
  misc_feature (87)..(492): Homolog of NCBI NO: 30691875 NR Description: glycosyltransferase family 8 [Arabidopsis
  misc_feature (36)..(492): Homolog of NCBI NO: 10177914 NR Description: emb|CAB71043.1~gene_id:MCA23.10~strong similarity
  misc_feature (36)..(492): Homolog of NCBI NO: 18422837 NR Description: glycosyltransferase family 8 [Arabidopsis >gi|15810327|gb|AAL07051.1| unknown protein [Arabidopsis >gi|20259235|gb|AAM14333.1| unknown protein [Arabidopsis
  misc_feature (76)..(492): Homolog of NCBI NO: 38423965 NR Description: putative glycosyltransferase [Oryza sativa
  misc_feature (86)..(491): Homolog of NCBI NO: 37533460 NR Description: hypothetical protein [Oryza sativa (japonica group)] >gi|20279459|gb|AAM18739.1| hypothetical protein [Oryza

SEQ ID NO: 104109 - DNA, 1308 bp, Arabidopsis thaliana
  misc_feature (1)..(1308): Ceres Seq. ID no. 13614328
  misc_feature: MA Experiment ID: 108435 Result: Up-regulated in Transcription
  misc_feature: MA Experiment 108435 PARAMETER Experiment Name: At_stm_Mutants_cDNA_P Parameter: Plant Line Value: wt Landsburg vs stm
  misc_feature: MA Experiment 108435 PARAMETER Experiment Name: At_stm_Mutants_cDNA_P Parameter: Tissue Value: Shoot Apical Meristem Region
  misc_feature: MA Experiment ID: 108462 Result: Up-regulated in Transcription
  misc_feature: MA Experiment 108462 PARAMETER Experiment Name: At_Germinating_Seeds_cDNA_P Parameter: Age (day) Value: 2 vs. 0
  misc_feature: MA Experiment 108462 PARAMETER Experiment Name: At_Germinating_Seeds_cDNA_P Parameter: Tissue Value: Germinating Seeds
  misc_feature: MA Experiment ID: 108463 Result: Up-regulated in Transcription
  misc_feature: MA Experiment 108463 PARAMETER Experiment Name: At_Germinating_Seeds_cDNA_P Parameter: Age (day) Value: 3 vs. 0
  misc_feature: MA Experiment 108463 PARAMETER Experiment Name: At_Germinating_Seeds_cDNA_P Parameter: Tissue Value: Germinating Seeds
  misc_feature: MA Experiment ID: 108464 Result: Up-regulated in Transcription
  misc_feature: MA Experiment 108464 PARAMETER Experiment Name: At_Germinating_Seeds_cDNA_P Parameter: Age (day) Value: 4 vs. 0
  misc_feature: MA Experiment 108464 PARAMETER Experiment Name: At_Germinating_Seeds_cDNA_P Parameter: Tissue Value: Germinating Seeds
  misc_feature: MA Experiment ID: 108576 Result: Down-regulated in Transcription
  misc_feature: MA Experiment 108576 PARAMETER Experiment Name: At_42deg_Heat_cDNA_P Parameter: Temperature (deg C) Value: 42 vs. 22
  misc_feature: MA Experiment 108576 PARAMETER Experiment Name: At_42deg_Heat_cDNA_P Parameter: Timepoint (hr) Value: 1
  misc_feature: MA Experiment 108576 PARAMETER Experiment Name: At_42deg_Heat_cDNA_P Parameter: Tissue Value: Aerial
  misc_feature: MA Experiment ID: 108577 Result: Up-regulated in Transcription
  misc_feature: MA Experiment 108577 PARAMETER Experiment Name: At_42deg_Heat_cDNA_P Parameter: Temperature (deg C) Value: 42 vs. 22
  misc_feature: MA Experiment 108577 PARAMETER Experiment Name: At_42deg_Heat_cDNA_P Parameter: Timepoint (hr) Value: 6
  misc_feature: MA Experiment 108577 PARAMETER Experiment Name: At_42deg_Heat_cDNA_P Parameter: Tissue Value: Aerial
  misc_feature: MA Experiment ID: 108595 Result: Down-regulated in Transcription
  misc_feature: MA Experiment 108595 PARAMETER Experiment Name: At_Ler-pi_Ovule_cDNA_P Parameter: Plant Line Value: null
  misc_feature: MA Experiment ID: 108667 Result: Down-regulated in Transcription
  misc_feature: MA Experiment 108667 PARAMETER Experiment Name: At_2mM_SA_cDNA_P Parameter: Plant Line Value: WS
  misc_feature: MA Experiment 108667 PARAMETER Experiment Name: At_2mM_SA_cDNA_P Parameter: Timepoint (hr) Value: 1
  misc_feature: MA Experiment 108667 PARAMETER Experiment Name: At_2mM_SA_cDNA_P Parameter: Treatment Value: 2mM SA vs. No Treatment
  misc_feature: MA Experiment ID: 20000069 Result: Down-regulated in Transcription
  misc_feature: MA Experiment 20000069 PARAMETER Experiment Name: At_100uM_ABA_Mutants_cDNA_P Parameter: Plant Line Value: CS23
  misc_feature: MA Experiment 20000069 PARAMETER Experiment Name: At_100uM_ABA_Mutants_cDNA_P Parameter: Timepoint (hr) Value: 6
  misc_feature: MA Experiment 20000069 PARAMETER Experiment Name: At_100uM_ABA_Mutants_cDNA_P Parameter: Tissue Value: Aerial
  misc_feature: MA Experiment 20000069 PARAMETER Experiment Name: At_100uM_ABA_Mutants_cDNA_P Parameter: Treatment Value: 100uM ABA vs. No Treatment
  misc_feature: MA Experiment ID: 20000070 Result: Down-regulated in Transcription
  misc_feature: MA Experiment 20000070 PARAMETER Experiment Name: At_100uM_ABA_Mutants_cDNA_P Parameter: Plant Line Value: CS24
  misc_feature: MA Experiment 20000070 PARAMETER Experiment Name: At_100uM_ABA_Mutants_cDNA_P Parameter: Timepoint (hr) Value: 6
  misc_feature: MA Experiment 20000070 PARAMETER Experiment Name: At_100uM_ABA_Mutants_cDNA_P Parameter: Tissue Value: Aerial
  misc_feature: MA Experiment 20000070 PARAMETER Experiment Name: At_100uM_ABA_Mutants_cDNA_P Parameter: Treatment Value: 100uM ABA vs. No Treatment
  misc_feature: MA Experiment ID: 20000071 Result: Down-regulated in Transcription
  misc_feature: MA Experiment 20000071 PARAMETER Experiment Name: At_100uM_ABA_Mutants_cDNA_P Parameter: Plant Line Value: CS8104
  misc_feature: MA Experiment 20000071 PARAMETER Experiment Name: At_100uM_ABA_Mutants_cDNA_P Parameter: Timepoint (hr) Value: 6
  misc_feature: MA Experiment 20000071 PARAMETER Experiment Name: At_100uM_ABA_Mutants_cDNA_P Parameter: Tissue Value: Aerial
  misc_feature: MA Experiment 20000071 PARAMETER Experiment Name: At_100uM_ABA_Mutants_cDNA_P Parameter: Treatment Value: 100uM ABA vs. No Treatment
  misc_feature: MA Experiment ID: 20000072 Result: Down-regulated in Transcription
  misc_feature: MA Experiment 20000072 PARAMETER Experiment Name: At_100uM_ABA_Mutants_cDNA_P Parameter: Plant Line Value: CS8105
  misc_feature: MA Experiment 20000072 PARAMETER Experiment Name: At_100uM_ABA_Mutants_cDNA_P Parameter: Timepoint (hr) Value: 6
  misc_feature: MA Experiment 20000072 PARAMETER Experiment Name: At_100uM_ABA_Mutants_cDNA_P Parameter: Tissue Value: Aerial
  misc_feature: MA Experiment 20000072 PARAMETER Experiment Name: At_100uM_ABA_Mutants_cDNA_P Parameter: Treatment Value: 100uM ABA vs. No Treatment
  misc_feature: MA Experiment ID: 20000086 Result: Down-regulated in Transcription
  misc_feature: MA Experiment 20000086 PARAMETER Experiment Name: At_100uM_ABA_Mutants_cDNA_P Parameter: Plant Line Value: CS22
  misc_feature: MA Experiment 20000086 PARAMETER Experiment Name: At_100uM_ABA_Mutants_cDNA_P Parameter: Timepoint (hr) Value: 6
  misc_feature: MA Experiment 20000086 PARAMETER Experiment Name: At_100uM_ABA_Mutants_cDNA_P Parameter: Tissue Value: Aerial
  misc_feature: MA Experiment 20000086 PARAMETER Experiment Name: At_100uM_ABA_Mutants_cDNA_P Parameter: Treatment Value: 100uM ABA vs. No Treatment
  misc_feature: MA Experiment ID: 20000087 Result: Down-regulated in Transcription
  misc_feature: MA Experiment 20000087 PARAMETER Experiment Name: At_100uM_ABA_Mutants_cDNA_P Parameter: Plant Line Value: WS
  misc_feature: MA Experiment 20000087 PARAMETER Experiment Name: At_100uM_ABA_Mutants_cDNA_P Parameter: Timepoint (hr) Value: 6
  misc_feature: MA Experiment 20000087 PARAMETER Experiment Name: At_100uM_ABA_Mutants_cDNA_P Parameter: Tissue Value: Aerial
  misc_feature: MA Experiment 20000087 PARAMETER Experiment Name: At_100uM_ABA_Mutants_cDNA_P Parameter: Treatment Value: 100uM ABA vs. No Treatment
  misc_feature: MA Experiment ID: 20000088 Result: Down-regulated in Transcription
  misc_feature: MA Experiment 20000088 PARAMETER Experiment Name: At_100uM_ABA_Mutants_cDNA_P Parameter: Plant Line Value: Landsberg
  misc_feature: MA Experiment 20000088 PARAMETER Experiment Name: At_100uM_ABA_Mutants_cDNA_P Parameter: Timepoint (hr) Value: 6
  misc_feature: MA Experiment 20000088 PARAMETER Experiment Name: At_100uM_ABA_Mutants_cDNA_P Parameter: Tissue Value: Aerial
  misc_feature: MA Experiment 20000088 PARAMETER Experiment Name: At_100uM_ABA_Mutants_cDNA_P Parameter: Treatment Value: 100uM ABA vs. No Treatment
  misc_feature: MA Experiment ID: 20000089 Result: Down-regulated in Transcription
  misc_feature: MA Experiment ID: 20000111 Result: Up-regulated in Transcription
  misc_feature: MA Experiment 20000111 PARAMETER Experiment Name: At_42deg_Heat_cDNA_P Parameter: Temperature (deg C) Value: 42 vs. 22
  misc_feature: MA Experiment 20000111 PARAMETER Experiment Name: At_42deg_Heat_cDNA_P Parameter: Timepoint (hr) Value: 6
  misc_feature: MA Experiment 20000111 PARAMETER Experiment Name: At_42deg_Heat_cDNA_P Parameter: Tissue Value: Aerial
  misc_feature: MA Experiment ID: 20000184 Result: Up-regulated in Transcription
  misc_feature: MA Experiment 20000184 PARAMETER Experiment Name: At_Shoots__P Parameter: Age (day) Value: 7
  misc_feature: MA Experiment 20000184 PARAMETER Experiment Name: At_Shoots__P Parameter: Tissue Value: Shoots vs. Whole Plant
  misc_feature: MA Experiment ID: 20000213 Result: Up-regulated in Transcription
  misc_feature: MA Experiment 20000213 PARAMETER Experiment Name: At_4deg_Cold_P Parameter: Timepoint (hr) Value: 2
  misc_feature: MA Experiment ID: 20000224 Result: Up-regulated in Transcription
  misc_feature: MA Experiment ID: 20000234 Result: Up-regulated in Transcription
  misc_feature: MA Experiment 20000234 PARAMETER Experiment Name: At_Siliques_P Parameter: Age (day) Value: 21
  misc_feature: MA Experiment 20000234 PARAMETER Experiment Name: At_Siliques_P Parameter: Organism Value: A. thaliana
  misc_feature: MA Experiment 20000234 PARAMETER Experiment Name: At_Siliques_P Parameter: Plant Line Value: WS
  misc_feature: MA Experiment 20000234 PARAMETER Experiment Name: At_Siliques_P Parameter: Tissue Value: Less Than 5mm Siliques vs. Whole Plant
  misc_feature: MA Experiment ID: 20000235 Result: Up-regulated in Transcription
  misc_feature: MA Experiment 20000235 PARAMETER Experiment Name: At_Siliques_P Parameter: Age (day) Value: 21
  misc_feature: MA Experiment 20000235 PARAMETER Experiment Name: At_Siliques_P Parameter: Organism Value: A. thaliana
  misc_feature: MA Experiment 20000235 PARAMETER Experiment Name: At_Siliques_P Parameter: Plant Line Value: WS
  misc_feature: MA Experiment 20000235 PARAMETER Experiment Name: At_Siliques_P Parameter: Tissue Value: 5-10mm Siliques vs. Whole Plant
  misc_feature: MA Experiment ID: 20000265 Result: Up-regulated in Transcription
  misc_feature: MA Experiment 20000265 PARAMETER Experiment Name: At_Open_Flower_P Parameter: Age (day) Value: 21
  misc_feature: MA Experiment 20000265 PARAMETER Experiment Name: At_Open_Flower_P Parameter: Plant Line Value: WS
  misc_feature: MA Experiment 20000265 PARAMETER Experiment Name: At_Open_Flower_P Parameter: Tissue Value: Closed Flower vs. Whole Plant
  misc_feature: MA Experiment ID: 20000437 Result: Down-regulated in Transcription
  misc_feature: MA Experiment 20000437 PARAMETER Experiment Name: At_Drought_P Parameter: Age (day) Value: 8
  misc_feature: MA Experiment 20000437 PARAMETER Experiment Name: At_Drought_P Parameter: Organism Value: A. thaliana
  misc_feature: MA Experiment 20000437 PARAMETER Experiment Name: At_Drought_P Parameter: Plant Line Value: WS
  misc_feature: MA Experiment 20000437 PARAMETER Experiment Name: At_Drought_P Parameter: Timepoint (hr) Value: 24
  misc_feature: MA Experiment 20000437 PARAMETER Experiment Name: At_Drought_P Parameter: Tissue Value: Whole Plant
  misc_feature: MA Experiment 20000437 PARAMETER Experiment Name: At_Drought_P Parameter: Treatment Value: Drought vs. No Drought
  misc_feature: MA Experiment ID: 20000438 Result: Up-regulated in Transcription
  misc_feature: MA Experiment 20000438 PARAMETER Experiment Name: At_Shoots__P Parameter: Age (day) Value: 14
  misc_feature: MA Experiment 20000438 PARAMETER Experiment Name: At_Shoots__P Parameter: Tissue Value: Shoots vs. Whole Plant
  misc_feature: MA Experiment ID: 20000443 Result: Up-regulated in Transcription
  misc_feature: MA Experiment 20000443 PARAMETER Experiment Name: At_1uM_BR-BRZ__P Parameter: Tissue Value: Shoot Apices
  misc_feature: MA Experiment 20000443 PARAMETER Experiment Name: At_1uM_BR-BRZ__P Parameter: Treatment Value: 1uM BRZ vs. No Treatment
  misc_feature: MA Experiment ID: 20000460 Result: Down-regulated in Transcription
  misc_feature: MA Experiment 20000460 PARAMETER Experiment Name: At_10percent_PEG_P Parameter: Age (day) Value: 12
  misc_feature: MA Experiment 20000460 PARAMETER Experiment Name: At_10percent_PEG_P Parameter: Organism Value: A. thaliana
  misc_feature: MA Experiment 20000460 PARAMETER Experiment Name: At_10percent_PEG_P Parameter: Plant Line Value: WS
  misc_feature: MA Experiment 20000460 PARAMETER Experiment Name: At_10percent_PEG_P Parameter: Timepoint (day) Value: 12
  misc_feature: MA Experiment 20000460 PARAMETER Experiment Name: At_10percent_PEG_P Parameter: Tissue Value: Whole Plant
  misc_feature: MA Experiment 20000460 PARAMETER Experiment Name: At_10percent_PEG_P Parameter: Treatment Value: 10percent PEG vs. No Treatment
  misc_feature: MA Experiment ID: 20000573 Result: Down-regulated in Transcription
  misc_feature: MA Experiment 20000573 PARAMETER Experiment Name: At_100uM_ABA_Mutants__P Parameter: Organism Value: A. thaliana
  misc_feature: MA Experiment 20000573 PARAMETER Experiment Name: At_100uM_ABA_Mutants__P Parameter: Plant Line Value: CS22 vs. Ler wt
  misc_feature: MA Experiment 20000573 PARAMETER Experiment Name: At_100uM_ABA_Mutants__P Parameter: Timepoint (hr) Value: N/A
  misc_feature: MA Experiment 20000573 PARAMETER Experiment Name: At_100uM_ABA_Mutants__P Parameter: Tissue Value: Whole Plant
  misc_feature: MA Experiment 20000573 PARAMETER Experiment Name: At_100uM_ABA_Mutants__P Parameter: Treatment Value: None
  misc_feature: MA Experiment ID: 20000574 Result: Down-regulated in Transcription
  misc_feature: MA Experiment 20000574 PARAMETER Experiment Name: At_100uM_ABA_Mutants__P Parameter: Organism Value: A. thaliana
  misc_feature: MA Experiment 20000574 PARAMETER Experiment Name: At_100uM_ABA_Mutants__P Parameter: Plant Line Value: CS23 vs. Ler wt
  misc_feature: MA Experiment 20000574 PARAMETER Experiment Name: At_100uM_ABA_Mutants__P Parameter: Timepoint (hr) Value: N/A
  misc_feature: MA Experiment 20000574 PARAMETER Experiment Name: At_100uM_ABA_Mutants__P Parameter: Tissue Value: Whole Plant
  misc_feature: MA Experiment 20000574 PARAMETER Experiment Name: At_100uM_ABA_Mutants__P Parameter: Treatment Value: None
  misc_feature: MA Experiment ID: 20000578 Result: Down-regulated in Transcription
  misc_feature: MA Experiment 20000578 PARAMETER Experiment Name: At_CS3726__P Parameter: Organism Value: A. thaliana
  misc_feature: MA Experiment 20000578 PARAMETER Experiment Name: At_CS3726__P Parameter: Plant Line Value: CS3726
  misc_feature: MA Experiment 20000578 PARAMETER Experiment Name: At_CS3726__P Parameter: Tissue Value: Whole Plant
  misc_feature: MA Experiment ID: 20001247 Result: Up-regulated in Transcription
  misc_feature: MA Experiment 20001247 PARAMETER Experiment Name: At_Far-red-induction_P Parameter: Age (day) Value: 7
  misc_feature: MA Experiment 20001247 PARAMETER Experiment Name: At_Far-red-induction_P Parameter: Light Value: Far-red vs. White
  misc_feature: MA Experiment 20001247 PARAMETER Experiment Name: At_Far-red-induction_P Parameter: Organism Value: A. thaliana
  misc_feature: MA Experiment 20001247 PARAMETER Experiment Name: At_Far-red-induction_P Parameter: Plant Line Value: Columbia
  misc_feature: MA Experiment 20001247 PARAMETER Experiment Name: At_Far-red-induction_P Parameter: Timepoint (hr) Value: 1
  misc_feature: MA Experiment 20001247 PARAMETER Experiment Name: At_Far-red-induction_P Parameter: Tissue Value: Whole Plant
  misc_feature: MA Experiment ID: 20001248 Result: Down-regulated in Transcription
  misc_feature: MA Experiment 20001248 PARAMETER Experiment Name: At_Far-red-induction_P Parameter: Age (day) Value: 7
  misc_feature: MA Experiment 20001248 PARAMETER Experiment Name: At_Far-red-induction_P Parameter: Light Value: Far-red vs. White
  misc_feature: MA Experiment 20001248 PARAMETER Experiment Name: At_Far-red-induction_P Parameter: Organism Value: A. thaliana
  misc_feature: MA Experiment 20001248 PARAMETER Experiment Name: At_Far-red-induction_P Parameter: Plant Line Value: Columbia
  misc_feature: MA Experiment 20001248 PARAMETER Experiment Name: At_Far-red-induction_P Parameter: Timepoint (hr) Value: 4
  misc_feature: MA Experiment 20001248 PARAMETER Experiment Name: At_Far-red-induction_P Parameter: Tissue Value: Whole Plant
  misc_feature: MA Experiment ID: 20001451 Result: Up-regulated in Transcription
  misc_feature: MA Experiment 20001451 PARAMETER Experiment Name: At_Far-red-induction_P Parameter: Age (day) Value: 7
  misc_feature: MA Experiment 20001451 PARAMETER Experiment Name: At_Far-red-induction_P Parameter: Light Value: Far-red vs. White
  misc_feature: MA Experiment 20001451 PARAMETER Experiment Name: At_Far-red-induction_P Parameter: Organism Value: A. thaliana
  misc_feature: MA Experiment 20001451 PARAMETER Experiment Name: At_Far-red-induction_P Parameter: Plant Line Value: Columbia
  misc_feature: MA Experiment 20001451 PARAMETER Experiment Name: At_Far-red-induction_P Parameter: Timepoint (hr) Value: 24
  misc_feature: MA Experiment 20001451 PARAMETER Experiment Name: At_Far-red-induction_P Parameter: Tissue Value: Whole Plant
  misc_feature: MA Experiment ID: 20001458 Result: Down-regulated in Transcription
  misc_feature: MA Experiment 20001458 PARAMETER Experiment Name: At_50mM_NH4NO3_L-to-H_P Parameter: Age (day) Value: Undefined
  misc_feature: MA Experiment 20001458 PARAMETER Experiment Name: At_50mM_NH4NO3_L-to-H_P Parameter: Organism Value: Undefined
  misc_feature: MA Experiment 20001458 PARAMETER Experiment Name: At_50mM_NH4NO3_L-to-H_P Parameter: Plant Line Value: Undefined
  misc_feature: MA Experiment 20001458 PARAMETER Experiment Name: At_50mM_NH4NO3_L-to-H_P Parameter: Timepoint (hr) Value: 2
  misc_feature: MA Experiment 20001458 PARAMETER Experiment Name: At_50mM_NH4NO3_L-to-H_P Parameter: Tissue Value: Siliques
  misc_feature: MA Experiment 20001458 PARAMETER Experiment Name: At_50mM_NH4NO3_L-to-H_P Parameter: Treatment Value: 50mM NH4NO3 vs. 100mM Manitol
  misc_feature: MA Experiment ID: 20001459 Result: Up-regulated in Transcription
  misc_feature: MA Experiment 20001459 PARAMETER Experiment Name: At_50mM_NH4NO3_L-to-H_P Parameter: Age (day) Value: Undefined
  misc_feature: MA Experiment 20001459 PARAMETER Experiment Name: At_50mM_NH4NO3_L-to-H_P Parameter: Organism Value: Undefined
  misc_feature: MA Experiment 20001459 PARAMETER Experiment Name: At_50mM_NH4NO3_L-to-H_P Parameter: Plant Line Value: Undefined
  misc_feature: MA Experiment 20001459 PARAMETER Experiment Name: At_50mM_NH4NO3_L-to-H_P Parameter: Timepoint (hr) Value: 4
  misc_feature: MA Experiment 20001459 PARAMETER Experiment Name: At_50mM_NH4NO3_L-to-H_P Parameter: Tissue Value: Siliques
  misc_feature: MA Experiment 20001459 PARAMETER Experiment Name: At_50mM_NH4NO3_L-to-H_P Parameter: Treatment Value: 50mM NH4NO3 vs. 100mM Manitol
  misc_feature: MA Experiment ID: 20001558 Result: Up-regulated in Transcription
  misc_feature: MA Experiment 20001558 PARAMETER Experiment Name: At_Drought_Soil_Dry_P Parameter: Age (day) Value: 27
  misc_feature: MA Experiment 20001558 PARAMETER Experiment Name: At_Drought_Soil_Dry_P Parameter: Organism Value: A. thaliana
  misc_feature: MA Experiment 20001558 PARAMETER Experiment Name: At_Drought_Soil_Dry_P Parameter: Plant Line Value: WS
  misc_feature: MA Experiment 20001558 PARAMETER Experiment Name: At_Drought_Soil_Dry_P Parameter: Post Timepoint (hr) Value: 6
  misc_feature: MA Experiment 20001558 PARAMETER Experiment Name: At_Drought_Soil_Dry_P Parameter: Post-Treatment Value: Re-Water vs. No Drought
  misc_feature: MA Experiment 20001558 PARAMETER Experiment Name: At_Drought_Soil_Dry_P Parameter: Timepoint (day) Value: 13
  misc_feature: MA Experiment 20001558 PARAMETER Experiment Name: At_Drought_Soil_Dry_P Parameter: Treatment Value: Drought vs. No Drought
  misc_feature: MA Experiment ID: 20001757 Result: Up-regulated in Transcription
  misc_feature: MA Experiment 20001757 PARAMETER Experiment Name: At_50mM_NH4NO3_L-to-H_P Parameter: Timepoint (hr) Value: 6
  misc_feature: MA Experiment 20001757 PARAMETER Experiment Name: At_50mM_NH4NO3_L-to-H_P Parameter: Tissue Value: Leaf
  misc_feature: MA Experiment 20001757 PARAMETER Experiment Name: At_50mM_NH4NO3_L-to-H_P Parameter: Treatment Value: 50mM NH4NO3 vs 100mM Mannitol
  misc_feature: MA Experiment ID: 20001904 Result: Down-regulated in Transcription
  misc_feature: MA Experiment 20001904 PARAMETER Experiment Name: At_Drought_Reproduction_P Parameter: Age (day) Value: 37
  misc_feature: MA Experiment 20001904 PARAMETER Experiment Name: At_Drought_Reproduction_P Parameter: Organism Value: A. thaliana
  misc_feature: MA Experiment 20001904 PARAMETER Experiment Name: At_Drought_Reproduction_P Parameter: Plant Line Value: WS
  misc_feature: MA Experiment 20001904 PARAMETER Experiment Name: At_Drought_Reproduction_P Parameter: Timepoint (day) Value: 7
  misc_feature: MA Experiment 20001904 PARAMETER Experiment Name: At_Drought_Reproduction_P Parameter: Tissue Value: Rosettes
  misc_feature: MA Experiment 20001904 PARAMETER Experiment Name: At_Drought_Reproduction_P Parameter: Treatment Value: Drought vs. No Drought
aattacaatctctccttttgccaacaatcattgcttaaaaaacacataccttcttctttagttataaaaatgttgaaagaagagagtaatgagagtggtacttgggcacgagcatgtgacacttgtcgttcagccgcctgcactgtctactgtgaagccgactctgcctacttgtgcaccacctgtgatgctcgagttcacgcagccaaccgtgttgcttctcgccatgaacgtgttcgtgtctgtcagtcatgtgagtctgccccagctgcgtttttgtgtaaagcagacgctgcgtctctttgtacagcttgtgatgcagagattcattccgcaaacccactagctagacgtcatcagcgagttccgattcttccattatctgcaaactcttgcagctccatggccccaagtgagactgatgctgataacgatgaggatgatcgagaggttgcttcgtggttactccctaatccagggaaaaacatcggtaatcagaataatgggttcttgtttggtgttgagtaccttgatcttgtggattacagctccagcatggacaaccaattcgaagataatcagtacactcactaccagaggagctttggaggagatggagttgtgccgcttcaagttgaagaatcaacaagtcacctgcaacaaagccaacaaaactttcagttgggtatcaactatggattctcctcaggagctcactacaacaacaactccttaaaggacctaaaccatagcgcatccgtttcatcaatggacatcagtgttgtgccagagtcaactgcaagtgacataacagtccaacacccaagaactactaaagagacgatagaccaactatctggtcctcctactcaggtggtgcaacagcttactccaatggagagggaggctagggtcctgagatacagagagaagaagaagacaaggaaatttgacaagacaataagatatgcttcaagaaaggcatatgcagagataagaccacggatcaagggcagattcgcaaagaggatagaaactgaagctgaggctgaagaaatcttctcaacatcgctaatgtctgagactggatatggaattgtcccttccttctaaactcctatggcgaagatagactagattgcatgctgtaaattacttctagtttggatttctacaagttattactgcatatgggtccttagttttgtgacttttgtcaaactagtacgagtttaatcagatatgttcctatagctgcagttgtttaagcaacatctcgctacataattgaattggtgaaatcttatc

SEQ ID NO: 104110 - protein, 370 aa, Arabidopsis thaliana; identical to SEQ ID NO: 25872
  peptide (1)..(370): Ceres Seq. ID no. 13614329
  misc_feature (34)..(81): Pfam Name: B-box zinc finger Pfam Description: B-box zinc finger
  misc_feature (24)..(370): Homolog of NCBI NO: 15232898 NR Description: Zinc finger protein CONSTANS-LIKE 2 (COL2)
  misc_feature (139)..(370): Homolog of NCBI NO: 15242402 NR Description: Zinc finger protein CONSTANS [Arabidopsis
  misc_feature (24)..(150): Homolog of NCBI NO: 15242402 NR Description: Zinc finger protein CONSTANS [Arabidopsis
  misc_feature (24)..(370): Homolog of NCBI NO: 15242403 NR Description: Zinc finger protein CONSTANS-LIKE 1 (COL1)
  misc_feature (24)..(370): Homolog of NCBI NO: 30984027 NR Description: constans-like protein [Brassica napus]
  misc_feature (24)..(370): Homolog of NCBI NO: 7488448 NR Description: CONSTANS homolog 1 - rape
  misc_feature (24)..(370): Homolog of NCBI NO: 22854966 NR Description: COL1 protein [Brassica nigra]
  misc_feature (24)..(370): Homolog of NCBI NO: 2895186 NR Description: CONSTANS homolog [Brassica napus]
  misc_feature (24)..(370): Homolog of NCBI NO: 22854920 NR Description: COL1 protein [Brassica nigra] COL1 protein [Brassica nigra] >gi|22854926|gb|AAN09818.1| COL1 [Brassica nigra] >gi|22854936|gb|AAN09823.1| COL1 protein
  misc_feature (24)..(370): Homolog of NCBI NO: 22854950 NR Description: COL1 protein [Brassica nigra]

SEQ ID NO: 104111 - protein, 347 aa, Arabidopsis thaliana; identical to SEQ ID NO: 25873
  peptide (1)..(347): Ceres Seq. ID no. 13614330
  misc_feature (11)..(58): Pfam Name: B-box zinc finger Pfam Description: B-box zinc finger
  misc_feature (1)..(347): Homolog of NCBI NO: 15232898 NR Description: Zinc finger protein CONSTANS-LIKE 2 (COL2)
  misc_feature (116)..(347): Homolog of NCBI NO: 15242402 NR Description: Zinc finger protein CONSTANS [Arabidopsis
  misc_feature (1)..(127): Homolog of NCBI NO: 15242402 NR Description: Zinc finger protein CONSTANS [Arabidopsis
  misc_feature (1)..(347): Homolog of NCBI NO: 15242403 NR Description: Zinc finger protein CONSTANS-LIKE 1 (COL1)
  misc_feature (1)..(347): Homolog of NCBI NO: 30984027 NR Description: constans-like protein [Brassica napus]
  misc_feature (1)..(347): Homolog of NCBI NO: 7488448 NR Description: CONSTANS homolog 1 - rape
  misc_feature (1)..(347): Homolog of NCBI NO: 22854966 NR Description: COL1 protein [Brassica nigra]
  misc_feature (1)..(347): Homolog of NCBI NO: 2895186 NR Description: CONSTANS homolog [Brassica napus]
  misc_feature (1)..(347): Homolog of NCBI NO: 22854920 NR Description: COL1 protein [Brassica nigra] COL1 protein [Brassica nigra] >gi|22854926|gb|AAN09818.1| COL1 [Brassica nigra] >gi|22854936|gb|AAN09823.1| COL1 protein
  misc_feature (1)..(347): Homolog of NCBI NO: 22854950 NR Description: COL1 protein [Brassica nigra]

SEQ ID NO: 104112 - protein, 236 aa, Arabidopsis thaliana; identical to SEQ ID NO: 25874
  peptide (1)..(236): Ceres Seq. ID no. 13614331
  misc_feature (172)..(211): Pfam Name: CCT motif Pfam Description: CCT motif
  misc_feature (1)..(236): Homolog of NCBI NO: 15232898 NR Description: Zinc finger protein CONSTANS-LIKE 2 (COL2)
  misc_feature (5)..(236): Homolog of NCBI NO: 15242402 NR Description: Zinc finger protein CONSTANS [Arabidopsis
  misc_feature (1)..(16): Homolog of NCBI NO: 15242402 NR Description: Zinc finger protein CONSTANS [Arabidopsis
  misc_feature (1)..(236): Homolog of NCBI NO: 15242403 NR Description: Zinc finger protein CONSTANS-LIKE 1 (COL1)
  misc_feature (1)..(236): Homolog of NCBI NO: 30984027 NR Description: constans-like protein [Brassica napus]
  misc_feature (1)..(236): Homolog of NCBI NO: 7488448 NR Description: CONSTANS homolog 1 - rape
  misc_feature (1)..(236): Homolog of NCBI NO: 22854966 NR Description: COL1 protein [Brassica nigra]
  misc_feature (1)..(236): Homolog of NCBI NO: 2895186 NR Description: CONSTANS homolog [Brassica napus]
  misc_feature (1)..(236): Homolog of NCBI NO: 22854920 NR Description: COL1 protein [Brassica nigra] COL1 protein [Brassica nigra] >gi|22854926|gb|AAN09818.1| COL1 [Brassica nigra] >gi|22854936|gb|AAN09823.1| COL1 protein
  misc_feature (1)..(236): Homolog of NCBI NO: 22854950 NR Description: COL1 protein [Brassica nigra]

SEQ ID NO: 104113 - DNA, 1593 bp, Arabidopsis thaliana
  misc_feature (1)..(1593): Ceres Seq. ID no. 13614332
  misc_feature: MA Experiment ID: 20000171 Result: Down-regulated in Transcription
  misc_feature: MA Experiment 20000171 PARAMETER Experiment Name: At_42deg_Heat_P Parameter: Age (day) Value: 14
  misc_feature: MA Experiment 20000171 PARAMETER Experiment Name: At_42deg_Heat_P Parameter: Organism Value: A. thaliana
  misc_feature: MA Experiment 20000171 PARAMETER Experiment Name: At_42deg_Heat_P Parameter: Plant Line Value: WS
  misc_feature: MA Experiment 20000171 PARAMETER Experiment Name: At_42deg_Heat_P Parameter: Temperature (deg C) Value: 42 vs. 22
  misc_feature: MA Experiment 20000171 PARAMETER Experiment Name: At_42deg_Heat_P Parameter: Timepoint (hr) Value: 1
  misc_feature: MA Experiment 20000171 PARAMETER Experiment Name: At_42deg_Heat_P Parameter: Tissue Value: Aerial
  misc_feature: MA Experiment ID: 20000173 Result: Down-regulated in Transcription
  misc_feature: MA Experiment 20000173 PARAMETER Experiment Name: At_42deg_Heat_P Parameter: Age (day) Value: 14
  misc_feature: MA Experiment 20000173 PARAMETER Experiment Name: At_42deg_Heat_P Parameter: Organism Value: A. thaliana
  misc_feature: MA Experiment 20000173 PARAMETER Experiment Name: At_42deg_Heat_P Parameter: Plant Line Value: WS
  misc_feature: MA Experiment 20000173 PARAMETER Experiment Name: At_42deg_Heat_P Parameter: Temperature (deg C) Value: 42 vs. 22
  misc_feature: MA Experiment 20000173 PARAMETER Experiment Name: At_42deg_Heat_P Parameter: Timepoint (hr) Value: 6
  misc_feature: MA Experiment 20000173 PARAMETER Experiment Name: At_42deg_Heat_P Parameter: Tissue Value: Aerial
  misc_feature: MA Experiment ID: 20000184 Result: Down-regulated in Transcription
  misc_feature: MA Experiment 20000184 PARAMETER Experiment Name: At_Shoots__P Parameter: Age (day) Value: 7
  misc_feature: MA Experiment 20000184 PARAMETER Experiment Name: At_Shoots__P Parameter: Tissue Value: Shoots vs. Whole Plant
gaaaaattcaaagattgagtcaccaccaccatagtaatatacgcgtatgagttcccagatgtgatctccatccaacgttgtatttctttcgttttggttatcttcttcggttccatcgaattccaacaattcccatcgaggaatttggttacgaatcttttgatctgactaaacctagggagcttgatcacaaggagactgaaaccaatgctaggaggagtctcttcaggttagtagaatgagtagaaaaagaacggaaaatggcagtgaatcaggaccagccacttctcatgttcctgtggatagattcgggtttctcaagcaagaacatgccaattcgcctgagcgttttagcaagtctaaaactacatcatccactgatcatgacagagaggagagaaaggtgagaaaatggaggaagatgattggggttggagggagtgattggaagcattatgttaggagaaaacctaatgttgtcagaaggcgtatacgaaaagggatccctgattgcttacgaggtcttgtttggcagttaatctcaggaagtcgagaccttttgcttatgaatcctggtgtttatgagcaattggtgatttatgaaacatctgcatcagagcttgatatcattcgagacatatcccgtactttcccatcacatgttttctttcagaagagacatggacctgggcaaagatccttgtacaatgtccttaaggcatactcagtttatgacagagatgtcggatatgttcaggggatggggtttatagccggtttgttgcttctctatatgagcgaagaagatgccttctggttattagttgcattacttaaaggagctgttcatgctccaatggaaggactgtatcatgcagggcttccccttgtacagcaatacctgtttcagttagaaagcttggtaaaagagctaattccgaagctcggagaacattttactcaagaaatgattaatccgagtatgtatgcaagtcaatggttcatcaccgtcttctcatactcatttcctttccctttggctctacggatatgggatgtgtttctctccgagggtgttaaaatcgtgttcaaagtgggcttagcattgctcaagtattgccaagatgagttggtaaagttaccgtttgagaaactaatacatgctctgaaaactttcccggaagacgcaatgaatccggataccttgcttccattggcttactctatcaaggtatcaaagcgtttggaagaactgacactggagtatcagaagactaatgccaaaccggttcaaccgtaggaaatccggttggcaataacctgaaccagaagttggattcgaattcgttttctcatcttatcttttcttgttggaatatattcttttttcatcatattgtcaagttgggtgggaatttcttatcagaagctctctgattgtttttagcaatttcgtggaaaagaagaaggcatgctccagctgatgtatagatagagagagagaccagtgttcctagagagatatcactaatgtgaaaagtaaatcatattgtttaaaggtatttttattctttaaggttcatggtaccaaac

SEQ ID NO: 104114 - protein, 353 aa, Arabidopsis thaliana; identical to SEQ ID NO: 24763
  peptide (1)..(353): Ceres Seq. ID no. 13614333
  misc_feature (85)..(301): Pfam Name: TBC domain Pfam Description: TBC domain
  misc_feature (1)..(353): Homolog of NCBI NO: 18396196 NR Description: plant adhesion molecule -related [Arabidopsis >gi|21593435|gb|AAM65402.1| putative plant adhesion molecule
  misc_feature (1)..(298): Homolog of NCBI NO: 30678579 NR Description: plant adhesion molecule -related [Arabidopsis
  misc_feature (299)..(353): Homolog of NCBI NO: 30678579 NR Description: plant adhesion molecule -related [Arabidopsis
  misc_feature (1)..(299): Homolog of NCBI NO: 6957709 NR Description: putative plant adhesion molecule [Arabidopsis
  misc_feature (1)..(352): Homolog of NCBI NO: 15237222 NR Description: plant adhesion molecule 1 (PAM1) [Arabidopsis
  misc_feature (62)..(352): Homolog of NCBI NO: 22531279 NR Description: plant adhesion molecule PAM1 [Arabidopsis
  misc_feature (39)..(352): Homolog of NCBI NO: 3095098 NR Description: truncated EVI5 [Homo sapiens]
  misc_feature (39)..(352): Homolog of NCBI NO: 19923325 NR Description: ecotropic viral integration site 5; Neuroblastoma
  misc_feature (31)..(349): Homolog of NCBI NO: 31207277 NR Description: ENSANGP00000001286 [Anopheles gambiae]
  misc_feature (39)..(352): Homolog of NCBI NO: 27777640 NR Description: RIKEN cDNA B130050I23 gene [Mus musculus]

SEQ ID NO: 104115 - protein, 292 aa, Arabidopsis thaliana; identical to SEQ ID NO: 24764
  peptide (1)..(292): Ceres Seq. ID no. 13614334
  misc_feature (24)..(240): Pfam Name: TBC domain Pfam Description: TBC domain
  misc_feature (1)..(292): Homolog of NCBI NO: 18396196 NR Description: plant adhesion molecule -related [Arabidopsis >gi|21593435|gb|AAM65402.1| putative plant adhesion molecule
  misc_feature (1)..(237): Homolog of NCBI NO: 30678579 NR Description: plant adhesion molecule -related [Arabidopsis
  misc_feature (238)..(292): Homolog of NCBI NO: 30678579 NR Description: plant adhesion molecule -related [Arabidopsis
  misc_feature (1)..(238): Homolog of NCBI NO: 6957709 NR Description: putative plant adhesion molecule [Arabidopsis
  misc_feature (1)..(291): Homolog of NCBI NO: 15237222 NR Description: plant adhesion molecule 1 (PAM1) [Arabidopsis
  misc_feature (1)..(291): Homolog of NCBI NO: 22531279 NR Description: plant adhesion molecule PAM1 [Arabidopsis
  misc_feature (1)..(291): Homolog of NCBI NO: 3095098 NR Description: truncated EVI5 [Homo sapiens]
  misc_feature (1)..(291): Homolog of NCBI NO: 19923325 NR Description: ecotropic viral integration site 5; Neuroblastoma
  misc_feature (1)..(288): Homolog of NCBI NO: 31207277 NR Description: ENSANGP00000001286 [Anopheles gambiae]
  misc_feature (1)..(291): Homolog of NCBI NO: 27777640 NR Description: RIKEN cDNA B130050I23 gene [Mus musculus]

SEQ ID NO: 104116 - protein, 244 aa, Arabidopsis thaliana; identical to SEQ ID NO: 24765
  peptide (1)..(244): Ceres Seq. ID no. 13614335
  misc_feature (1)..(192): Pfam Name: TBC domain Pfam Description: TBC domain
  misc_feature (1)..(244): Homolog of NCBI NO: 18396196 NR Description: plant adhesion molecule -related [Arabidopsis >gi|21593435|gb|AAM65402.1| putative plant adhesion molecule
  misc_feature (1)..(189): Homolog of NCBI NO: 30678579 NR Description: plant adhesion molecule -related [Arabidopsis
  misc_feature (190)..(244): Homolog of NCBI NO: 30678579 NR Description: plant adhesion molecule -related [Arabidopsis
  misc_feature (1)..(190): Homolog of NCBI NO: 6957709 NR Description: putative plant adhesion molecule [Arabidopsis
  misc_feature (1)..(243): Homolog of NCBI NO: 15237222 NR Description: plant adhesion molecule 1 (PAM1) [Arabidopsis
  misc_feature (1)..(243): Homolog of NCBI NO: 22531279 NR Description: plant adhesion molecule PAM1 [Arabidopsis
  misc_feature (1)..(243): Homolog of NCBI NO: 3095098 NR Description: truncated EVI5 [Homo sapiens]
  misc_feature (1)..(243): Homolog of NCBI NO: 19923325 NR Description: ecotropic viral integration site 5; Neuroblastoma
  misc_feature (1)..(240): Homolog of NCBI NO: 31207277 NR Description: ENSANGP00000001286 [Anopheles gambiae]
  misc_feature (1)..(243): Homolog of NCBI NO: 27777640 NR Description: RIKEN cDNA B130050I23 gene [Mus musculus]

SEQ ID NO: 104117 - DNA, 1157 bp, Arabidopsis thaliana
  misc_feature (1)..(1157): Ceres Seq. ID no. 13614336
  misc_feature: MA Experiment ID: 20001905 Result: Up-regulated in Transcription
  misc_feature: MA Experiment 20001905 PARAMETER Experiment Name: At_Drought_Reproduction_P Parameter: Age (day) Value: 40
  misc_feature: MA Experiment 20001905 PARAMETER Experiment Name: At_Drought_Reproduction_P Parameter: Organism Value: A. thaliana
  misc_feature: MA Experiment 20001905 PARAMETER Experiment Name: At_Drought_Reproduction_P Parameter: Plant Line Value: WS
  misc_feature: MA Experiment 20001905 PARAMETER Experiment Name: At_Drought_Reproduction_P Parameter: Timepoint (day) Value: 10
  misc_feature: MA Experiment 20001905 PARAMETER Experiment Name: At_Drought_Reproduction_P Parameter: Tissue Value: Rosettes
  misc_feature: MA Experiment 20001905 PARAMETER Experiment Name: At_Drought_Reproduction_P Parameter: Treatment Value: Drought vs. No Drought
tttcgcgtctcgaccttcgaattcgacaaatccctaattccaaaatcctctcggatctaaaagagtgtgtgataacataagatgtcgtcttctcgggaagagaatgtgtacttagccaagttagctgagcaagctgaacgttatgaggaaatggttgagttcatggagaaagttgcaaagactgttgacaccgatgagcttactgtcgaagagagaaacctcttgtctgttgcttacaagaacgtcattggtgctaggagagcttcctggaggatcatatcttccattgaacagaaggaagaaagcagaggaaacgatgatcatgtttccattatcaaggactacagaggaaagatcgaaactgaactcagcaaaatctgtgatggaatactcaatcttctggattctcaccttgttcccactgcatctttggccgagtccaaagtcttttacctcaaaatgaaaggagattaccacaggtaccttgctgagtttaagactggagctgagaggaaagaagctgctgagagcactctggttgcttacaagtcagctcaggatattgcacttgctgatttagctcctactcatccgattagactgggacttgctcttaacttctctgtcttctactacgagattctcaactcacctgatcgtgcctgcagtctcgcaaaacaggcttttgatgaggccatttctgagctggatacattaggagaagaatcatacaaagacagtacgttgataatgcaacttctccgtgacaatctgaccctttggaactctgacatcaatgatgaggcgggcggtgatgagatcaaggaggcgtcaaaacatgagccggaagaggggaaaccagctgagacagggcagtgaccagagagagagggagagacatttctaagtatgtatggtatggattttccaaaaacatatgatatgattaggggatttgtagaagcagagagaaagatctttatttgattttctccaaaaatctctgttcccttttttttttattgggttattaaagctgtttgagtctttggttcctgcttcgttgcttgttagtatttaggaagtgaagaaacaaaactttgaattattgctttccattcaactcgtcataaattatcataatcagtgtattattt

SEQ ID NO: 104118 - protein, 265 aa, Arabidopsis thaliana; identical to SEQ ID NO: 24254
  peptide (1)..(265): Ceres Seq. ID no. 13614337
  misc_feature (5)..(242): Pfam Name: 14-3-3 protein Pfam Description: 14-3-3 protein
  misc_feature (1)..(265): Homolog of NCBI NO: 18396217 NR Description: 14-3-3 protein GF14 nu (grf7) [Arabidopsis
  misc_feature (3)..(262): Homolog of NCBI NO: 18417863 NR Description: 14-3-3 protein GF14 upsilon (grf5) [Arabidopsis
  misc_feature (3)..(262): Homolog of NCBI NO: 2129595 NR Description: 14-3-3 protein homolog GF14 upsilon chain -
  misc_feature (3)..(262): Homolog of NCBI NO: 3023187 NR Description: 14-3-3-LIKE PROTEIN (G-BOX BINDING FACTOR)
  misc_feature (4)..(252): Homolog of NCBI NO: 2921512 NR Description: GF14 protein [Fritillaria agrestis]
  misc_feature (3)..(258): Homolog of NCBI NO: 8515888 NR Description: 14-3-3 protein [Populus x canescens]
  misc_feature (4)..(252): Homolog of NCBI NO: 12229593 NR Description: 14-3-3-like protein

SEQ ID NO: 104119 - protein, 242 aa, Arabidopsis thaliana; identical to SEQ ID NO: 24255
  peptide (1)..(242): Ceres Seq. ID no. 13614338
  misc_feature (1)..(219): Pfam Name: 14-3-3 protein Pfam Description: 14-3-3 protein
  misc_feature (1)..(242): Homolog of NCBI NO: 18396217 NR Description: 14-3-3 protein GF14 nu (grf7) [Arabidopsis
  misc_feature (1)..(239): Homolog of NCBI NO: 18417863 NR Description: 14-3-3 protein GF14 upsilon (grf5) [Arabidopsis
  misc_feature (1)..(239): Homolog of NCBI NO: 2129595 NR Description: 14-3-3 protein homolog GF14 upsilon chain -
  misc_feature (1)..(239): Homolog of NCBI NO: 3023187 NR Description: 14-3-3-LIKE PROTEIN (G-BOX BINDING FACTOR)
  misc_feature (1)..(229): Homolog of NCBI NO: 2921512 NR Description: GF14 protein [Fritillaria agrestis]
  misc_feature (1)..(235): Homolog of NCBI NO: 8515888 NR Description: 14-3-3 protein [Populus x canescens]
  misc_feature (1)..(229): Homolog of NCBI NO: 12229593 NR Description: 14-3-3-like protein

SEQ ID NO: 104120 - protein, 238 aa, Arabidopsis thaliana; identical to SEQ ID NO: 24256
  peptide (1)..(238): Ceres Seq. ID no. 13614339
  misc_feature (1)..(215): Pfam Name: 14-3-3 protein Pfam Description: 14-3-3 protein
  misc_feature (1)..(238): Homolog of NCBI NO: 18396217 NR Description: 14-3-3 protein GF14 nu (grf7) [Arabidopsis
  misc_feature (1)..(235): Homolog of NCBI NO: 18417863 NR Description: 14-3-3 protein GF14 upsilon (grf5) [Arabidopsis
  misc_feature (1)..(235): Homolog of NCBI NO: 2129595 NR Description: 14-3-3 protein homolog GF14 upsilon chain -
  misc_feature (1)..(235): Homolog of NCBI NO: 3023187 NR Description: 14-3-3-LIKE PROTEIN (G-BOX BINDING FACTOR)
  misc_feature (1)..(225): Homolog of NCBI NO: 2921512 NR Description: GF14 protein [Fritillaria agrestis]
  misc_feature (1)..(231): Homolog of NCBI NO: 8515888 NR Description: 14-3-3 protein [Populus x canescens]
  misc_feature (1)..(225): Homolog of NCBI NO: 12229593 NR Description: 14-3-3-like protein

SEQ ID NO: 104121 - DNA, 843 bp, Arabidopsis thaliana
  misc_feature (1)..(843): Ceres Seq. ID no. 13614340
  misc_feature: MA Experiment ID: 108434 Result: Up-regulated in Transcription
  misc_feature: MA Experiment 108434 PARAMETER Experiment Name: At_Root_Tips_cDNA_P Parameter: Tissue Value: Root Tips
  misc_feature: MA Experiment ID: 108462 Result: Down-regulated in Transcription
  misc_feature: MA Experiment 108462 PARAMETER Experiment Name: At_Germinating_Seeds_cDNA_P Parameter: Age (day) Value: 2 vs. 0
  misc_feature: MA Experiment 108462 PARAMETER Experiment Name: At_Germinating_Seeds_cDNA_P Parameter: Tissue Value: Germinating Seeds
  misc_feature: MA Experiment ID: 108463 Result: Down-regulated in Transcription
  misc_feature: MA Experiment 108463 PARAMETER Experiment Name: At_Germinating_Seeds_cDNA_P Parameter: Age (day) Value: 3 vs. 0
  misc_feature: MA Experiment 108463 PARAMETER Experiment Name: At_Germinating_Seeds_cDNA_P Parameter: Tissue Value: Germinating Seeds
  misc_feature: MA Experiment ID: 108464 Result: Down-regulated in Transcription
  misc_feature: MA Experiment 108464 PARAMETER Experiment Name: At_Germinating_Seeds_cDNA_P Parameter: Age (day) Value: 4 vs. 0
  misc_feature: MA Experiment 108464 PARAMETER Experiment Name: At_Germinating_Seeds_cDNA_P Parameter: Tissue Value: Germinating Seeds
  misc_feature: MA Experiment ID: 108488 Result: Up-regulated in Transcription
  misc_feature: MA Experiment ID: 108573 Result: Down-regulated in Transcription
  misc_feature: MA Experiment 108573 PARAMETER Experiment Name: At_Drought_cDNA_P Parameter: Timepoint (hr) Value: 6
  misc_feature: MA Experiment 108573 PARAMETER Experiment Name: At_Drought_cDNA_P Parameter: Tissue Value: Aerial
  misc_feature: MA Experiment 108573 PARAMETER Experiment Name: At_Drought_cDNA_P Parameter: Treatment Value: Drought vs. No Drought
  misc_feature: MA Experiment ID: 20000112 Result: Down-regulated in Transcription
  misc_feature: MA Experiment 20000112 PARAMETER Experiment Name: At_42deg_Heat_cDNA_P Parameter: Temperature (deg C) Value: 42 vs. 22
  misc_feature: MA Experiment 20000112 PARAMETER Experiment Name: At_42deg_Heat_cDNA_P Parameter: Timepoint (hr) Value: 2
  misc_feature: MA Experiment 20000112 PARAMETER Experiment Name: At_42deg_Heat_cDNA_P Parameter: Tissue Value: Aerial
  misc_feature: MA Experiment ID: 20000113 Result: Down-regulated in Transcription
  misc_feature: MA Experiment 20000113 PARAMETER Experiment Name: At_42deg_Heat_cDNA_P Parameter: Temperature (deg C) Value: 42 vs. 22
  misc_feature: MA Experiment 20000113 PARAMETER Experiment Name: At_42deg_Heat_cDNA_P Parameter: Timepoint (hr) Value: 8
  misc_feature: MA Experiment 20000113 PARAMETER Experiment Name: At_42deg_Heat_cDNA_P Parameter: Tissue Value: Aerial
  misc_feature: MA Experiment ID: 20000495 Result: Up-regulated in Transcription
  misc_feature: MA Experiment 20000495 PARAMETER Experiment Name: At_Guard_Cells_P Parameter: Harvest Date Value: 8/2/2002
  misc_feature: MA Experiment 20000495 PARAMETER Experiment Name: At_Guard_Cells_P Parameter: Organism Value: A. thaliana
  misc_feature: MA Experiment 20000495 PARAMETER Experiment Name: At_Guard_Cells_P Parameter: Tissue Value: Guard Cells vs. Leaves
  misc_feature: MA Experiment ID: 20000794 Result: Down-regulated in Transcription
  misc_feature: MA Experiment 20000794 PARAMETER Experiment Name: At_Petals_P Parameter: Age (day) Value: 23-25 days
  misc_feature: MA Experiment 20000794 PARAMETER Experiment Name: At_Petals_P Parameter: Plant Line Value: WS
  misc_feature: MA Experiment 20000794 PARAMETER Experiment Name: At_Petals_P Parameter: Tissue Value: Petals vs. Whole plant
  misc_feature: MA Experiment ID: 20001451 Result: Up-regulated in Transcription
  misc_feature: MA Experiment 20001451 PARAMETER Experiment Name: At_Far-red-induction_P Parameter: Age (day) Value: 7
  misc_feature: MA Experiment 20001451 PARAMETER Experiment Name: At_Far-red-induction_P Parameter: Light Value: Far-red vs. White
  misc_feature: MA Experiment 20001451 PARAMETER Experiment Name: At_Far-red-induction_P Parameter: Organism Value: A. thaliana
  misc_feature: MA Experiment 20001451 PARAMETER Experiment Name: At_Far-red-induction_P Parameter: Plant Line Value: Columbia
  misc_feature: MA Experiment 20001451 PARAMETER Experiment Name: At_Far-red-induction_P Parameter: Timepoint (hr) Value: 24
  misc_feature: MA Experiment 20001451 PARAMETER Experiment Name: At_Far-red-induction_P Parameter: Tissue Value: Whole Plant
  misc_feature: MA Experiment ID: 20001557 Result: Up-regulated in Transcription
  misc_feature: MA Experiment 20001557 PARAMETER Experiment Name: At_Drought_Soil_Dry_P Parameter: Age (day) Value: 27
  misc_feature: MA Experiment 20001557 PARAMETER Experiment Name: At_Drought_Soil_Dry_P Parameter: Organism Value: A. thaliana
  misc_feature: MA Experiment 20001557 PARAMETER Experiment Name: At_Drought_Soil_Dry_P Parameter: Plant Line Value: WS
  misc_feature: MA Experiment 20001557 PARAMETER Experiment Name: At_Drought_Soil_Dry_P Parameter: Post Timepoint (hr) Value: 3
  misc_feature: MA Experiment 20001557 PARAMETER Experiment Name: At_Drought_Soil_Dry_P Parameter: Post-Treatment Value: Re-Water vs. No Drought
  misc_feature: MA Experiment 20001557 PARAMETER Experiment Name: At_Drought_Soil_Dry_P Parameter: Timepoint (day) Value: 13
  misc_feature: MA Experiment 20001557 PARAMETER Experiment Name: At_Drought_Soil_Dry_P Parameter: Treatment Value: Drought vs. No Drought
  misc_feature: MA Experiment ID: 20001558 Result: Up-regulated in Transcription
  misc_feature: MA Experiment 20001558 PARAMETER Experiment Name: At_Drought_Soil_Dry_P Parameter: Age (day) Value: 27
  misc_feature: MA Experiment 20001558 PARAMETER Experiment Name: At_Drought_Soil_Dry_P Parameter: Organism Value: A. thaliana
  misc_feature: MA Experiment 20001558 PARAMETER Experiment Name: At_Drought_Soil_Dry_P Parameter: Plant Line Value: WS
  misc_feature: MA Experiment 20001558 PARAMETER Experiment Name: At_Drought_Soil_Dry_P Parameter: Post Timepoint (hr) Value: 6
  misc_feature: MA Experiment 20001558 PARAMETER Experiment Name: At_Drought_Soil_Dry_P Parameter: Post-Treatment Value: Re-Water vs. No Drought
  misc_feature: MA Experiment 20001558 PARAMETER Experiment Name: At_Drought_Soil_Dry_P Parameter: Timepoint (day) Value: 13
  misc_feature: MA Experiment 20001558 PARAMETER Experiment Name: At_Drought_Soil_Dry_P Parameter: Treatment Value: Drought vs. No Drought
  misc_feature: MA Experiment ID: 20001560 Result: Up-regulated in Transcription
  misc_feature: MA Experiment 20001560 PARAMETER Experiment Name: At_Drought_Soil_Dry_P Parameter: Age (day) Value: 28
  misc_feature: MA Experiment 20001560 PARAMETER Experiment Name: At_Drought_Soil_Dry_P Parameter: Organism Value: A. thaliana
  misc_feature: MA Experiment 20001560 PARAMETER Experiment Name: At_Drought_Soil_Dry_P Parameter: Plant Line Value: WS
  misc_feature: MA Experiment 20001560 PARAMETER Experiment Name: At_Drought_Soil_Dry_P Parameter: Post Timepoint (hr) Value: None
  misc_feature: MA Experiment 20001560 PARAMETER Experiment Name: At_Drought_Soil_Dry_P Parameter: Post-Treatment Value: None
  misc_feature: MA Experiment 20001560 PARAMETER Experiment Name: At_Drought_Soil_Dry_P Parameter: Timepoint (day) Value: 14
  misc_feature: MA Experiment 20001560 PARAMETER Experiment Name: At_Drought_Soil_Dry_P Parameter: Treatment Value: Drought vs. No Drought
  misc_feature: MA Experiment ID: 20001757 Result: Up-regulated in Transcription
  misc_feature: MA Experiment 20001757 PARAMETER Experiment Name: At_50mM_NH4NO3_L-to-H_P Parameter: Timepoint (hr) Value: 6
  misc_feature: MA Experiment 20001757 PARAMETER Experiment Name: At_50mM_NH4NO3_L-to-H_P Parameter: Tissue Value: Leaf
  misc_feature: MA Experiment 20001757 PARAMETER Experiment Name: At_50mM_NH4NO3_L-to-H_P Parameter: Treatment Value: 50mM NH4NO3 vs 100mM Mannitol
ctaaatatttaaagctttccttcaccagcattgtattgcctccctggaacaccgaagctctggattaacctattttcaccttctaaggttcttcgtcgttcttattgatctgtgaagatgtattcgggtcagaacaagatccacaaggataagggtgttgcaccaacagagtttgaagagcaagttactcaggctttgtttgacttggagaacaccaaccaggagttgaaaagcgagttgaaagatctctacattaaccaagctgttcagatggatatttctggcaaccgcaaagctgttgtgatctacgttccattcaggctgaggaaagctttccgcaagattcatcttcgtctggtcagagagcttgagaagaagttcagtggaaaagatgtgatctttgttgctaccagaagaatcatgcgcccaccaaagaaaggctcagctgttcagagaccacgcaacagaactcttacttctgtccatgaagccatgctcgaggatgtcgcttaccctgctgagattgtaggaaagagaaccagataccgtcttgatggcaccaagatcatgaaggtatttttggatagtaagctaaagaacgacactgagtacaagctggagacaatggtgggtgtgtacaggaaacttacagggaaagatgtagttttcgagtacccagtcatagaagcttgaagagatgaatgtttgtttcattcttttttgtcggatagagagcttttgattctgtttgggagtaaaactctttgcaaagattttgttatttcagcatttcgcaatctcttcttcaaagttcgatttatcgatacaattcttttttcctac

SEQ ID NO: 104122 - protein, 191 aa, Arabidopsis thaliana; identical to SEQ ID NO: 21551
  peptide (1)..(191): Ceres Seq. ID no. 13614341
  misc_feature (4)..(191): Pfam Name: Ribosomal protein S7e Pfam Description: Ribosomal protein S7e
  misc_feature (1)..(191): Homolog of NCBI NO: 15232926 NR Description: 40S ribosomal protein S7 (RPS7B) [Arabidopsis >gi|30678607|ref|NP_850504.1| 40S ribosomal protein S7 (RPS7B) thaliana] >gi|6957719|gb|AAF32463.1| putative 40S ribosomal
  misc_feature (1)..(190): Homolog of NCBI NO: 20139962 NR Description: 40S ribosomal protein S7
  misc_feature (1)..(188): Homolog of NCBI NO: 21592413 NR Description: 40S ribosomal protein S7-like [Arabidopsis
  misc_feature (1)..(188): Homolog of NCBI NO: 15237278 NR Description: 40S ribosomal protein S7 (RPS7C) [Arabidopsis
  misc_feature (1)..(190): Homolog of NCBI NO: 20139964 NR Description: 40S ribosomal protein S7 unknown [Avicennia marina] >gi|4128206|gb|AAD03501.1| 40S
  misc_feature (1)..(191): Homolog of NCBI NO: 15221972 NR Description: 40S ribosomal protein S7 (RPS7A) [Arabidopsis >gi|30694420|ref|NP_849786.1| 40S ribosomal protein S7 (RPS7A) thaliana] >gi|25294579|pir||A96526 probable 40S ribosomal protein
  misc_feature (1)..(190): Homolog of NCBI NO: 22671664 NR Description: ribosomal protein S7 [Oryza sativa (japonica
  misc_feature (1)..(190): Homolog of NCBI NO: 14787424 NR Description: Ribosomal protein S7 [Hordeum vulgare subsp.
  misc_feature (1)..(190): Homolog of NCBI NO: 4588906 NR Description: ribosomal protein S7 [Secale cereale]
  misc_feature (1)..(187): Homolog of NCBI NO: 15294025 NR Description: 40S ribosomal protein S7 [Ictalurus punctatus]

SEQ ID NO: 104123 - protein, 140 aa, Arabidopsis thaliana; identical to SEQ ID NO: 21552
  peptide (1)..(140): Ceres Seq. ID no. 13614342
  misc_feature (1)..(140): Pfam Name: Ribosomal protein S7e Pfam Description: Ribosomal protein S7e
  misc_feature (1)..(140): Homolog of NCBI NO: 15232926 NR Description: 40S ribosomal protein S7 (RPS7B) [Arabidopsis >gi|30678607|ref|NP_850504.1| 40S ribosomal protein S7 (RPS7B) thaliana] >gi|6957719|gb|AAF32463.1| putative 40S ribosomal
  misc_feature (1)..(139): Homolog of NCBI NO: 20139962 NR Description: 40S ribosomal protein S7
  misc_feature (1)..(137): Homolog of NCBI NO: 21592413 NR Description: 40S ribosomal protein S7-like [Arabidopsis
  misc_feature (1)..(137): Homolog of NCBI NO: 15237278 NR Description: 40S ribosomal protein S7 (RPS7C) [Arabidopsis
  misc_feature (1)..(139): Homolog of NCBI NO: 20139964 NR Description: 40S ribosomal protein S7 unknown [Avicennia marina] >gi|4128206|gb|AAD03501.1| 40S
  misc_feature (1)..(140): Homolog of NCBI NO: 15221972 NR Description: 40S ribosomal protein S7 (RPS7A) [Arabidopsis >gi|30694420|ref|NP_849786.1| 40S ribosomal protein S7 (RPS7A) thaliana] >gi|25294579|pir||A96526 probable 40S ribosomal protein
  misc_feature (1)..(139): Homolog of NCBI NO: 22671664 NR Description: ribosomal protein S7 [Oryza sativa (japonica
  misc_feature (1)..(139): Homolog of NCBI NO: 14787424 NR Description: Ribosomal protein S7 [Hordeum vulgare subsp.
  misc_feature (1)..(139): Homolog of NCBI NO: 4588906 NR Description: ribosomal protein S7 [Secale cereale]
  misc_feature (1)..(136): Homolog of NCBI NO: 15294025 NR Description: 40S ribosomal protein S7 [Ictalurus punctatus]

SEQ ID NO: 104124 - DNA, 1169 bp, Arabidopsis thaliana
  misc_feature (1)..(1169): Ceres Seq. ID no. 13614343
  misc_feature: MA Experiment ID: 108595 Result: Down-regulated in Transcription
  misc_feature: MA Experiment 108595 PARAMETER Experiment Name: At_Ler-pi_Ovule_cDNA_P Parameter: Plant Line Value: null
  misc_feature: MA Experiment ID: 20000224 Result: Down-regulated in Transcription
gaagaagatcgatcaatcaatcatcaaactctctgtgtgccacatgcattactactgttgacttgttcaataaaggtaaagtaagatcaatccggcgaatcttctttcgttttccggcaccgatctcggtggatctccgattcacatggcggcggataatgcttatctgatgcagtttgttgacgaaacctctttttacaaccgaatcgttctgagtcatcttttgccggcgaatctatgggaacccttacctcattttctccagacatggctccgaaattacctcgccggaaccctactatacttcatctccggtttcctctggtgcttctacatctattaccttaaaatcaacgtttaccttcccaaagatgcaattcctacaataaaggctatgcgtttgcaaatgtttgtggcaatgaaggctatgccatggtacactcttcttccaactgtctccgagagtatgattgaacgtggttggaccaaatgttttgctagcataggcgaattcggctggattctgtattttgtttacatcgccatctatcttgttttcgttgagtttggtatttattggatgcacagagagcttcatgacattaagcctctctataagtatctccatgccacccatcatatctacaacaagcagaatacactctctccatttgccgggcttgcatttcacccagtagacgggatacttcaggctgtaccgcatgtgatagcgctgtttatagtgccaattcatttcacaactcatataggtcttttgttcatggaagcgatatggacggcgaacatccatgactgcatccatggcaacatctggccagtaatgggtgcaggataccatacgatacaccacacgacatacaagcataactatggtcattataccatatggatggattggatgtttggctctcttagggatcctctcttagaagaagatgacaacaaagacagcttcaagaaagcagagtgagaatgcccacttgggttttgttcttctgttttgtcttgtgttgttgttgttcaaagtttcagcctttcttgttctttttcttcttcttcttattcatgtgtctctctcaacctttccaattatattgttacaaacatttgctgtctagtttaaaacatgtaaatgtttgatgatcttt

SEQ ID NO: 104125 - protein, 281 aa, Arabidopsis thaliana
  peptide (1)..(281): Ceres Seq. ID no. 13614344
  misc_feature (1)..(281): Homolog of NCBI NO: 15232935 NR Description: delta 7-sterol-C5-desaturase (STE1) [Arabidopsis
  misc_feature (1)..(281): Homolog of NCBI NO: 21594971 NR Description: sterol-C5-desaturase [Arabidopsis thaliana]
  misc_feature (1)..(281): Homolog of NCBI NO: 5031219 NR Description: delta7 sterol C-5 desaturase [Arabidopsis
  misc_feature (1)..(281): Homolog of NCBI NO: 2129741 NR Description: C-5 sterol desaturase (EC 1.-.-.-) - Arabidopsis
  misc_feature (1)..(281): Homolog of NCBI NO: 15232937 NR Description: delta 7-sterol-C5-desaturase, putative
  misc_feature (7)..(274): Homolog of NCBI NO: 33301670 NR Description: Delta-7-sterol-C5(6)-desaturase (Delta-7-C-5
  misc_feature (7)..(270): Homolog of NCBI NO: 4426627 NR Description: sterol-C5(6)-desaturase homolog [Nicotiana
  misc_feature (7)..(177): Homolog of NCBI NO: 34895618 NR Description: putative sterol-C5(6)-desaturase [Oryza sativa
  misc_feature (212)..(271): Homolog of NCBI NO: 34895618 NR Description: putative sterol-C5(6)-desaturase [Oryza sativa
  misc_feature (47)..(279): Homolog of NCBI NO: 25742651 NR Description: sterol-C5-desaturase (fungal ERG3,
MAADNAYLMQFVDETSFYNRIVLSHLLPANLWEPLPHFLQTWLRNYLAGTLLYFISGFLWCFYIYYLKINVYLPKDAIPTIKAMRLQMFVAMKAMPWYTLLPTVSESMIERGWTKCFASIGEFGWILYFVYIAIYLVFVEFGIYWMHRELHDIKPLYKYLHATHHIYNKQNTLSPFAGLAFHPVDGILQAVPHVIALFIVPIHFTTHIGLLFMEAIWTANIHDCIHGNIWPVMGAGYHTIHHTTYKHNYGHYTIWMDWMFGSLRDPLLEEDDNKDSFKKAE

SEQ ID NO: 104126 - protein, 273 aa, Arabidopsis thaliana
  peptide (1)..(273): Ceres Seq. ID no. 13614345
  misc_feature (1)..(273): Homolog of NCBI NO: 15232935 NR Description: delta 7-sterol-C5-desaturase (STE1) [Arabidopsis
  misc_feature (1)..(273): Homolog of NCBI NO: 21594971 NR Description: sterol-C5-desaturase [Arabidopsis thaliana]
  misc_feature (1)..(273): Homolog of NCBI NO: 5031219 NR Description: delta7 sterol C-5 desaturase [Arabidopsis
  misc_feature (1)..(273): Homolog of NCBI NO: 2129741 NR Description: C-5 sterol desaturase (EC 1.-.-.-) - Arabidopsis
  misc_feature (1)..(273): Homolog of NCBI NO: 15232937 NR Description: delta 7-sterol-C5-desaturase, putative
  misc_feature (1)..(266): Homolog of NCBI NO: 33301670 NR Description: Delta-7-sterol-C5(6)-desaturase (Delta-7-C-5
  misc_feature (1)..(262): Homolog of NCBI NO: 4426627 NR Description: sterol-C5(6)-desaturase homolog [Nicotiana
  misc_feature (1)..(169): Homolog of NCBI NO: 34895618 NR Description: putative sterol-C5(6)-desaturase [Oryza sativa
  misc_feature (204)..(263): Homolog of NCBI NO: 34895618 NR Description: putative sterol-C5(6)-desaturase [Oryza sativa
  misc_feature (39)..(271): Homolog of NCBI NO: 25742651 NR Description: sterol-C5-desaturase (fungal ERG3,
MQFVDETSFYNRIVLSHLLPANLWEPLPHFLQTWLRNYLAGTLLYFISGFLWCFYIYYLKINVYLPKDAIPTIKAMRLQMFVAMKAMPWYTLLPTVSESMIERGWTKCFASIGEFGWILYFVYIAIYLVFVEFGIYWMHRELHDIKPLYKYLHATHHIYNKQNTLSPFAGLAFHPVDGILQAVPHVIALFIVPIHFTTHIGLLFMEAIWTANIHDCIHGNIWPVMGAGYHTIHHTTYKHNYGHYTIWMDWMFGSLRDPLLEEDDNKDSFKKAE

SEQ ID NO: 104127 - protein, 198 aa, Arabidopsis thaliana
  peptide (1)..(198): Ceres Seq. ID no. 13614346
  misc_feature (1)..(198): Homolog of NCBI NO: 15232935 NR Description: delta 7-sterol-C5-desaturase (STE1) [Arabidopsis
  misc_feature (1)..(198): Homolog of NCBI NO: 21594971 NR Description: sterol-C5-desaturase [Arabidopsis thaliana]
  misc_feature (1)..(198): Homolog of NCBI NO: 5031219 NR Description: delta7 sterol C-5 desaturase [Arabidopsis
  misc_feature (1)..(198): Homolog of NCBI NO: 2129741 NR Description: C-5 sterol desaturase (EC 1.-.-.-) - Arabidopsis
  misc_feature (1)..(198): Homolog of NCBI NO: 15232937 NR Description: delta 7-sterol-C5-desaturase, putative
  misc_feature (1)..(191): Homolog of NCBI NO: 33301670 NR Description: Delta-7-sterol-C5(6)-desaturase (Delta-7-C-5
  misc_feature (1)..(187): Homolog of NCBI NO: 4426627 NR Description: sterol-C5(6)-desaturase homolog [Nicotiana
  misc_feature (1)..(94): Homolog of NCBI NO: 34895618 NR Description: putative sterol-C5(6)-desaturase [Oryza sativa
  misc_feature (129)..(188): Homolog of NCBI NO: 34895618 NR Description: putative sterol-C5(6)-desaturase [Oryza sativa
  misc_feature (1)..(196): Homolog of NCBI NO: 25742651 NR Description: sterol-C5-desaturase (fungal ERG3,
MRLQMFVAMKAMPWYTLLPTVSESMIERGWTKCFASIGEFGWILYFVYIAIYLVFVEFGIYWMHRELHDIKPLYKYLHATHHIYNKQNTLSPFAGLAFHPVDGILQAVPHVIALFIVPIHFTTHIGLLFMEAIWTANIHDCIHGNIWPVMGAGYHTIHHTTYKHNYGHYTIWMDWMFGSLRDPLLEEDDNKDSFKKAE

SEQ ID NO: 104128 - DNA, 1027 bp, Arabidopsis thaliana
  misc_feature (1)..(1027): Ceres Seq. ID no. 13614351
  misc_feature: MA Experiment ID: 108461 Result: Up-regulated in Transcription
  misc_feature: MA Experiment 108461 PARAMETER Experiment Name: At_Germinating_Seeds_cDNA_P Parameter: Age (day) Value: 1 vs. 0
  misc_feature: MA Experiment 108461 PARAMETER Experiment Name: At_Germinating_Seeds_cDNA_P Parameter: Tissue Value: Germinating Seeds
  misc_feature: MA Experiment ID: 108462 Result: Up-regulated in Transcription
  misc_feature: MA Experiment 108462 PARAMETER Experiment Name: At_Germinating_Seeds_cDNA_P Parameter: Age (day) Value: 2 vs. 0
  misc_feature: MA Experiment 108462 PARAMETER Experiment Name: At_Germinating_Seeds_cDNA_P Parameter: Tissue Value: Germinating Seeds
  misc_feature: MA Experiment ID: 108464 Result: Up-regulated in Transcription
  misc_feature: MA Experiment 108464 PARAMETER Experiment Name: At_Germinating_Seeds_cDNA_P Parameter: Age (day) Value: 4 vs. 0
  misc_feature: MA Experiment 108464 PARAMETER Experiment Name: At_Germinating_Seeds_cDNA_P Parameter: Tissue Value: Germinating Seeds
  misc_feature: MA Experiment ID: 108573 Result: Up-regulated in Transcription
  misc_feature: MA Experiment 108573 PARAMETER Experiment Name: At_Drought_cDNA_P Parameter: Timepoint (hr) Value: 6
  misc_feature: MA Experiment 108573 PARAMETER Experiment Name: At_Drought_cDNA_P Parameter: Tissue Value: Aerial
  misc_feature: MA Experiment 108573 PARAMETER Experiment Name: At_Drought_cDNA_P Parameter: Treatment Value: Drought vs. No Drought
  misc_feature: MA Experiment ID: 108579 Result: Down-regulated in Transcription
  misc_feature: MA Experiment 108579 PARAMETER Experiment Name: At_4deg_Cold_cDNA_P Parameter: Temperature (deg C) Value: 4 vs. 22
  misc_feature: MA Experiment 108579 PARAMETER Experiment Name: At_4deg_Cold_cDNA_P Parameter: Timepoint (hr) Value: 6
  misc_feature: MA Experiment 108579 PARAMETER Experiment Name: At_4deg_Cold_cDNA_P Parameter: Tissue Value: Aerial
  misc_feature: MA Experiment ID: 20000180 Result: Up-regulated in Transcription
  misc_feature: MA Experiment 20000180 PARAMETER Experiment Name: At_Germinating_Seeds_P Parameter: Age (hr) Value: 24 vs. 0
  misc_feature: MA Experiment 20000180 PARAMETER Experiment Name: At_Germinating_Seeds_P Parameter: Tissue Value: Germinating Seeds
  misc_feature: MA Experiment ID: 20000214 Result: Down-regulated in Transcription
  misc_feature: MA Experiment 20000214 PARAMETER Experiment Name: At_4deg_Cold_P Parameter: Timepoint (hr) Value: 6
  misc_feature: MA Experiment ID: 20000224 Result: Down-regulated in Transcription
  misc_feature: MA Experiment ID: 20000495 Result: Up-regulated in Transcription
  misc_feature: MA Experiment 20000495 PARAMETER Experiment Name: At_Guard_Cells_P Parameter: Harvest Date Value: 8/2/2002
  misc_feature: MA Experiment 20000495 PARAMETER Experiment Name: At_Guard_Cells_P Parameter: Organism Value: A. thaliana
  misc_feature: MA Experiment 20000495 PARAMETER Experiment Name: At_Guard_Cells_P Parameter: Tissue Value: Guard Cells vs. Leaves
  misc_feature: MA Experiment ID: 20001451 Result: Up-regulated in Transcription
  misc_feature: MA Experiment 20001451 PARAMETER Experiment Name: At_Far-red-induction_P Parameter: Age (day) Value: 7
  misc_feature: MA Experiment 20001451 PARAMETER Experiment Name: At_Far-red-induction_P Parameter: Light Value: Far-red vs. White
  misc_feature: MA Experiment 20001451 PARAMETER Experiment Name: At_Far-red-induction_P Parameter: Organism Value: A. thaliana
  misc_feature: MA Experiment 20001451 PARAMETER Experiment Name: At_Far-red-induction_P Parameter: Plant Line Value: Columbia
  misc_feature: MA Experiment 20001451 PARAMETER Experiment Name: At_Far-red-induction_P Parameter: Timepoint (hr) Value: 24
  misc_feature: MA Experiment 20001451 PARAMETER Experiment Name: At_Far-red-induction_P Parameter: Tissue Value: Whole Plant
  misc_feature: MA Experiment ID: 20001911 Result: Down-regulated in Transcription
  misc_feature: MA Experiment 20001911 PARAMETER Experiment Name: At_Drought_Reproduction_P Parameter: Age (day) Value: 40
  misc_feature: MA Experiment 20001911 PARAMETER Experiment Name: At_Drought_Reproduction_P Parameter: Organism Value: A. thaliana
  misc_feature: MA Experiment 20001911 PARAMETER Experiment Name: At_Drought_Reproduction_P Parameter: Plant Line Value: WS
  misc_feature: MA Experiment 20001911 PARAMETER Experiment Name: At_Drought_Reproduction_P Parameter: Timepoint (day) Value: 10
  misc_feature: MA Experiment 20001911 PARAMETER Experiment Name: At_Drought_Reproduction_P Parameter: Tissue Value: Flowers
  misc_feature: MA Experiment 20001911 PARAMETER Experiment Name: At_Drought_Reproduction_P Parameter: Treatment Value: Drought vs. No Drought
atggaactttaaaaaagttatgatgttatccaaggaagatggaaaaccctacacactaagcaaaaaataagatctttctctctctgacgacgcaatccctaatttctggttctccgttcgtcggcggagaagatgggattcctttccaataaaatctccagagacgatgtgaaaccaggcgatcacatctattcatggcgtcaagcctacatttacgctcatcacggaatctatgtaggtaatggacaagtcaaccattttactcgtggtgatggtcaagagactggaactgggactttcttggacaacatcattgttagttcatctcataatcatggagacaacccatgtcctgattgtggagatcgatccaatcttggcggtgttatatcttcctgccttgaatgtttccttgccggaggtgatctctatgtctttgagtacagtgtttcccctgctatctttcttgccaaacctcgaggcggcgtatgcactatagcatcttcagatcctccagaagaagtcatctatcgagcaaattttctcttgcaaaatggttttggtgtgtacaatgtcttcaagaacaactgtgaagattttgccatctattgcaaaacgggtttgctagtggcaaacaccgacgtgggaaggagtggtcaagctgcttcaattgttgcagctgccagtgttcttctttcttcaccactcaggtttgtagcaggttttggtggtttggctgtggctggctatggcatgtactgcaccagtcgcttagtttcagatataggcatgcgatgggatgtgagcaaggtgcctgttgagagactagttgctgatgtggcttgtatgtcggacatggaagctaaaccagaagatgagaagactacttaatccaaaactgctcacacctgtattaccatactggttgatctctgattgtaaatgttgtggcggaagtaagagaatctgcttctgctgtatcgtgttgtgcaacatttgtttatgtaattacgaaacttggcttttg

SEQ ID NO: 104129 - protein, 252 aa, Arabidopsis thaliana; identical to SEQ ID NO: 27570
  peptide (1)..(252): Ceres Seq. ID no. 13614352
  misc_feature (100)..(180): Pfam Name: NC domain Pfam Description: NC domain
  misc_feature (1)..(252): Homolog of NCBI NO: 18396282 NR Description: expressed protein [Arabidopsis thaliana] unknown protein [Arabidopsis thaliana] unknown protein [Arabidopsis thaliana]
  misc_feature (1)..(252): Homolog of NCBI NO: 21594170 NR Description: unknown [Arabidopsis thaliana]
  misc_feature (1)..(187): Homolog of NCBI NO: 15237330 NR Description: expressed protein [Arabidopsis thaliana] gb|AAF32477.1~gene_id:MQK4.8~similar to unknown protein thaliana] >gi|27754415|gb|AAO22656.1| unknown protein
  misc_feature (179)..(245): Homolog of NCBI NO: 15237330 NR Description: expressed protein [Arabidopsis thaliana] gb|AAF32477.1~gene_id:MQK4.8~similar to unknown protein thaliana] >gi|27754415|gb|AAO22656.1| unknown protein
  misc_feature (1)..(233): Homolog of NCBI NO: 15237327 NR Description: hypothetical protein [Arabidopsis thaliana] gb|AAF32477.1~gene_id:MQK4.5~similar to unknown protein
  misc_feature (1)..(232): Homolog of NCBI NO: 18415178 NR Description: expressed protein [Arabidopsis thaliana] AT5g06370/MHF15_11 [Arabidopsis thaliana]
  misc_feature (1)..(250): Homolog of NCBI NO: 18378812 NR Description: expressed protein [Arabidopsis thaliana]
  misc_feature (1)..(250): Homolog of NCBI NO: 21592684 NR Description: unknown [Arabidopsis thaliana]
  misc_feature (1)..(236): Homolog of NCBI NO: 22328196 NR Description: expressed protein [Arabidopsis thaliana]
  misc_feature (32)..(232): Homolog of NCBI NO: 9758417 NR Description: gb|AAF32477.1~gene_id:MHF15.11~similar to unknown

SEQ ID NO: 104130 - DNA, 1117 bp, Arabidopsis thaliana
  misc_feature (1)..(1117): Ceres Seq. ID no. 13614366
  misc_feature: MA Experiment ID: 108434 Result: Up-regulated in Transcription
  misc_feature: MA Experiment 108434 PARAMETER Experiment Name: At_Root_Tips_cDNA_P Parameter: Tissue Value: Root Tips
  misc_feature: MA Experiment ID: 108461 Result: Up-regulated in Transcription
  misc_feature: MA Experiment 108461 PARAMETER Experiment Name: At_Germinating_Seeds_cDNA_P Parameter: Age (day) Value: 1 vs. 0
  misc_feature: MA Experiment 108461 PARAMETER Experiment Name: At_Germinating_Seeds_cDNA_P Parameter: Tissue Value: Germinating Seeds
  misc_feature: MA Experiment ID: 108462 Result: Up-regulated in Transcription
  misc_feature: MA Experiment 108462 PARAMETER Experiment Name: At_Germinating_Seeds_cDNA_P Parameter: Age (day) Value: 2 vs. 0
  misc_feature: MA Experiment 108462 PARAMETER Experiment Name: At_Germinating_Seeds_cDNA_P Parameter: Tissue Value: Germinating Seeds
  misc_feature: MA Experiment ID: 108488 Result: Down-regulated in Transcription
  misc_feature: MA Experiment ID: 108576 Result: Down-regulated in Transcription
  misc_feature: MA Experiment 108576 PARAMETER Experiment Name: At_42deg_Heat_cDNA_P Parameter: Temperature (deg C) Value: 42 vs. 22
  misc_feature: MA Experiment 108576 PARAMETER Experiment Name: At_42deg_Heat_cDNA_P Parameter: Timepoint (hr) Value: 1
  misc_feature: MA Experiment 108576 PARAMETER Experiment Name: At_42deg_Heat_cDNA_P Parameter: Tissue Value: Aerial
  misc_feature: MA Experiment ID: 108585 Result: Down-regulated in Transcription
  misc_feature: MA Experiment 108585 PARAMETER Experiment Name: At_5mM_NaNP_cDNA_P Parameter: Timepoint (hr) Value: 6
  misc_feature: MA Experiment 108585 PARAMETER Experiment Name: At_5mM_NaNP_cDNA_P Parameter: Tissue Value: Aerial
  misc_feature: MA Experiment 108585 PARAMETER Experiment Name: At_5mM_NaNP_cDNA_P Parameter: Treatment Value: null
  misc_feature: MA Experiment ID: 108595 Result: Down-regulated in Transcription
  misc_feature: MA Experiment 108595 PARAMETER Experiment Name: At_Ler-pi_Ovule_cDNA_P Parameter: Plant Line Value: null
  misc_feature: MA Experiment ID: 108607 Result: Down-regulated in Transcription
  misc_feature: MA Experiment 108607 PARAMETER Experiment Name: At_100uM_ABA_cDNA_P Parameter: Timepoint (hr) Value: 4
  misc_feature: MA Experiment 108607 PARAMETER Experiment Name: At_100uM_ABA_cDNA_P Parameter: Tissue Value: Aerial
  misc_feature: MA Experiment 108607 PARAMETER Experiment Name: At_100uM_ABA_cDNA_P Parameter: Treatment Value: 100uM ABA vs. No Treatment
  misc_feature: MA Experiment ID: 20000071 Result: Down-regulated in Transcription
  misc_feature: MA Experiment 20000071 PARAMETER Experiment Name: At_100uM_ABA_Mutants_cDNA_P Parameter: Plant Line Value: CS8104
  misc_feature: MA Experiment 20000071 PARAMETER Experiment Name: At_100uM_ABA_Mutants_cDNA_P Parameter: Timepoint (hr) Value: 6
  misc_feature: MA Experiment 20000071 PARAMETER Experiment Name: At_100uM_ABA_Mutants_cDNA_P Parameter: Tissue Value: Aerial
  misc_feature: MA Experiment 20000071 PARAMETER Experiment Name: At_100uM_ABA_Mutants_cDNA_P Parameter: Treatment Value: 100uM ABA vs. No Treatment
  misc_feature: MA Experiment ID: 20000086 Result: Down-regulated in Transcription
  misc_feature: MA Experiment 20000086 PARAMETER Experiment Name: At_100uM_ABA_Mutants_cDNA_P Parameter: Plant Line Value: CS22
  misc_feature: MA Experiment 20000086 PARAMETER Experiment Name: At_100uM_ABA_Mutants_cDNA_P Parameter: Timepoint (hr) Value: 6
  misc_feature: MA Experiment 20000086 PARAMETER Experiment Name: At_100uM_ABA_Mutants_cDNA_P Parameter: Tissue Value: Aerial
  misc_feature: MA Experiment 20000086 PARAMETER Experiment Name: At_100uM_ABA_Mutants_cDNA_P Parameter: Treatment Value: 100uM ABA vs. No Treatment
  misc_feature: MA Experiment ID: 20000087 Result: Down-regulated in Transcription
  misc_feature: MA Experiment 20000087 PARAMETER Experiment Name: At_100uM_ABA_Mutants_cDNA_P Parameter: Plant Line Value: WS
  misc_feature: MA Experiment 20000087 PARAMETER Experiment Name: At_100uM_ABA_Mutants_cDNA_P Parameter: Timepoint (hr) Value: 6
  misc_feature: MA Experiment 20000087 PARAMETER Experiment Name: At_100uM_ABA_Mutants_cDNA_P Parameter: Tissue Value: Aerial
  misc_feature: MA Experiment 20000087 PARAMETER Experiment Name: At_100uM_ABA_Mutants_cDNA_P Parameter: Treatment Value: 100uM ABA vs. No Treatment
  misc_feature: MA Experiment ID: 20000112 Result: Down-regulated in Transcription
  misc_feature: MA Experiment 20000112 PARAMETER Experiment Name: At_42deg_Heat_cDNA_P Parameter: Temperature (deg C) Value: 42 vs. 22
  misc_feature: MA Experiment 20000112 PARAMETER Experiment Name: At_42deg_Heat_cDNA_P Parameter: Timepoint (hr) Value: 2
  misc_feature: MA Experiment 20000112 PARAMETER Experiment Name: At_42deg_Heat_cDNA_P Parameter: Tissue Value: Aerial
  misc_feature: MA Experiment ID: 20000117 Result: Down-regulated in Transcription
  misc_feature: MA Experiment 20000117 PARAMETER Experiment Name: At_100uM_ABA_Mutants_cDNA_P Parameter: Plant Line Value: Columbia
  misc_feature: MA Experiment 20000117 PARAMETER Experiment Name: At_100uM_ABA_Mutants_cDNA_P Parameter: Timepoint (hr) Value: 6
  misc_feature: MA Experiment 20000117 PARAMETER Experiment Name: At_100uM_ABA_Mutants_cDNA_P Parameter: Tissue Value: Aerial
  misc_feature: MA Experiment 20000117 PARAMETER Experiment Name: At_100uM_ABA_Mutants_cDNA_P Parameter: Treatment Value: 100uM ABA vs. No Treatment
  misc_feature: MA Experiment ID: 20000214 Result: Up-regulated in Transcription
  misc_feature: MA Experiment 20000214 PARAMETER Experiment Name: At_4deg_Cold_P Parameter: Timepoint (hr) Value: 6
  misc_feature: MA Experiment ID: 20000224 Result: Up-regulated in Transcription
  misc_feature: MA Experiment ID: 20000234 Result: Up-regulated in Transcription
  misc_feature: MA Experiment 20000234 PARAMETER Experiment Name: At_Siliques_P Parameter: Age (day) Value: 21
  misc_feature: MA Experiment 20000234 PARAMETER Experiment Name: At_Siliques_P Parameter: Organism Value: A. thaliana
  misc_feature: MA Experiment 20000234 PARAMETER Experiment Name: At_Siliques_P Parameter: Plant Line Value: WS
  misc_feature: MA Experiment 20000234 PARAMETER Experiment Name: At_Siliques_P Parameter: Tissue Value: Less Than 5mm Siliques vs. Whole Plant
  misc_feature: MA Experiment ID: 20000235 Result: Up-regulated in Transcription
  misc_feature: MA Experiment 20000235 PARAMETER Experiment Name: At_Siliques_P Parameter: Age (day) Value: 21
  misc_feature: MA Experiment 20000235 PARAMETER Experiment Name: At_Siliques_P Parameter: Organism Value: A. thaliana
  misc_feature: MA Experiment 20000235 PARAMETER Experiment Name: At_Siliques_P Parameter: Plant Line Value: WS
  misc_feature: MA Experiment 20000235 PARAMETER Experiment Name: At_Siliques_P Parameter: Tissue Value: 5-10mm Siliques vs. Whole Plant
  misc_feature: MA Experiment ID: 20000264 Result: Up-regulated in Transcription
  misc_feature: MA Experiment 20000264 PARAMETER Experiment Name: At_Open_Flower_P Parameter: Age (day) Value: 21
  misc_feature: MA Experiment 20000264 PARAMETER Experiment Name: At_Open_Flower_P Parameter: Plant Line Value: WS
  misc_feature: MA Experiment 20000264 PARAMETER Experiment Name: At_Open_Flower_P Parameter: Tissue Value: Open Flower vs. Whole Plant
  misc_feature: MA Experiment ID: 20000438 Result: Up-regulated in Transcription
  misc_feature: MA Experiment 20000438 PARAMETER Experiment Name: At_Shoots__P Parameter: Age (day) Value: 14
  misc_feature: MA Experiment 20000438 PARAMETER Experiment Name: At_Shoots__P Parameter: Tissue Value: Shoots vs. Whole Plant
  misc_feature: MA Experiment ID: 20000439 Result: Down-regulated in Transcription
  misc_feature: MA Experiment 20000439 PARAMETER Experiment Name: At_Roots__P Parameter: Age (day) Value: 14 vs. 21
  misc_feature: MA Experiment 20000439 PARAMETER Experiment Name: At_Roots__P Parameter: Organism Value: A. thaliana
  misc_feature: MA Experiment 20000439 PARAMETER Experiment Name: At_Roots__P Parameter: Tissue Value: Roots vs. Whole Plant
  misc_feature: MA Experiment ID: 20001248 Result: Down-regulated in Transcription
  misc_feature: MA Experiment 20001248 PARAMETER Experiment Name: At_Far-red-induction_P Parameter: Age (day) Value: 7
  misc_feature: MA Experiment 20001248 PARAMETER Experiment Name: At_Far-red-induction_P Parameter: Light Value: Far-red vs. White
  misc_feature: MA Experiment 20001248 PARAMETER Experiment Name: At_Far-red-induction_P Parameter: Organism Value: A. thaliana
  misc_feature: MA Experiment 20001248 PARAMETER Experiment Name: At_Far-red-induction_P Parameter: Plant Line Value: Columbia
  misc_feature: MA Experiment 20001248 PARAMETER Experiment Name: At_Far-red-induction_P Parameter: Timepoint (hr) Value: 4
  misc_feature: MA Experiment 20001248 PARAMETER Experiment Name: At_Far-red-induction_P Parameter: Tissue Value: Whole Plant
  misc_feature: MA Experiment ID: 20001450 Result: Down-regulated in Transcription
  misc_feature: MA Experiment 20001450 PARAMETER Experiment Name: At_Far-red-induction_P Parameter: Age (day) Value: 7
  misc_feature: MA Experiment 20001450 PARAMETER Experiment Name: At_Far-red-induction_P Parameter: Light Value: Far-red vs. White
  misc_feature: MA Experiment 20001450 PARAMETER Experiment Name: At_Far-red-induction_P Parameter: Organism Value: A. thaliana
  misc_feature: MA Experiment 20001450 PARAMETER Experiment Name: At_Far-red-induction_P Parameter: Plant Line Value: Columbia
  misc_feature: MA Experiment 20001450 PARAMETER Experiment Name: At_Far-red-induction_P Parameter: Timepoint (hr) Value: 8
  misc_feature: MA Experiment 20001450 PARAMETER Experiment Name: At_Far-red-induction_P Parameter: Tissue Value: Whole Plant
  misc_feature: MA Experiment ID: 20001451 Result: Down-regulated in Transcription
  misc_feature: MA Experiment 20001451 PARAMETER Experiment Name: At_Far-red-induction_P Parameter: Age (day) Value: 7
  misc_feature: MA Experiment 20001451 PARAMETER Experiment Name: At_Far-red-induction_P Parameter: Light Value: Far-red vs. White
  misc_feature: MA Experiment 20001451 PARAMETER Experiment Name: At_Far-red-induction_P Parameter: Organism Value: A. thaliana
  misc_feature: MA Experiment 20001451 PARAMETER Experiment Name: At_Far-red-induction_P Parameter: Plant Line Value: Columbia
  misc_feature: MA Experiment 20001451 PARAMETER Experiment Name: At_Far-red-induction_P Parameter: Timepoint (hr) Value: 24
  misc_feature: MA Experiment 20001451 PARAMETER Experiment Name: At_Far-red-induction_P Parameter: Tissue Value: Whole Plant
gggtgatttcggatgcctaattgggtaattaatataatacagtataagattagatgcctcgaatattcgctctgtgcctaaccacaaaaaccgtaacttttggttttctctgaaacacatcccaaagtaaagaaagcatcactcttttcgtcttctctcgaaaatggcggacaatgattctctagatcagtttttggctgccgccattgatgccgctaaaaaagctggacagatcattcgtaaagggttttacgagactaaacatgttgaacacaaaggccaggtggatttggtgacagagactgataaaggatgtgaagaacttgtgtttaatcatctcaagcagctctttcccaatcacaagttcataggagaagaaactacagctgcatttggtgtgacagaactaactgacgaaccaacttggattgttgatcctcttgatggaacaaccaatttcgttcacgggttccctttcgtgtgtgtttccattggacttacgattggaaaagtccctgttgttggagttgtttataatcctattatggaagagctattcaccggtgtccaagggaaaggagcattcttgaatggaaagcgaatcaaagtgtcagctcaaagcgaacttttaaccgctttgctcgtgacagaggcgggtactaaacgagataaagctacattagacgatacaaccaacagaatcaacagtttgctaaccaaggtcaggtcccttaggatgagtggttcgtgtgcactggacctctgtggcgttgcgtgtggaagggttgatatcttctacgagctcggtttcggtggtccatgggacattgcagcaggaattgttatcgtgaaagaagctggtggactcatctttgatccatccggtaaagatttggacataacatcgcagaggatcgcggcttcaaacgcttctctcaaggagttattcgctgaggcgttgcggcttacaggggcatgaagtcatctgttattattttacaatatggtctcaaccttatatgatcaaactcaattcaaaaacttaacattattgaatatttcttttcggtagaaagaaaacaaactcaattgttgagaaaaaaaaaaaactattttc

SEQ ID NO: 104131 - protein, 271 aa, Arabidopsis thaliana; identical to SEQ ID NO: 43209
  peptide (1)..(271): Ceres Seq. ID no. 13614367
  misc_feature (1)..(271): Homolog of NCBI NO: 15232993 NR Description: myo-inositol monophosphatase -related
  misc_feature (1)..(271): Homolog of NCBI NO: 21553679 NR Description: putative myo-inositol monophosphatase
  misc_feature (1)..(266): Homolog of NCBI NO: 1709205 NR Description: Inositol-1(or 4)-monophosphatase 3 (IMPase 3)
  misc_feature (1)..(267): Homolog of NCBI NO: 3914097 NR Description: Inositol-1(or 4)-monophosphatase (IMPase) (IMP)
  misc_feature (1)..(269): Homolog of NCBI NO: 1709203 NR Description: Inositol-1(or 4)-monophosphatase 1 (IMPase 1)
  misc_feature (1)..(269): Homolog of NCBI NO: 30143275 NR Description: myo inositol monophosphatase isoform 1
  misc_feature (7)..(266): Homolog of NCBI NO: 1709204 NR Description: Inositol-1(or 4)-monophosphatase 2 (IMPase 2)
  misc_feature (7)..(266): Homolog of NCBI NO: 30143277 NR Description: myo inositol monophosphatase isoform 2
  misc_feature (1)..(266): Homolog of NCBI NO: 21357329 NR Description: CG9391-PA [Drosophila melanogaster]
  misc_feature (8)..(267): Homolog of NCBI NO: 7657236 NR Description: inositol(myo)-1(or 4)-monophosphatase 2 [Homo

SEQ ID NO: 104132 - protein, 144 aa, Arabidopsis thaliana; identical to SEQ ID NO: 43210
  peptide (1)..(144): Ceres Seq. ID no. 13614368
  misc_feature (1)..(144): Homolog of NCBI NO: 15232993 NR Description: myo-inositol monophosphatase -related
  misc_feature (1)..(144): Homolog of NCBI NO: 21553679 NR Description: putative myo-inositol monophosphatase
  misc_feature (1)..(139): Homolog of NCBI NO: 1709205 NR Description: Inositol-1(or 4)-monophosphatase 3 (IMPase 3)
  misc_feature (1)..(140): Homolog of NCBI NO: 3914097 NR Description: Inositol-1(or 4)-monophosphatase (IMPase) (IMP)
  misc_feature (1)..(142): Homolog of NCBI NO: 1709203 NR Description: Inositol-1(or 4)-monophosphatase 1 (IMPase 1)
  misc_feature (1)..(142): Homolog of NCBI NO: 30143275 NR Description: myo inositol monophosphatase isoform 1
  misc_feature (1)..(139): Homolog of NCBI NO: 1709204 NR Description: Inositol-1(or 4)-monophosphatase 2 (IMPase 2)
  misc_feature (1)..(139): Homolog of NCBI NO: 30143277 NR Description: myo inositol monophosphatase isoform 2
  misc_feature (1)..(139): Homolog of NCBI NO: 21357329 NR Description: CG9391-PA [Drosophila melanogaster]
  misc_feature (1)..(140): Homolog of NCBI NO: 7657236 NR Description: inositol(myo)-1(or 4)-monophosphatase 2 [Homo

SEQ ID NO: 104133 - DNA, 654 bp, Arabidopsis thaliana
  misc_feature (1)..(654): Ceres Seq. ID no. 13614372
  misc_feature: MA Experiment ID: 20000173 Result: Up-regulated in Transcription
  misc_feature: MA Experiment 20000173 PARAMETER Experiment Name: At_42deg_Heat_P Parameter: Age (day) Value: 14
  misc_feature: MA Experiment 20000173 PARAMETER Experiment Name: At_42deg_Heat_P Parameter: Organism Value: A. thaliana
  misc_feature: MA Experiment 20000173 PARAMETER Experiment Name: At_42deg_Heat_P Parameter: Plant Line Value: WS
  misc_feature: MA Experiment 20000173 PARAMETER Experiment Name: At_42deg_Heat_P Parameter: Temperature (deg C) Value: 42 vs. 22
  misc_feature: MA Experiment 20000173 PARAMETER Experiment Name: At_42deg_Heat_P Parameter: Timepoint (hr) Value: 6
  misc_feature: MA Experiment 20000173 PARAMETER Experiment Name: At_42deg_Heat_P Parameter: Tissue Value: Aerial
  misc_feature: MA Experiment ID: 20000180 Result: Up-regulated in Transcription
  misc_feature: MA Experiment 20000180 PARAMETER Experiment Name: At_Germinating_Seeds_P Parameter: Age (hr) Value: 24 vs. 0
  misc_feature: MA Experiment 20000180 PARAMETER Experiment Name: At_Germinating_Seeds_P Parameter: Tissue Value: Germinating Seeds
  misc_feature: MA Experiment ID: 20000453 Result: Up-regulated in Transcription
  misc_feature: MA Experiment 20000453 PARAMETER Experiment Name: At_100uM_ABA_P Parameter: Age (day) Value: 15
  misc_feature: MA Experiment 20000453 PARAMETER Experiment Name: At_100uM_ABA_P Parameter: Organism Value: A. thaliana
  misc_feature: MA Experiment 20000453 PARAMETER Experiment Name: At_100uM_ABA_P Parameter: Plant Line Value: WS
  misc_feature: MA Experiment 20000453 PARAMETER Experiment Name: At_100uM_ABA_P Parameter: Timepoint (hr) Value: 24
  misc_feature: MA Experiment 20000453 PARAMETER Experiment Name: At_100uM_ABA_P Parameter: Tissue Value: Aerial
  misc_feature: MA Experiment 20000453 PARAMETER Experiment Name: At_100uM_ABA_P Parameter: Treatment Value: 100uM ABA vs. No Treatment
aagatctgaccattttgttcatcgactttttcaactcaaaacaaaatgctcagattagcgattcctttgtttctttttgcattatgctctttcacattattttcttctgcaagatccttcatcaccacaaaacctcttccgattgattcatttattcctaaaccaaagctagagaatgcggctgcgtgttcttacacggtgatcattaagacaagctgttcctctgtgtcttacactagagataagatcagtatatcgtttggtgatgtctacggcaacgaggtgtatgtgaagagactagacgatccatcgtcgaggacgttcgaaaagtgttcatcagacacatacaagatatcgggaccgtgtatgcgcgacgtttgttatctctacctcctcaggcaaggatccgacggctggaaaccagagaatgttaagatctacggctcatccatcagatcagtcactttctactacaaccttttcttgcctaactctgtttggtacggctttaatgtctgcaatggcattggcaataccaagtcttctcaacccattagtactacctcttccgttgcagctatgtaagattgatataataattaaaaacaaggacttgtgattatcggtgaattgctatttgtatggcataacttg

SEQ ID NO: 104134 - protein, 179 aa, Arabidopsis thaliana
  peptide (1)..(179): Ceres Seq. ID no. 13614373
  misc_feature (31)..(158): Pfam Name: Embryo-specific protein 3, (ATS3) Pfam Description: Embryo-specific protein 3, (ATS3)
  misc_feature (1)..(179): Homolog of NCBI NO: 15227355 NR Description: hypothetical protein [Arabidopsis thaliana]
  misc_feature (5)..(164): Homolog of NCBI NO: 8809633 NR Description: contains similarity to embryo-specific protein
  misc_feature (5)..(164): Homolog of NCBI NO: 15241727 NR Description: expressed protein [Arabidopsis thaliana]
  misc_feature (8)..(168): Homolog of NCBI NO: 34910236 NR Description: OSJNBa0089K24.2 [Oryza sativa (japonica
  misc_feature (28)..(159): Homolog of NCBI NO: 15241758 NR Description: embryo-specific protein - like [Arabidopsis
  misc_feature (28)..(159): Homolog of NCBI NO: 26450767 NR Description: embryo-specific protein like [Arabidopsis
  misc_feature (48)..(166): Homolog of NCBI NO: 3335171 NR Description: embryo-specific protein 3 [Arabidopsis thaliana]
  misc_feature (48)..(166): Homolog of NCBI NO: 13877521 NR Description: embryo-specific protein 3; ATS3 [Arabidopsis
  misc_feature (48)..(166): Homolog of NCBI NO: 15240721 NR Description: embryo-specific protein 3 (ATS3) [Arabidopsis
MLRLAIPLFLFALCSFTLFSSARSFITTKPLPIDSFIPKPKLENAAACSYTVIIKTSCSSVSYTRDKISISFGDVYGNEVYVKRLDDPSSRTFEKCSSDTYKISGPCMRDVCYLYLLRQGSDGWKPENVKIYGSSIRSVTFYYNLFLPNSVWYGFNVCNGIGNTKSSQPISTTSSVAAM

SEQ ID NO: 104135 - DNA, 1131 bp, Arabidopsis thaliana
  misc_feature (1)..(1131): Ceres Seq. ID no. 13614378
  misc_feature: MA Experiment ID: 20000794 Result: Down-regulated in Transcription
  misc_feature: MA Experiment 20000794 PARAMETER Experiment Name: At_Petals_P Parameter: Age (day) Value: 23-25 days
  misc_feature: MA Experiment 20000794 PARAMETER Experiment Name: At_Petals_P Parameter: Plant Line Value: WS
  misc_feature: MA Experiment 20000794 PARAMETER Experiment Name: At_Petals_P Parameter: Tissue Value: Petals vs. Whole plant
  misc_feature: MA Experiment ID: 20001905 Result: Down-regulated in Transcription
  misc_feature: MA Experiment 20001905 PARAMETER Experiment Name: At_Drought_Reproduction_P Parameter: Age (day) Value: 40
  misc_feature: MA Experiment 20001905 PARAMETER Experiment Name: At_Drought_Reproduction_P Parameter: Organism Value: A. thaliana
  misc_feature: MA Experiment 20001905 PARAMETER Experiment Name: At_Drought_Reproduction_P Parameter: Plant Line Value: WS
  misc_feature: MA Experiment 20001905 PARAMETER Experiment Name: At_Drought_Reproduction_P Parameter: Timepoint (day) Value: 10
  misc_feature: MA Experiment 20001905 PARAMETER Experiment Name: At_Drought_Reproduction_P Parameter: Tissue Value: Rosettes
  misc_feature: MA Experiment 20001905 PARAMETER Experiment Name: At_Drought_Reproduction_P Parameter: Treatment Value: Drought vs. No Drought
agaaaccgatagacctctctcattcgatcatttcttcttcttcttcgtcttcgctgcagcctgcatctgttgtttcttctagactttgcaatcacagagatagtgagtgagatagagagagtgataatggcgagtggactaagcgagatcgggagcacgaagatgttcgatggctacaacaaaagatacaaacacttcagtgagacacttggatgttccatgaccttttccatctacttccctccttctgcttcttcttcccataaatctcctgtgctttactggctttctggcctcacctgcacggacgagaacttcattatcaaatcaggagctcaacgtgctgcttctactcacggcattgctcttgttgctccagacacttctccaagaggactaaatgttgaaggggaggcagacagttacgactttggtgtaggagccggattctacctcaatgctactcaggaaaagtggaagaactggcgtatgtatgactatgttgtcaaagagttgccaaaactcctgagtgaaaacttttcccagcttgacacaacaaaagcatctatatctggacactccatgggtggacatggagctcttactatatacctgaggaacctcgataaatacaagtctgtatctgcgtttgcaccaatcacgaatcccataaattgtgcatggggacagaaggcattcaccaattatctaggtgacaacaaagctgcttgggaggaatacgatgccacttgtcttatttcaaagtacaacaatctttctgcaacaattctaattgatcagggagaaaacgaccagttctaccctgatcagttattgcccagcaagtttgaggaggcgtgcaagaaagtgaatgcaccgctcttattgcgcctccatccaggatacgaccactcctactatttcattgccaccttcatcgaagaccacattagtcaccatgctcaagcccttgagctatagctcacttcatctgcttggaaaccggctttgggtttgtccaagtattagtatctcaataaagcaagtggacttgtaatgttttatgttcaataactcccctgtgtgctcttttgtctacgataataataagaaaatcatctttgcttcata

SEQ ID NO: 104136 - protein, 284 aa, Arabidopsis thaliana; identical to SEQ ID NO: 23892
  peptide (1)..(284): Ceres Seq. ID no. 13614379
  misc_feature (1)..(284): Homolog of NCBI NO: 15227376 NR Description: esterase D -related [Arabidopsis thaliana]
  misc_feature (13)..(284): Homolog of NCBI NO: 21593226 NR Description: putative esterase D [Arabidopsis thaliana]
  misc_feature (100)..(283): Homolog of NCBI NO: 20161330 NR Description: putative esterase D [Oryza sativa (japonica
  misc_feature (3)..(89): Homolog of NCBI NO: 20161330 NR Description: putative esterase D [Oryza sativa (japonica
  misc_feature (1)..(282): Homolog of NCBI NO: 12846304 NR Description: unnamed protein product [Mus musculus]
  misc_feature (5)..(282): Homolog of NCBI NO: 13937355 NR Description: esterase 10; esterase D [Mus musculus] sid478p [Mus musculus] >gi|12841131|dbj|BAB25090.1| unnamed product [Mus musculus] >gi|12862022|dbj|BAB32330.1| unnamed
  misc_feature (5)..(282): Homolog of NCBI NO: 28436838 NR Description: Similar to esterase 10 [Mus musculus]
  misc_feature (5)..(282): Homolog of NCBI NO: 34874491 NR Description: similar to esterase 10; esterase D [Rattus
  misc_feature (5)..(283): Homolog of NCBI NO: 23060276 NR Description: hypothetical protein [Pseudomonas fluorescens
  misc_feature (5)..(282): Homolog of NCBI NO: 9857260 NR Description: esterase D [Sus scrofa]

SEQ ID NO: 104137 - protein, 272 aa, Arabidopsis thaliana; identical to SEQ ID NO: 23893
  peptide (1)..(272): Ceres Seq. ID no. 13614380
  misc_feature (1)..(272): Homolog of NCBI NO: 15227376 NR Description: esterase D -related [Arabidopsis thaliana]
  misc_feature (1)..(272): Homolog of NCBI NO: 21593226 NR Description: putative esterase D [Arabidopsis thaliana]
  misc_feature (88)..(271): Homolog of NCBI NO: 20161330 NR Description: putative esterase D [Oryza sativa (japonica
  misc_feature (1)..(77): Homolog of NCBI NO: 20161330 NR Description: putative esterase D [Oryza sativa (japonica
  misc_feature (1)..(270): Homolog of NCBI NO: 12846304 NR Description: unnamed protein product [Mus musculus]
  misc_feature (1)..(270): Homolog of NCBI NO: 13937355 NR Description: esterase 10; esterase D [Mus musculus] sid478p [Mus musculus] >gi|12841131|dbj|BAB25090.1| unnamed product [Mus musculus] >gi|12862022|dbj|BAB32330.1| unnamed
  misc_feature (1)..(270): Homolog of NCBI NO: 28436838 NR Description: Similar to esterase 10 [Mus musculus]
  misc_feature (1)..(270): Homolog of NCBI NO: 34874491 NR Description: similar to esterase 10; esterase D [Rattus
  misc_feature (1)..(271): Homolog of NCBI NO: 23060276 NR Description: hypothetical protein [Pseudomonas fluorescens
  misc_feature (1)..(270): Homolog of NCBI NO: 9857260 NR Description: esterase D [Sus scrofa]

SEQ ID NO: 104138 - protein, 253 aa, Arabidopsis thaliana
  peptide (1)..(253): Ceres Seq. ID no. 13614381
  misc_feature (1)..(253): Homolog of NCBI NO: 15227376 NR Description: esterase D -related [Arabidopsis thaliana]
  misc_feature (1)..(253): Homolog of NCBI NO: 21593226 NR Description: putative esterase D [Arabidopsis thaliana]
  misc_feature (69)..(252): Homolog of NCBI NO: 20161330 NR Description: putative esterase D [Oryza sativa (japonica
  misc_feature (1)..(58): Homolog of NCBI NO: 20161330 NR Description: putative esterase D [Oryza sativa (japonica
  misc_feature (1)..(251): Homolog of NCBI NO: 12846304 NR Description: unnamed protein product [Mus musculus]
  misc_feature (1)..(251): Homolog of NCBI NO: 13937355 NR Description: esterase 10; esterase D [Mus musculus] sid478p [Mus musculus] >gi|12841131|dbj|BAB25090.1| unnamed product [Mus musculus] >gi|12862022|dbj|BAB32330.1| unnamed
  misc_feature (1)..(251): Homolog of NCBI NO: 28436838 NR Description: Similar to esterase 10 [Mus musculus]
  misc_feature (1)..(251): Homolog of NCBI NO: 34874491 NR Description: similar to esterase 10; esterase D [Rattus
  misc_feature (1)..(252): Homolog of NCBI NO: 23060276 NR Description: hypothetical protein [Pseudomonas fluorescens
  misc_feature (1)..(251): Homolog of NCBI NO: 9857260 NR Description: esterase D [Sus scrofa]
MTFSIYFPPSASSSHKSPVLYWLSGLTCTDENFIIKSGAQRAASTHGIALVAPDTSPRGLNVEGEADSYDFGVGAGFYLNATQEKWKNWRMYDYVVKELPKLLSENFSQLDTTKASISGHSMGGHGALTIYLRNLDKYKSVSAFAPITNPINCAWGQKAFTNYLGDNKAAWEEYDATCLISKYNNLSATILIDQGENDQFYPDQLLPSKFEEACKKVNAPLLLRLHPGYDHSYYFIATFIEDHISHHAQALEL

SEQ ID NO: 104139 - DNA, 1245 bp, Arabidopsis thaliana
  misc_feature (1)..(1245): Ceres Seq. ID no. 13614392
  misc_feature: MA Experiment ID: 108461 Result: Up-regulated in Transcription
  misc_feature: MA Experiment 108461 PARAMETER Experiment Name: At_Germinating_Seeds_cDNA_P Parameter: Age (day) Value: 1 vs. 0
  misc_feature: MA Experiment 108461 PARAMETER Experiment Name: At_Germinating_Seeds_cDNA_P Parameter: Tissue Value: Germinating Seeds
  misc_feature: MA Experiment ID: 108462 Result: Up-regulated in Transcription
  misc_feature: MA Experiment 108462 PARAMETER Experiment Name: At_Germinating_Seeds_cDNA_P Parameter: Age (day) Value: 2 vs. 0
  misc_feature: MA Experiment 108462 PARAMETER Experiment Name: At_Germinating_Seeds_cDNA_P Parameter: Tissue Value: Germinating Seeds
  misc_feature: MA Experiment ID: 108463 Result: Up-regulated in Transcription
  misc_feature: MA Experiment 108463 PARAMETER Experiment Name: At_Germinating_Seeds_cDNA_P Parameter: Age (day) Value: 3 vs. 0
  misc_feature: MA Experiment 108463 PARAMETER Experiment Name: At_Germinating_Seeds_cDNA_P Parameter: Tissue Value: Germinating Seeds
  misc_feature: MA Experiment ID: 108469 Result: Up-regulated in Transcription
  misc_feature: MA Experiment ID: 108595 Result: Up-regulated in Transcription
  misc_feature: MA Experiment 108595 PARAMETER Experiment Name: At_Ler-pi_Ovule_cDNA_P Parameter: Plant Line Value: null
  misc_feature: MA Experiment ID: 20000173 Result: Down-regulated in Transcription
  misc_feature: MA Experiment 20000173 PARAMETER Experiment Name: At_42deg_Heat_P Parameter: Age (day) Value: 14
  misc_feature: MA Experiment 20000173 PARAMETER Experiment Name: At_42deg_Heat_P Parameter: Organism Value: A. thaliana
  misc_feature: MA Experiment 20000173 PARAMETER Experiment Name: At_42deg_Heat_P Parameter: Plant Line Value: WS
  misc_feature: MA Experiment 20000173 PARAMETER Experiment Name: At_42deg_Heat_P Parameter: Temperature (deg C) Value: 42 vs. 22
  misc_feature: MA Experiment 20000173 PARAMETER Experiment Name: At_42deg_Heat_P Parameter: Timepoint (hr) Value: 6
  misc_feature: MA Experiment 20000173 PARAMETER Experiment Name: At_42deg_Heat_P Parameter: Tissue Value: Aerial
  misc_feature: MA Experiment ID: 20000180 Result: Up-regulated in Transcription
  misc_feature: MA Experiment 20000180 PARAMETER Experiment Name: At_Germinating_Seeds_P Parameter: Age (hr) Value: 24 vs. 0
  misc_feature: MA Experiment 20000180 PARAMETER Experiment Name: At_Germinating_Seeds_P Parameter: Tissue Value: Germinating Seeds
  misc_feature: MA Experiment ID: 20000182 Result: Up-regulated in Transcription
  misc_feature: MA Experiment 20000182 PARAMETER Experiment Name: At_2mM_SA_P Parameter: Age (day) Value: 14
  misc_feature: MA Experiment 20000182 PARAMETER Experiment Name: At_2mM_SA_P Parameter: Organism Value: A. thaliana
  misc_feature: MA Experiment 20000182 PARAMETER Experiment Name: At_2mM_SA_P Parameter: Plant Line Value: WS
  misc_feature: MA Experiment 20000182 PARAMETER Experiment Name: At_2mM_SA_P Parameter: Timepoint (hr) Value: 6
  misc_feature: MA Experiment 20000182 PARAMETER Experiment Name: At_2mM_SA_P Parameter: Tissue Value: Aerial
  misc_feature: MA Experiment 20000182 PARAMETER Experiment Name: At_2mM_SA_P Parameter: Treatment Value: 2mM SA vs. No Treatment
  misc_feature: MA Experiment ID: 20000184 Result: Up-regulated in Transcription
  misc_feature: MA Experiment 20000184 PARAMETER Experiment Name: At_Shoots__P Parameter: Age (day) Value: 7
  misc_feature: MA Experiment 20000184 PARAMETER Experiment Name: At_Shoots__P Parameter: Tissue Value: Shoots vs. Whole Plant
  misc_feature: MA Experiment ID: 20000185 Result: Up-regulated in Transcription
  misc_feature: MA Experiment 20000185 PARAMETER Experiment Name: At_Roots__P Parameter: Age (day) Value: 7 vs. 21
  misc_feature: MA Experiment 20000185 PARAMETER Experiment Name: At_Roots__P Parameter: Organism Value: A. thaliana
  misc_feature: MA Experiment 20000185 PARAMETER Experiment Name: At_Roots__P Parameter: Tissue Value: Roots vs. Whole Plant
  misc_feature: MA Experiment ID: 20000265 Result: Down-regulated in Transcription
  misc_feature: MA Experiment 20000265 PARAMETER Experiment Name: At_Open_Flower_P Parameter: Age (day) Value: 21
  misc_feature: MA Experiment 20000265 PARAMETER Experiment Name: At_Open_Flower_P Parameter: Plant Line Value: WS
  misc_feature: MA Experiment 20000265 PARAMETER Experiment Name: At_Open_Flower_P Parameter: Tissue Value: Closed Flower vs. Whole Plant
  misc_feature: MA Experiment ID: 20000436 Result: Up-regulated in Transcription
  misc_feature: MA Experiment 20000436 PARAMETER Experiment Name: At_Drought_P Parameter: Age (day) Value: 7
  misc_feature: MA Experiment 20000436 PARAMETER Experiment Name: At_Drought_P Parameter: Organism Value: A. thaliana
  misc_feature: MA Experiment 20000436 PARAMETER Experiment Name: At_Drought_P Parameter: Plant Line Value: WS
  misc_feature: MA Experiment 20000436 PARAMETER Experiment Name: At_Drought_P Parameter: Timepoint (hr) Value: 12
  misc_feature: MA Experiment 20000436 PARAMETER Experiment Name: At_Drought_P Parameter: Tissue Value: Whole Plant
  misc_feature: MA Experiment 20000436 PARAMETER Experiment Name: At_Drought_P Parameter: Treatment Value: Drought vs. No Drought
  misc_feature: MA Experiment ID: 20000439 Result: Up-regulated in Transcription
  misc_feature: MA Experiment 20000439 PARAMETER Experiment Name: At_Roots__P Parameter: Age (day) Value: 14 vs. 21
  misc_feature: MA Experiment 20000439 PARAMETER Experiment Name: At_Roots__P Parameter: Organism Value: A. thaliana
  misc_feature: MA Experiment 20000439 PARAMETER Experiment Name: At_Roots__P Parameter: Tissue Value: Roots vs. Whole Plant
  misc_feature: MA Experiment ID: 20000453 Result: Up-regulated in Transcription
  misc_feature: MA Experiment 20000453 PARAMETER Experiment Name: At_100uM_ABA_P Parameter: Age (day) Value: 15
  misc_feature: MA Experiment 20000453 PARAMETER Experiment Name: At_100uM_ABA_P Parameter: Organism Value: A. thaliana
  misc_feature: MA Experiment 20000453 PARAMETER Experiment Name: At_100uM_ABA_P Parameter: Plant Line Value: WS
  misc_feature: MA Experiment 20000453 PARAMETER Experiment Name: At_100uM_ABA_P Parameter: Timepoint (hr) Value: 24
  misc_feature: MA Experiment 20000453 PARAMETER Experiment Name: At_100uM_ABA_P Parameter: Tissue Value: Aerial
  misc_feature: MA Experiment 20000453 PARAMETER Experiment Name: At_100uM_ABA_P Parameter: Treatment Value: 100uM ABA vs. No Treatment
  misc_feature: MA Experiment ID: 20000496 Result: Down-regulated in Transcription
  misc_feature: MA Experiment 20000496 PARAMETER Experiment Name: At_Guard_Cells_P Parameter: Harvest Date Value: 7/19/2002
  misc_feature: MA Experiment 20000496 PARAMETER Experiment Name: At_Guard_Cells_P Parameter: Organism Value: Canola
  misc_feature: MA Experiment 20000496 PARAMETER Experiment Name: At_Guard_Cells_P Parameter: Tissue Value: Guard Cells vs. Leaves
  misc_feature: MA Experiment ID: 20001450 Result: Down-regulated in Transcription
  misc_feature: MA Experiment 20001450 PARAMETER Experiment Name: At_Far-red-induction_P Parameter: Age (day) Value: 7
  misc_feature: MA Experiment 20001450 PARAMETER Experiment Name: At_Far-red-induction_P Parameter: Light Value: Far-red vs. White
  misc_feature: MA Experiment 20001450 PARAMETER Experiment Name: At_Far-red-induction_P Parameter: Organism Value: A. thaliana
  misc_feature: MA Experiment 20001450 PARAMETER Experiment Name: At_Far-red-induction_P Parameter: Plant Line Value: Columbia
  misc_feature: MA Experiment 20001450 PARAMETER Experiment Name: At_Far-red-induction_P Parameter: Timepoint (hr) Value: 8
  misc_feature: MA Experiment 20001450 PARAMETER Experiment Name: At_Far-red-induction_P Parameter: Tissue Value: Whole Plant
  misc_feature: MA Experiment ID: 20001560 Result: Up-regulated in Transcription
  misc_feature: MA Experiment 20001560 PARAMETER Experiment Name: At_Drought_Soil_Dry_P Parameter: Age (day) Value: 28
  misc_feature: MA Experiment 20001560 PARAMETER Experiment Name: At_Drought_Soil_Dry_P Parameter: Organism Value: A. thaliana
  misc_feature: MA Experiment 20001560 PARAMETER Experiment Name: At_Drought_Soil_Dry_P Parameter: Plant Line Value: WS
  misc_feature: MA Experiment 20001560 PARAMETER Experiment Name: At_Drought_Soil_Dry_P Parameter: Post Timepoint (hr) Value: None
  misc_feature: MA Experiment 20001560 PARAMETER Experiment Name: At_Drought_Soil_Dry_P Parameter: Post-Treatment Value: None
  misc_feature: MA Experiment 20001560 PARAMETER Experiment Name: At_Drought_Soil_Dry_P Parameter: Timepoint (day) Value: 14
  misc_feature: MA Experiment 20001560 PARAMETER Experiment Name: At_Drought_Soil_Dry_P Parameter: Treatment Value: Drought vs. No Drought
  misc_feature: MA Experiment ID: 20001904 Result: Up-regulated in Transcription
  misc_feature: MA Experiment 20001904 PARAMETER Experiment Name: At_Drought_Reproduction_P Parameter: Age (day) Value: 37
  misc_feature: MA Experiment 20001904 PARAMETER Experiment Name: At_Drought_Reproduction_P Parameter: Organism Value: A. thaliana
  misc_feature: MA Experiment 20001904 PARAMETER Experiment Name: At_Drought_Reproduction_P Parameter: Plant Line Value: WS
  misc_feature: MA Experiment 20001904 PARAMETER Experiment Name: At_Drought_Reproduction_P Parameter: Timepoint (day) Value: 7
  misc_feature: MA Experiment 20001904 PARAMETER Experiment Name: At_Drought_Reproduction_P Parameter: Tissue Value: Rosettes
  misc_feature: MA Experiment 20001904 PARAMETER Experiment Name: At_Drought_Reproduction_P Parameter: Treatment Value: Drought vs. No Drought
atcatcactttggtcggccgctttcttccttccttcctcctcaaataatctacacatatataacatccctcttagtttctctgtggatccattgagacatatatcataagtaacaatggtgccataccaagaactcactcttcagagaagcttcagctacaactcaagaaagatcaatccagtgacttctccggcgcgtagctcacacgttcgttctccttcttcctccgccttaatcccaagcatacctgagcacgaactcttcctcgttccttgccggagatgctcctatgtccctctctcctcctcatcgtcggcctctcacaatatcgggaaatttcacttgaagttttctttgctcttgcgttctttcatcaacatcattaacatccccgcttgcaaaatgctctctcttccctctccgccgtcttcttcttccagcgtctctaaccaactgatctcactcgttaccggtggatcctcttctctcgggagaagagtcaccgggactctgtacggacacaaaagaggccacgtcacgttttcggtccagtacaaccaaagatccgacccggtcttgctcctcgacctggccatgtcaacggcaactctcgtcaaagagatgtcgtcggggctcgtcaggatcgcgttggagtgcgagaagcgtcatcgatcaggtacgaagcttttccaagagcccaaatggacgatgtactgcaacgggaggaagtgcggctacgctgtgtcacgtggcggcgcgtgtactgatacagattggcgcgtgttgaacacggtatctagggttactgttggagccggagttattccgacgccgaaaactattgatgacgtgtccggtgttggtagtggaacggagcttggtgagttgttgtatatgagaggcaaatttgaacgagtcgttgggagccgtgactcggaggcgttttacatgatgaacccggacaaaaacggaggtccagaactcagtatttttcttcttagaatataataaagaataaaatggtttttaaagagaatttgacttcttaaaagtttgaaaatgtctttaaatgacgtattattatgtatatgtaatatgattgcaatgttgtgtcatgagatatatgtaagcgatattgatatgaaagaaagagagaggggcctagagtatgataaggttttgtttttctagttgtttatttgatgtgtggtatttttgtatctttgttattgatcaataagaag

SEQ ID NO: 104140 - protein, 297 aa, Arabidopsis thaliana; identical to SEQ ID NO: 23097
  peptide (1)..(297): Ceres Seq. ID no. 13614393
  misc_feature (128)..(297): Pfam Name: Protein of unknown function, DUF617 Pfam Description: Protein of unknown function, DUF617
  misc_feature (1)..(297): Homolog of NCBI NO: 18405770 NR Description: expressed protein [Arabidopsis thaliana]
  misc_feature (1)..(297): Homolog of NCBI NO: 21593037 NR Description: unknown [Arabidopsis thaliana]
  misc_feature (190)..(297): Homolog of NCBI NO: 15237221 NR Description: expressed protein [Arabidopsis thaliana] gene_id:MYJ24.9~pir||T00822~similar to unknown protein
  misc_feature (122)..(183): Homolog of NCBI NO: 15237221 NR Description: expressed protein [Arabidopsis thaliana] gene_id:MYJ24.9~pir||T00822~similar to unknown protein
  misc_feature (122)..(297): Homolog of NCBI NO: 11994755 NR Description: gb|AAB84348.1~gene_id:T5M7.9~similar to unknown
  misc_feature (122)..(297): Homolog of NCBI NO: 15230862 NR Description: expressed protein [Arabidopsis thaliana]
  misc_feature (126)..(297): Homolog of NCBI NO: 15240220 NR Description: hypothetical protein [Arabidopsis thaliana] gb|AAD20416.1~gene_id:MOJ9.16~similar to unknown protein
  misc_feature (93)..(297): Homolog of NCBI NO: 34909066 NR Description: P0702B09.30 [Oryza sativa (japonica
  misc_feature (28)..(297): Homolog of NCBI NO: 15227126 NR Description: hypothetical protein [Arabidopsis thaliana]
  misc_feature (50)..(296): Homolog of NCBI NO: 18404579 NR Description: expressed protein [Arabidopsis thaliana]

SEQ ID NO: 104141 - protein, 201 aa, Arabidopsis thaliana; identical to SEQ ID NO: 23098
  peptide (1)..(201): Ceres Seq. ID no. 13614394
  misc_feature (32)..(201): Pfam Name: Protein of unknown function, DUF617 Pfam Description: Protein of unknown function, DUF617
  misc_feature (1)..(201): Homolog of NCBI NO: 18405770 NR Description: expressed protein [Arabidopsis thaliana]
  misc_feature (1)..(201): Homolog of NCBI NO: 21593037 NR Description: unknown [Arabidopsis thaliana]
  misc_feature (94)..(201): Homolog of NCBI NO: 15237221 NR Description: expressed protein [Arabidopsis thaliana] gene_id:MYJ24.9~pir||T00822~similar to unknown protein
  misc_feature (26)..(87): Homolog of NCBI NO: 15237221 NR Description: expressed protein [Arabidopsis thaliana] gene_id:MYJ24.9~pir||T00822~similar to unknown protein
  misc_feature (26)..(201): Homolog of NCBI NO: 11994755 NR Description: gb|AAB84348.1~gene_id:T5M7.9~similar to unknown
  misc_feature (26)..(201): Homolog of NCBI NO: 15230862 NR Description: expressed protein [Arabidopsis thaliana]
  misc_feature (30)..(201): Homolog of NCBI NO: 15240220 NR Description: hypothetical protein [Arabidopsis thaliana] gb|AAD20416.1~gene_id:MOJ9.16~similar to unknown protein
  misc_feature (1)..(201): Homolog of NCBI NO: 34909066 NR Description: P0702B09.30 [Oryza sativa (japonica
  misc_feature (1)..(201): Homolog of NCBI NO: 15227126 NR Description: hypothetical protein [Arabidopsis thaliana]
  misc_feature (1)..(200): Homolog of NCBI NO: 18404579 NR Description: expressed protein [Arabidopsis thaliana]

SEQ ID NO: 104142 - DNA, 1598 bp, Arabidopsis thaliana
  misc_feature (1)..(1598): Ceres Seq. ID no. 13614395
  misc_feature: MA Experiment ID: 108577 Result: Down-regulated in Transcription
  misc_feature: MA Experiment 108577 PARAMETER Experiment Name: At_42deg_Heat_cDNA_P Parameter: Temperature (deg C) Value: 42 vs. 22
  misc_feature: MA Experiment 108577 PARAMETER Experiment Name: At_42deg_Heat_cDNA_P Parameter: Timepoint (hr) Value: 6
  misc_feature: MA Experiment 108577 PARAMETER Experiment Name: At_42deg_Heat_cDNA_P Parameter: Tissue Value: Aerial
  misc_feature: MA Experiment ID: 20000184 Result: Down-regulated in Transcription
  misc_feature: MA Experiment 20000184 PARAMETER Experiment Name: At_Shoots__P Parameter: Age (day) Value: 7
  misc_feature: MA Experiment 20000184 PARAMETER Experiment Name: At_Shoots__P Parameter: Tissue Value: Shoots vs. Whole Plant
  misc_feature: MA Experiment ID: 20000185 Result: Down-regulated in Transcription
  misc_feature: MA Experiment 20000185 PARAMETER Experiment Name: At_Roots__P Parameter: Age (day) Value: 7 vs. 21
  misc_feature: MA Experiment 20000185 PARAMETER Experiment Name: At_Roots__P Parameter: Organism Value: A. thaliana
  misc_feature: MA Experiment 20000185 PARAMETER Experiment Name: At_Roots__P Parameter: Tissue Value: Roots vs. Whole Plant
  misc_feature: MA Experiment ID: 20000227 Result: Down-regulated in Transcription
  misc_feature: MA Experiment 20000227 PARAMETER Experiment Name: At_Root-Tips-vs-Tops_P Parameter: Tissue Value: Root Tips vs. Root Tops
  misc_feature: MA Experiment ID: 20000234 Result: Down-regulated in Transcription
  misc_feature: MA Experiment 20000234 PARAMETER Experiment Name: At_Siliques_P Parameter: Age (day) Value: 21
  misc_feature: MA Experiment 20000234 PARAMETER Experiment Name: At_Siliques_P Parameter: Organism Value: A. thaliana
  misc_feature: MA Experiment 20000234 PARAMETER Experiment Name: At_Siliques_P Parameter: Plant Line Value: WS
  misc_feature: MA Experiment 20000234 PARAMETER Experiment Name: At_Siliques_P Parameter: Tissue Value: Less Than 5mm Siliques vs. Whole Plant
  misc_feature: MA Experiment ID: 20000235 Result: Down-regulated in Transcription
  misc_feature: MA Experiment 20000235 PARAMETER Experiment Name: At_Siliques_P Parameter: Age (day) Value: 21
  misc_feature: MA Experiment 20000235 PARAMETER Experiment Name: At_Siliques_P Parameter: Organism Value: A. thaliana
  misc_feature: MA Experiment 20000235 PARAMETER Experiment Name: At_Siliques_P Parameter: Plant Line Value: WS
  misc_feature: MA Experiment 20000235 PARAMETER Experiment Name: At_Siliques_P Parameter: Tissue Value: 5-10mm Siliques vs. Whole Plant
  misc_feature: MA Experiment ID: 20000264 Result: Down-regulated in Transcription
  misc_feature: MA Experiment 20000264 PARAMETER Experiment Name: At_Open_Flower_P Parameter: Age (day) Value: 21
  misc_feature: MA Experiment 20000264 PARAMETER Experiment Name: At_Open_Flower_P Parameter: Plant Line Value: WS
  misc_feature: MA Experiment 20000264 PARAMETER Experiment Name: At_Open_Flower_P Parameter: Tissue Value: Open Flower vs. Whole Plant
  misc_feature: MA Experiment ID: 20000265 Result: Down-regulated in Transcription
  misc_feature: MA Experiment 20000265 PARAMETER Experiment Name: At_Open_Flower_P Parameter: Age (day) Value: 21
  misc_feature: MA Experiment 20000265 PARAMETER Experiment Name: At_Open_Flower_P Parameter: Plant Line Value: WS
  misc_feature: MA Experiment 20000265 PARAMETER Experiment Name: At_Open_Flower_P Parameter: Tissue Value: Closed Flower vs. Whole Plant
  misc_feature: MA Experiment ID: 20000286 Result: Down-regulated in Transcription
  misc_feature: MA Experiment 20000286 PARAMETER Experiment Name: At_Open_Flower_P Parameter: Age (day) Value: 21
  misc_feature: MA Experiment 20000286 PARAMETER Experiment Name: At_Open_Flower_P Parameter: Plant Line Value: WS
  misc_feature: MA Experiment 20000286 PARAMETER Experiment Name: At_Open_Flower_P Parameter: Tissue Value: Half Open vs. Whole Plant
  misc_feature: MA Experiment ID: 20000438 Result: Down-regulated in Transcription
  misc_feature: MA Experiment 20000438 PARAMETER Experiment Name: At_Shoots__P Parameter: Age (day) Value: 14
  misc_feature: MA Experiment 20000438 PARAMETER Experiment Name: At_Shoots__P Parameter: Tissue Value: Shoots vs. Whole Plant
  misc_feature: MA Experiment ID: 20000794 Result: Down-regulated in Transcription
  misc_feature: MA Experiment 20000794 PARAMETER Experiment Name: At_Petals_P Parameter: Age (day) Value: 23-25 days
  misc_feature: MA Experiment 20000794 PARAMETER Experiment Name: At_Petals_P Parameter: Plant Line Value: WS
  misc_feature: MA Experiment 20000794 PARAMETER Experiment Name: At_Petals_P Parameter: Tissue Value: Petals vs. Whole plant
  misc_feature: MA Experiment ID: 20001248 Result: Up-regulated in Transcription
  misc_feature: MA Experiment 20001248 PARAMETER Experiment Name: At_Far-red-induction_P Parameter: Age (day) Value: 7
  misc_feature: MA Experiment 20001248 PARAMETER Experiment Name: At_Far-red-induction_P Parameter: Light Value: Far-red vs. White
  misc_feature: MA Experiment 20001248 PARAMETER Experiment Name: At_Far-red-induction_P Parameter: Organism Value: A. thaliana
  misc_feature: MA Experiment 20001248 PARAMETER Experiment Name: At_Far-red-induction_P Parameter: Plant Line Value: Columbia
  misc_feature: MA Experiment 20001248 PARAMETER Experiment Name: At_Far-red-induction_P Parameter: Timepoint (hr) Value: 4
  misc_feature: MA Experiment 20001248 PARAMETER Experiment Name: At_Far-red-induction_P Parameter: Tissue Value: Whole Plant
  misc_feature: MA Experiment ID: 20001450 Result: Up-regulated in Transcription
  misc_feature: MA Experiment 20001450 PARAMETER Experiment Name: At_Far-red-induction_P Parameter: Age (day) Value: 7
  misc_feature: MA Experiment 20001450 PARAMETER Experiment Name: At_Far-red-induction_P Parameter: Light Value: Far-red vs. White
  misc_feature: MA Experiment 20001450 PARAMETER Experiment Name: At_Far-red-induction_P Parameter: Organism Value: A. thaliana
  misc_feature: MA Experiment 20001450 PARAMETER Experiment Name: At_Far-red-induction_P Parameter: Plant Line Value: Columbia
  misc_feature: MA Experiment 20001450 PARAMETER Experiment Name: At_Far-red-induction_P Parameter: Timepoint (hr) Value: 8
  misc_feature: MA Experiment 20001450 PARAMETER Experiment Name: At_Far-red-induction_P Parameter: Tissue Value: Whole Plant
  misc_feature: MA Experiment ID: 20001557 Result: Down-regulated in Transcription
  misc_feature: MA Experiment 20001557 PARAMETER Experiment Name: At_Drought_Soil_Dry_P Parameter: Age (day) Value: 27
  misc_feature: MA Experiment 20001557 PARAMETER Experiment Name: At_Drought_Soil_Dry_P Parameter: Organism Value: A. thaliana
  misc_feature: MA Experiment 20001557 PARAMETER Experiment Name: At_Drought_Soil_Dry_P Parameter: Plant Line Value: WS
  misc_feature: MA Experiment 20001557 PARAMETER Experiment Name: At_Drought_Soil_Dry_P Parameter: Post Timepoint (hr) Value: 3
  misc_feature: MA Experiment 20001557 PARAMETER Experiment Name: At_Drought_Soil_Dry_P Parameter: Post-Treatment Value: Re-Water vs. No Drought
  misc_feature: MA Experiment 20001557 PARAMETER Experiment Name: At_Drought_Soil_Dry_P Parameter: Timepoint (day) Value: 13
  misc_feature: MA Experiment 20001557 PARAMETER Experiment Name: At_Drought_Soil_Dry_P Parameter: Treatment Value: Drought vs. No Drought
  misc_feature: MA Experiment ID: 20001558 Result: Down-regulated in Transcription
  misc_feature: MA Experiment 20001558 PARAMETER Experiment Name: At_Drought_Soil_Dry_P Parameter: Age (day) Value: 27
  misc_feature: MA Experiment 20001558 PARAMETER Experiment Name: At_Drought_Soil_Dry_P Parameter: Organism Value: A. thaliana
  misc_feature: MA Experiment 20001558 PARAMETER Experiment Name: At_Drought_Soil_Dry_P Parameter: Plant Line Value: WS
  misc_feature: MA Experiment 20001558 PARAMETER Experiment Name: At_Drought_Soil_Dry_P Parameter: Post Timepoint (hr) Value: 6
  misc_feature: MA Experiment 20001558 PARAMETER Experiment Name: At_Drought_Soil_Dry_P Parameter: Post-Treatment Value: Re-Water vs. No Drought
  misc_feature: MA Experiment 20001558 PARAMETER Experiment Name: At_Drought_Soil_Dry_P Parameter: Timepoint (day) Value: 13
  misc_feature: MA Experiment 20001558 PARAMETER Experiment Name: At_Drought_Soil_Dry_P Parameter: Treatment Value: Drought vs. No Drought
  misc_feature: MA Experiment ID: 20001560 Result: Down-regulated in Transcription
  misc_feature: MA Experiment 20001560 PARAMETER Experiment Name: At_Drought_Soil_Dry_P Parameter: Age (day) Value: 28
  misc_feature: MA Experiment 20001560 PARAMETER Experiment Name: At_Drought_Soil_Dry_P Parameter: Organism Value: A. thaliana
  misc_feature: MA Experiment 20001560 PARAMETER Experiment Name: At_Drought_Soil_Dry_P Parameter: Plant Line Value: WS
  misc_feature: MA Experiment 20001560 PARAMETER Experiment Name: At_Drought_Soil_Dry_P Parameter: Post Timepoint (hr) Value: None
  misc_feature: MA Experiment 20001560 PARAMETER Experiment Name: At_Drought_Soil_Dry_P Parameter: Post-Treatment Value: None
  misc_feature: MA Experiment 20001560 PARAMETER Experiment Name: At_Drought_Soil_Dry_P Parameter: Timepoint (day) Value: 14
  misc_feature: MA Experiment 20001560 PARAMETER Experiment Name: At_Drought_Soil_Dry_P Parameter: Treatment Value: Drought vs. No Drought
  misc_feature: MA Experiment ID: 20001904 Result: Down-regulated in Transcription
  misc_feature: MA Experiment 20001904 PARAMETER Experiment Name: At_Drought_Reproduction_P Parameter: Age (day) Value: 37
  misc_feature: MA Experiment 20001904 PARAMETER Experiment Name: At_Drought_Reproduction_P Parameter: Organism Value: A. thaliana
  misc_feature: MA Experiment 20001904 PARAMETER Experiment Name: At_Drought_Reproduction_P Parameter: Plant Line Value: WS
  misc_feature: MA Experiment 20001904 PARAMETER Experiment Name: At_Drought_Reproduction_P Parameter: Timepoint (day) Value: 7
  misc_feature: MA Experiment 20001904 PARAMETER Experiment Name: At_Drought_Reproduction_P Parameter: Tissue Value: Rosettes
  misc_feature: MA Experiment 20001904 PARAMETER Experiment Name: At_Drought_Reproduction_P Parameter: Treatment Value: Drought vs. No Drought
  misc_feature: MA Experiment ID: 20001905 Result: Down-regulated in Transcription
  misc_feature: MA Experiment 20001905 PARAMETER Experiment Name: At_Drought_Reproduction_P Parameter: Age (day) Value: 40
  misc_feature: MA Experiment 20001905 PARAMETER Experiment Name: At_Drought_Reproduction_P Parameter: Organism Value: A. thaliana
  misc_feature: MA Experiment 20001905 PARAMETER Experiment Name: At_Drought_Reproduction_P Parameter: Plant Line Value: WS
  misc_feature: MA Experiment 20001905 PARAMETER Experiment Name: At_Drought_Reproduction_P Parameter: Timepoint (day) Value: 10
  misc_feature: MA Experiment 20001905 PARAMETER Experiment Name: At_Drought_Reproduction_P Parameter: Tissue Value: Rosettes
  misc_feature: MA Experiment 20001905 PARAMETER Experiment Name: At_Drought_Reproduction_P Parameter: Treatment Value: Drought vs. No Drought
acttctactgtatcaagaagctccgttttgcttagccatagtgcgtctagggtttggttggtgggaagaaggttccgatcatggcgtcggtgtcgtcgtcggatcaaggacctaagacagaagcaggatgtagcggcggaggaggaggagagagctcggagacagtggcggcgagtgatcagatgttgttgtatagaggttttaagaaggcgaagaaggagagaggttgtacagctaaggagcgtattagtaaaatgcctccgtgcactgctgggaaaaggagttccatataccggggagtcaccagacatagatggacaggtcgttatgaagctcacctttgggataagagtacctggaaccaaaaccagaacaagaagggaaaacaagtttatctaggagcatatgatgatgaagaggctgctgctagagcttacgaccttgctgccttaaaatattggggtcctgggacacttataaattttccggtgactgattataccagggatttagaagaaatgcaaaatctctcaagggaagaataccttgcatctttacgtagaaaaagcagcggtttctctaggggaatagcgaaatatcgtggacttcaaagccgatgggacgcatcagccagtcgtatgcctggacctgaatacttcagtaacattcattacggggcaggtgatgatcgtggaacagaaggtgactttctaggtagcttttgtctggaaagaaagattgatctaacaggatacataaagtggtggggagccaacaagaaccgtcaaccagaatcttcatcaaaagcatcagaggatgcaaacgtcgaagatgctggtactgagcttaaaacactggaacacacatcccatgcaacagaaccatacaaggcgccaaaccttggcgtcctttgtggaactcagagaaaagaaaaagaaatatcatcaccatcaagctcttctgctttaagcatcttgtctcagtcgcctgccttcaagagcctagaggagaaagtgttgaagatccaagaaagctgcaataatgaaaacgatgagaatgcaaaccgtaacatcatcaatatggagaagaataacggcaaggcaatagagaaaccagttgtgagtcatggagttgctttaggcggtgctgctgctttgtctcttcagaaaagcatgtacccacttacctctctcttaacggctccattgctcaccaactacaatacattggatcctcttgcagaccctattctctggacaccatttcttccttcaggatcctctcttacttcagaggtgacaaagacagagaccagctgttccacgtacagctacctcccacaagagaaatgagccgttccctttagactttatgtatgtcagattctccttttttgagatgaattcgtcgacttgacatctctttgtctcttttatggagaaaaagttgggaaaagtgtgacaatggtctgaagcaggaatgtacaggttttgttagtggttgtgtttttttttttccagtgtggaatatagaatcatgatattttgtgtaaaacagaaaaaagttatcattatagtatagaagtttgctcttaatat

SEQ ID NO: 104143 - protein, 423 aa, Arabidopsis thaliana
  peptide (1)..(423): Ceres Seq. ID no. 13614396
  misc_feature (68)..(141): Pfam Name: AP2 domain Pfam Description: AP2 domain
  misc_feature (1)..(423): Homolog of NCBI NO: 18405784 NR Description: ovule development protein, putative [Arabidopsis >gi|20196893|gb|AAC02777.2| putative AP2 domain transcription
  misc_feature (1)..(423): Homolog of NCBI NO: 30688760 NR Description: ovule development protein, putative [Arabidopsis
  misc_feature (1)..(423): Homolog of NCBI NO: 21593696 NR Description: putative AP2 domain transcription factor
  misc_feature (1)..(423): Homolog of NCBI NO: 26452593 NR Description: putative AP2 domain transcription factor
  misc_feature (1)..(423): Homolog of NCBI NO: 25408750 NR Description: probable AP2 domain transcription factor
  misc_feature (13)..(192): Homolog of NCBI NO: 15232481 NR Description: ovule development protein, putative [Arabidopsis
  misc_feature (23)..(199): Homolog of NCBI NO: 26449695 NR Description: unknown protein [Arabidopsis thaliana]
  misc_feature (52)..(192): Homolog of NCBI NO: 18394319 NR Description: ovule development protein, putative [Arabidopsis >gi|15028185|gb|AAK76589.1| unknown protein [Arabidopsis >gi|22136940|gb|AAM91814.1| unknown protein [Arabidopsis
  misc_feature (23)..(187): Homolog of NCBI NO: 34221733 NR Description: putative AP2 domain transcription factor
  misc_feature (52)..(192): Homolog of NCBI NO: 25518475 NR Description: hypothetical protein T24D18.16 - Arabidopsis >gi|6587812|gb|AAF18503.1|AC010924_16 Similar to gb|U44028 factor CKC from Arabidopsis thaliana and contains two PF|00847
MASVSSSDQGPKTEAGCSGGGGGESSETVAASDQMLLYRGFKKAKKERGCTAKERISKMPPCTAGKRSSIYRGVTRHRWTGRYEAHLWDKSTWNQNQNKKGKQVYLGAYDDEEAAARAYDLAALKYWGPGTLINFPVTDYTRDLEEMQNLSREEYLASLRRKSSGFSRGIAKYRGLQSRWDASASRMPGPEYFSNIHYGAGDDRGTEGDFLGSFCLERKIDLTGYIKWWGANKNRQPESSSKASEDANVEDAGTELKTLEHTSHATEPYKAPNLGVLCGTQRKEKEISSPSSSSALSILSQSPAFKSLEEKVLKIQESCNNENDENANRNIINMEKNNGKAIEKPVVSHGVALGGAAALSLQKSMYPLTSLLTAPLLTNYNTLDPLADPILWTPFLPSGSSLTSEVTKTETSCSTYSYLPQEK

SEQ ID NO: 104144 - protein, 389 aa, Arabidopsis thaliana
  peptide (1)..(389): Ceres Seq. ID no. 13614397
  misc_feature (34)..(107): Pfam Name: AP2 domain Pfam Description: AP2 domain
  misc_feature (1)..(389): Homolog of NCBI NO: 18405784 NR Description: ovule development protein, putative [Arabidopsis >gi|20196893|gb|AAC02777.2| putative AP2 domain transcription
  misc_feature (1)..(389): Homolog of NCBI NO: 30688760 NR Description: ovule development protein, putative [Arabidopsis
  misc_feature (1)..(389): Homolog of NCBI NO: 21593696 NR Description: putative AP2 domain transcription factor
  misc_feature (1)..(389): Homolog of NCBI NO: 26452593 NR Description: putative AP2 domain transcription factor
  misc_feature (1)..(389): Homolog of NCBI NO: 25408750 NR Description: probable AP2 domain transcription factor
  misc_feature (1)..(158): Homolog of NCBI NO: 15232481 NR Description: ovule development protein, putative [Arabidopsis
  misc_feature (1)..(165): Homolog of NCBI NO: 26449695 NR Description: unknown protein [Arabidopsis thaliana]
  misc_feature (18)..(158): Homolog of NCBI NO: 18394319 NR Description: ovule development protein, putative [Arabidopsis >gi|15028185|gb|AAK76589.1| unknown protein [Arabidopsis >gi|22136940|gb|AAM91814.1| unknown protein [Arabidopsis
  misc_feature (1)..(153): Homolog of NCBI NO: 34221733 NR Description: putative AP2 domain transcription factor
  misc_feature (18)..(158): Homolog of NCBI NO: 25518475 NR Description: hypothetical protein T24D18.16 - Arabidopsis >gi|6587812|gb|AAF18503.1|AC010924_16 Similar to gb|U44028 factor CKC from Arabidopsis thaliana and contains two PF|00847
MLLYRGFKKAKKERGCTAKERISKMPPCTAGKRSSIYRGVTRHRWTGRYEAHLWDKSTWNQNQNKKGKQVYLGAYDDEEAAARAYDLAALKYWGPGTLINFPVTDYTRDLEEMQNLSREEYLASLRRKSSGFSRGIAKYRGLQSRWDASASRMPGPEYFSNIHYGAGDDRGTEGDFLGSFCLERKIDLTGYIKWWGANKNRQPESSSKASEDANVEDAGTELKTLEHTSHATEPYKAPNLGVLCGTQRKEKEISSPSSSSALSILSQSPAFKSLEEKVLKIQESCNNENDENANRNIINMEKNNGKAIEKPVVSHGVALGGAAALSLQKSMYPLTSLLTAPLLTNYNTLDPLADPILWTPFLPSGSSLTSEVTKTETSCSTYSYLPQEK

SEQ ID NO: 104145 - protein, 365 aa, Arabidopsis thaliana
  peptide (1)..(365): Ceres Seq. ID no. 13614398
  misc_feature (10)..(83): Pfam Name: AP2 domain Pfam Description: AP2 domain
  misc_feature (1)..(365): Homolog of NCBI NO: 18405784 NR Description: ovule development protein, putative [Arabidopsis >gi|20196893|gb|AAC02777.2| putative AP2 domain transcription
  misc_feature (1)..(365): Homolog of NCBI NO: 30688760 NR Description: ovule development protein, putative [Arabidopsis
  misc_feature (1)..(365): Homolog of NCBI NO: 21593696 NR Description: putative AP2 domain transcription factor
  misc_feature (1)..(365): Homolog of NCBI NO: 26452593 NR Description: putative AP2 domain transcription factor
  misc_feature (1)..(365): Homolog of NCBI NO: 25408750 NR Description: probable AP2 domain transcription factor
  misc_feature (1)..(134): Homolog of NCBI NO: 15232481 NR Description: ovule development protein, putative [Arabidopsis
  misc_feature (1)..(141): Homolog of NCBI NO: 26449695 NR Description: unknown protein [Arabidopsis thaliana]
  misc_feature (1)..(134): Homolog of NCBI NO: 18394319 NR Description: ovule development protein, putative [Arabidopsis >gi|15028185|gb|AAK76589.1| unknown protein [Arabidopsis >gi|22136940|gb|AAM91814.1| unknown protein [Arabidopsis
  misc_feature (1)..(129): Homolog of NCBI NO: 34221733 NR Description: putative AP2 domain transcription factor
  misc_feature (1)..(134): Homolog of NCBI NO: 25518475 NR Description: hypothetical protein T24D18.16 - Arabidopsis >gi|6587812|gb|AAF18503.1|AC010924_16 Similar to gb|U44028 factor CKC from Arabidopsis thaliana and contains two PF|00847
MPPCTAGKRSSIYRGVTRHRWTGRYEAHLWDKSTWNQNQNKKGKQVYLGAYDDEEAAARAYDLAALKYWGPGTLINFPVTDYTRDLEEMQNLSREEYLASLRRKSSGFSRGIAKYRGLQSRWDASASRMPGPEYFSNIHYGAGDDRGTEGDFLGSFCLERKIDLTGYIKWWGANKNRQPESSSKASEDANVEDAGTELKTLEHTSHATEPYKAPNLGVLCGTQRKEKEISSPSSSSALSILSQSPAFKSLEEKVLKIQESCNNENDENANRNIINMEKNNGKAIEKPVVSHGVALGGAAALSLQKSMYPLTSLLTAPLLTNYNTLDPLADPILWTPFLPSGSSLTSEVTKTETSCSTYSYLPQEK

SEQ ID NO: 104146 - DNA, 1186 bp, Arabidopsis thaliana
  misc_feature (1)..(1186): Ceres Seq. ID no. 13614403
  misc_feature: MA Experiment ID: 108463 Result: Down-regulated in Transcription
  misc_feature: MA Experiment 108463 PARAMETER Experiment Name: At_Germinating_Seeds_cDNA_P Parameter: Age (day) Value: 3 vs. 0
  misc_feature: MA Experiment 108463 PARAMETER Experiment Name: At_Germinating_Seeds_cDNA_P Parameter: Tissue Value: Germinating Seeds
  misc_feature: MA Experiment ID: 108464 Result: Down-regulated in Transcription
  misc_feature: MA Experiment 108464 PARAMETER Experiment Name: At_Germinating_Seeds_cDNA_P Parameter: Age (day) Value: 4 vs. 0
  misc_feature: MA Experiment 108464 PARAMETER Experiment Name: At_Germinating_Seeds_cDNA_P Parameter: Tissue Value: Germinating Seeds
  misc_feature: MA Experiment ID: 20000069 Result: Down-regulated in Transcription
  misc_feature: MA Experiment 20000069 PARAMETER Experiment Name: At_100uM_ABA_Mutants_cDNA_P Parameter: Plant Line Value: CS23
  misc_feature: MA Experiment 20000069 PARAMETER Experiment Name: At_100uM_ABA_Mutants_cDNA_P Parameter: Timepoint (hr) Value: 6
  misc_feature: MA Experiment 20000069 PARAMETER Experiment Name: At_100uM_ABA_Mutants_cDNA_P Parameter: Tissue Value: Aerial
  misc_feature: MA Experiment 20000069 PARAMETER Experiment Name: At_100uM_ABA_Mutants_cDNA_P Parameter: Treatment Value: 100uM ABA vs. No Treatment
  misc_feature: MA Experiment ID: 20000117 Result: Down-regulated in Transcription
  misc_feature: MA Experiment 20000117 PARAMETER Experiment Name: At_100uM_ABA_Mutants_cDNA_P Parameter: Plant Line Value: Columbia
  misc_feature: MA Experiment 20000117 PARAMETER Experiment Name: At_100uM_ABA_Mutants_cDNA_P Parameter: Timepoint (hr) Value: 6
  misc_feature: MA Experiment 20000117 PARAMETER Experiment Name: At_100uM_ABA_Mutants_cDNA_P Parameter: Tissue Value: Aerial
  misc_feature: MA Experiment 20000117 PARAMETER Experiment Name: At_100uM_ABA_Mutants_cDNA_P Parameter: Treatment Value: 100uM ABA vs. No Treatment
  misc_feature: MA Experiment ID: 20000184 Result: Up-regulated in Transcription
  misc_feature: MA Experiment 20000184 PARAMETER Experiment Name: At_Shoots__P Parameter: Age (day) Value: 7
  misc_feature: MA Experiment 20000184 PARAMETER Experiment Name: At_Shoots__P Parameter: Tissue Value: Shoots vs. Whole Plant
  misc_feature: MA Experiment ID: 20000224 Result: Down-regulated in Transcription
  misc_feature: MA Experiment ID: 20000794 Result: Down-regulated in Transcription
  misc_feature: MA Experiment 20000794 PARAMETER Experiment Name: At_Petals_P Parameter: Age (day) Value: 23-25 days
  misc_feature: MA Experiment 20000794 PARAMETER Experiment Name: At_Petals_P Parameter: Plant Line Value: WS
  misc_feature: MA Experiment 20000794 PARAMETER Experiment Name: At_Petals_P Parameter: Tissue Value: Petals vs. Whole plant
  misc_feature: MA Experiment ID: 20001558 Result: Up-regulated in Transcription
  misc_feature: MA Experiment 20001558 PARAMETER Experiment Name: At_Drought_Soil_Dry_P Parameter: Age (day) Value: 27
  misc_feature: MA Experiment 20001558 PARAMETER Experiment Name: At_Drought_Soil_Dry_P Parameter: Organism Value: A. thaliana
  misc_feature: MA Experiment 20001558 PARAMETER Experiment Name: At_Drought_Soil_Dry_P Parameter: Plant Line Value: WS
  misc_feature: MA Experiment 20001558 PARAMETER Experiment Name: At_Drought_Soil_Dry_P Parameter: Post Timepoint (hr) Value: 6
  misc_feature: MA Experiment 20001558 PARAMETER Experiment Name: At_Drought_Soil_Dry_P Parameter: Post-Treatment Value: Re-Water vs. No Drought
  misc_feature: MA Experiment 20001558 PARAMETER Experiment Name: At_Drought_Soil_Dry_P Parameter: Timepoint (day) Value: 13
  misc_feature: MA Experiment 20001558 PARAMETER Experiment Name: At_Drought_Soil_Dry_P Parameter: Treatment Value: Drought vs. No Drought
  misc_feature: MA Experiment ID: 20001757 Result: Up-regulated in Transcription
  misc_feature: MA Experiment 20001757 PARAMETER Experiment Name: At_50mM_NH4NO3_L-to-H_P Parameter: Timepoint (hr) Value: 6
  misc_feature: MA Experiment 20001757 PARAMETER Experiment Name: At_50mM_NH4NO3_L-to-H_P Parameter: Tissue Value: Leaf
  misc_feature: MA Experiment 20001757 PARAMETER Experiment Name: At_50mM_NH4NO3_L-to-H_P Parameter: Treatment Value: 50mM NH4NO3 vs 100mM Mannitol
agaaaccctaaaaatccttattgtagcagctggagcaatatatatcccaatttgccgcaactagggttttctcttcctcacgcaaagcaatacatcgcagtctcccactgattcagcagctctttgaactactcttcgacaatggccgaacgtggtggagaacgtggtgttgagcgtggtggagaacgtggtgatttcggacgaggattcggaggccgtggaggtcgtggagatcgtggagggcgtggacgtggaggccgtggtggtcgtcgtggagggcgtgccagtgaagaagagaaatgggttccagtgaccaagcttggtcgtctcgtggcggctggtcatatcaagcagatagagcagatctatcttcattcactcccggttaaggagtaccagatcattgatatgctcatcggtccaacattgaaggatgaggtaatgaaaatcatgccggttcagaaacaaaccagggctggtcaaaggactagattcaaggcctttgttgtcgttggagatggtaatggtcatgttgggttgggagtgaaatgctctaaggaagttgctacggccattagaggagcgattattctcgctaagctgtctgttgttccagtgaggagaggttactggggtaacaagattgggaagccacatacggttccttgtaaggtgactgggaagtgtggatctgtgacagtgaggatggttccagctcctagaggttctggtattgtggctgctagagttcctaagaaggttcttcaattcgctggaattgatgatgttttcacttcctccaggggatccaccaaaactcttggaaacttcgtcaaggctacattcgattgccttcagaagacttacggattccttaccccagagttctggaaggagacaagattctctagatcaccataccaagagcacactgatttcctggcgtccaaggctctttcgaccagcaaacccgacccagtggttgaagaccaagcctaaacaatgcttccaccttgtgttctttttggattataatccttcatgagttaattttggttgaacctttggtagtatatgttgctggattgtgcaccttctgttttcatctcctcttccaaactactttatttttgcttatggatcttaatgttctagttttgcttttacttttgttgagaaaagttaa

SEQ ID NO: 104147 - protein, 285 aa, Arabidopsis thaliana; identical to SEQ ID NO: 30327
  peptide (1)..(285): Ceres Seq. ID no. 13614404
  misc_feature (178)..(251): Pfam Name: Ribosomal protein S5, C-terminal domain Pfam Description: Ribosomal protein S5, C-terminal domain
  misc_feature (1)..(285): Homolog of NCBI NO: 15227443 NR Description: 40S ribosomal protein S2 (RPS2C) [Arabidopsis
  misc_feature (1)..(285): Homolog of NCBI NO: 21553851 NR Description: 40S ribosomal protein S2 [Arabidopsis thaliana]
  misc_feature (1)..(285): Homolog of NCBI NO: 18406325 NR Description: 40S ribosomal protein, putative [Arabidopsis >gi|18406353|ref|NP_564740.1| 40S ribosomal protein S2 (RPS2B) thaliana] >gi|22330310|ref|NP_683443.1| 40S ribosomal protein,
  misc_feature (1)..(285): Homolog of NCBI NO: 15217951 NR Description: 40S ribosomal protein S2 (RPS2A) [Arabidopsis
  misc_feature (1)..(285): Homolog of NCBI NO: 21618011 NR Description: ribosomal protein S2, putative [Arabidopsis
  misc_feature (1)..(285): Homolog of NCBI NO: 21539457 NR Description: ribosomal protein S2, putative [Arabidopsis
  misc_feature (3)..(285): Homolog of NCBI NO: 25294520 NR Description: hypothetical protein RF12 [imported] - thaliana (fragment) >gi|6566279|dbj|BAA88264.1| similar to
  misc_feature (7)..(267): Homolog of NCBI NO: 15230312 NR Description: 40S ribosomal protein S2 (RPS2D) [Arabidopsis
  misc_feature (1)..(282): Homolog of NCBI NO: 34393314 NR Description: putative 40S ribosomal protein S2 [Oryza sativa
  misc_feature (1)..(282): Homolog of NCBI NO: 30103021 NR Description: putative 40S ribosomal protein S2 [Oryza sativa

SEQ ID NO: 104148 - protein, 196 aa, Arabidopsis thaliana; identical to SEQ ID NO: 30328
  peptide (1)..(196): Ceres Seq. ID no. 13614405
  misc_feature (89)..(162): Pfam Name: Ribosomal protein S5, C-terminal domain Pfam Description: Ribosomal protein S5, C-terminal domain
  misc_feature (1)..(196): Homolog of NCBI NO: 15227443 NR Description: 40S ribosomal protein S2 (RPS2C) [Arabidopsis
  misc_feature (1)..(196): Homolog of NCBI NO: 21553851 NR Description: 40S ribosomal protein S2 [Arabidopsis thaliana]
  misc_feature (1)..(196): Homolog of NCBI NO: 18406325 NR Description: 40S ribosomal protein, putative [Arabidopsis >gi|18406353|ref|NP_564740.1| 40S ribosomal protein S2 (RPS2B) thaliana] >gi|22330310|ref|NP_683443.1| 40S ribosomal protein,
  misc_feature (1)..(196): Homolog of NCBI NO: 15217951 NR Description: 40S ribosomal protein S2 (RPS2A) [Arabidopsis
  misc_feature (1)..(196): Homolog of NCBI NO: 21618011 NR Description: ribosomal protein S2, putative [Arabidopsis
  misc_feature (1)..(196): Homolog of NCBI NO: 21539457 NR Description: ribosomal protein S2, putative [Arabidopsis
  misc_feature (1)..(196): Homolog of NCBI NO: 25294520 NR Description: hypothetical protein RF12 [imported] - thaliana (fragment) >gi|6566279|dbj|BAA88264.1| similar to
  misc_feature (1)..(178): Homolog of NCBI NO: 15230312 NR Description: 40S ribosomal protein S2 (RPS2D) [Arabidopsis
  misc_feature (1)..(193): Homolog of NCBI NO: 34393314 NR Description: putative 40S ribosomal protein S2 [Oryza sativa
  misc_feature (1)..(193): Homolog of NCBI NO: 30103021 NR Description: putative 40S ribosomal protein S2 [Oryza sativa

SEQ ID NO: 104149 - protein, 185 aa, Arabidopsis thaliana; identical to SEQ ID NO: 30329
  peptide (1)..(185): Ceres Seq. ID no. 13614406
  misc_feature (78)..(151): Pfam Name: Ribosomal protein S5, C-terminal domain Pfam Description: Ribosomal protein S5, C-terminal domain
  misc_feature (1)..(185): Homolog of NCBI NO: 15227443 NR Description: 40S ribosomal protein S2 (RPS2C) [Arabidopsis
  misc_feature (1)..(185): Homolog of NCBI NO: 21553851 NR Description: 40S ribosomal protein S2 [Arabidopsis thaliana]
  misc_feature (1)..(185): Homolog of NCBI NO: 18406325 NR Description: 40S ribosomal protein, putative [Arabidopsis >gi|18406353|ref|NP_564740.1| 40S ribosomal protein S2 (RPS2B) thaliana] >gi|22330310|ref|NP_683443.1| 40S ribosomal protein,
  misc_feature (1)..(185): Homolog of NCBI NO: 15217951 NR Description: 40S ribosomal protein S2 (RPS2A) [Arabidopsis
  misc_feature (1)..(185): Homolog of NCBI NO: 21618011 NR Description: ribosomal protein S2, putative [Arabidopsis
  misc_feature (1)..(185): Homolog of NCBI NO: 21539457 NR Description: ribosomal protein S2, putative [Arabidopsis
  misc_feature (1)..(185): Homolog of NCBI NO: 25294520 NR Description: hypothetical protein RF12 [imported] - thaliana (fragment) >gi|6566279|dbj|BAA88264.1| similar to
  misc_feature (1)..(167): Homolog of NCBI NO: 15230312 NR Description: 40S ribosomal protein S2 (RPS2D) [Arabidopsis
  misc_feature (1)..(182): Homolog of NCBI NO: 34393314 NR Description: putative 40S ribosomal protein S2 [Oryza sativa
  misc_feature (1)..(182): Homolog of NCBI NO: 30103021 NR Description: putative 40S ribosomal protein S2 [Oryza sativa

SEQ ID NO: 104150 - DNA, 1097 bp, Arabidopsis thaliana
  misc_feature (1)..(1097): Ceres Seq. ID no. 13614413
  misc_feature: MA Experiment ID: 108577 Result: Down-regulated in Transcription
  misc_feature: MA Experiment 108577 PARAMETER Experiment Name: At_42deg_Heat_cDNA_P Parameter: Temperature (deg C) Value: 42 vs. 22
  misc_feature: MA Experiment 108577 PARAMETER Experiment Name: At_42deg_Heat_cDNA_P Parameter: Timepoint (hr) Value: 6
  misc_feature: MA Experiment 108577 PARAMETER Experiment Name: At_42deg_Heat_cDNA_P Parameter: Tissue Value: Aerial
  misc_feature: MA Experiment ID: 20000495 Result: Up-regulated in Transcription
  misc_feature: MA Experiment 20000495 PARAMETER Experiment Name: At_Guard_Cells_P Parameter: Harvest Date Value: 8/2/2002
  misc_feature: MA Experiment 20000495 PARAMETER Experiment Name: At_Guard_Cells_P Parameter: Organism Value: A. thaliana
  misc_feature: MA Experiment 20000495 PARAMETER Experiment Name: At_Guard_Cells_P Parameter: Tissue Value: Guard Cells vs. Leaves
aaggaaaaatctttgatctttggaaaggaagagagcaggcgcaatcgagtaatccaaaggagttgcgttgttctgcgatcacgaagcggtctctcggcaaatctttcgacgcaagacatcgattcgtgtatttcatttttgctttggaactctatgcggaagaaccctaattgattcgccatgggagattccgtttcttcttcatcccgcgtttctgttcatcaatctcttggtgctggttctgttgctgatttgctgctatggagaaaccggactggtgcagtcattttgctaatctcttctactgggttttggttcttattcgagagagctggatacaatctcttgtctttcgtctccaatgttctgcttcttctcgttgcgatcttcttcttatgggccaagtctgctacagttctcaaccgaccgctacctccagttccgaatatggaaatccctgaggagtttgcaaataaggctgctgatgatcttcgggtttggatcaattatgtactgtcaattgcaagtgatatcaccatagctagaaatccgattcgtctccttcaggtttctcttgtcttgtgggctatatcctatgttgggactttaatcaactccctcactcttgtttacattggagttcttctcagtctttcttttcctattgtgtatgagaagtaccaagaccacattgatgagaaagtgaactcgacttctaaattcgttcgaaatatctcaaggaagtttccattgcccataaacaaagagaagaaacatcagtaggtgaaaaacagtccatttggtcaccagactaattacagctacaagaaggagccattactgtaatgctacaagaggatagtcaaagagcagcggaaaaaagtgaatcacagtacagattttcgttcatttctttctgtttcgcttactaggagttttcttcttgtgtgtttttgttgtgttcaagattcatgagtttctggtttttttggtcttttagtttacacgaatgctttgttgcagtattgttccagtagaaacgagaaagatgaatctaatacaacttgagaggttattcaataattaatttgttgatt

SEQ ID NO: 104151 - protein, 200 aa, Arabidopsis thaliana; identical to SEQ ID NO: 23783
  peptide (1)..(200): Ceres Seq. ID no. 13614414
  misc_feature (1)..(200): Homolog of NCBI NO: 18402246 NR Description: expressed protein [Arabidopsis thaliana] gb|AAD26905.1~gene_id:MLD14.20~similar to unknown protein thaliana] >gi|26449615|dbj|BAC41933.1| unknown protein
  misc_feature (1)..(200): Homolog of NCBI NO: 21593206 NR Description: unknown [Arabidopsis thaliana]
  misc_feature (12)..(188): Homolog of NCBI NO: 30679374 NR Description: expressed protein [Arabidopsis thaliana]
  misc_feature (5)..(175): Homolog of NCBI NO: 38345298 NR Description: OSJNBa0043A12.26 [Oryza sativa (japonica
  misc_feature (27)..(188): Homolog of NCBI NO: 25411624 NR Description: hypothetical protein At2g15280 [imported] - thaliana >gi|4662633|gb|AAD26905.1| hypothetical protein
  misc_feature (3)..(198): Homolog of NCBI NO: 15232423 NR Description: expressed protein [Arabidopsis thaliana]
  misc_feature (10)..(173): Homolog of NCBI NO: 26450318 NR Description: unknown protein [Arabidopsis thaliana]
  misc_feature (13)..(189): Homolog of NCBI NO: 15222616 NR Description: expressed protein [Arabidopsis thaliana] F22C12.15 [Arabidopsis thaliana] >gi|17381218|gb|AAL36421.1| protein [Arabidopsis thaliana] >gi|21436435|gb|AAM51418.1|
  misc_feature (13)..(199): Homolog of NCBI NO: 34904202 NR Description: P0492F05.25 [Oryza sativa (japonica
  misc_feature (19)..(173): Homolog of NCBI NO: 30681541 NR Description: reticulon family [Arabidopsis thaliana]

SEQ ID NO: 104152 - protein, 111 aa, Arabidopsis thaliana; identical to SEQ ID NO: 23784
  peptide (1)..(111): Ceres Seq. ID no. 13614415
  misc_feature (1)..(111): Homolog of NCBI NO: 18402246 NR Description: expressed protein [Arabidopsis thaliana] gb|AAD26905.1~gene_id:MLD14.20~similar to unknown protein thaliana] >gi|26449615|dbj|BAC41933.1| unknown protein
  misc_feature (1)..(111): Homolog of NCBI NO: 21593206 NR Description: unknown [Arabidopsis thaliana]
  misc_feature (1)..(99): Homolog of NCBI NO: 30679374 NR Description: expressed protein [Arabidopsis thaliana]
  misc_feature (1)..(86): Homolog of NCBI NO: 38345298 NR Description: OSJNBa0043A12.26 [Oryza sativa (japonica
  misc_feature (1)..(99): Homolog of NCBI NO: 25411624 NR Description: hypothetical protein At2g15280 [imported] - thaliana >gi|4662633|gb|AAD26905.1| hypothetical protein
  misc_feature (1)..(109): Homolog of NCBI NO: 15232423 NR Description: expressed protein [Arabidopsis thaliana]
  misc_feature (1)..(84): Homolog of NCBI NO: 26450318 NR Description: unknown protein [Arabidopsis thaliana]
  misc_feature (1)..(100): Homolog of NCBI NO: 15222616 NR Description: expressed protein [Arabidopsis thaliana] F22C12.15 [Arabidopsis thaliana] >gi|17381218|gb|AAL36421.1| protein [Arabidopsis thaliana] >gi|21436435|gb|AAM51418.1|
  misc_feature (1)..(110): Homolog of NCBI NO: 34904202 NR Description: P0492F05.25 [Oryza sativa (japonica
  misc_feature (1)..(84): Homolog of NCBI NO: 30681541 NR Description: reticulon family [Arabidopsis thaliana]

SEQ ID NO: 104153 - DNA, 1132 bp, Arabidopsis thaliana
  misc_feature (1)..(1132): Ceres Seq. ID no. 13614416
  misc_feature: MA Experiment ID: 108595 Result: Up-regulated in Transcription
  misc_feature: MA Experiment 108595 PARAMETER Experiment Name: At_Ler-pi_Ovule_cDNA_P Parameter: Plant Line Value: null
  misc_feature: MA Experiment ID: 20001556 Result: Up-regulated in Transcription
  misc_feature: MA Experiment 20001556 PARAMETER Experiment Name: At_Drought_Soil_Dry_P Parameter: Age (day) Value: 26
  misc_feature: MA Experiment 20001556 PARAMETER Experiment Name: At_Drought_Soil_Dry_P Parameter: Organism Value: A. thaliana
  misc_feature: MA Experiment 20001556 PARAMETER Experiment Name: At_Drought_Soil_Dry_P Parameter: Plant Line Value: WS
  misc_feature: MA Experiment 20001556 PARAMETER Experiment Name: At_Drought_Soil_Dry_P Parameter: Post Timepoint (hr) Value: None
  misc_feature: MA Experiment 20001556 PARAMETER Experiment Name: At_Drought_Soil_Dry_P Parameter: Post-Treatment Value: None
  misc_feature: MA Experiment 20001556 PARAMETER Experiment Name: At_Drought_Soil_Dry_P Parameter: Timepoint (day) Value: 12
  misc_feature: MA Experiment 20001556 PARAMETER Experiment Name: At_Drought_Soil_Dry_P Parameter: Treatment Value: Drought vs. No Drought
actttctctttgttttctttctaacctctttccacgaaaagtcacgatgggagataccgcagaggatcaggacgaccgagctatgatggaagctgaaggagtaacgagcttctccgaacttcttatgttctctgacggcgttctcagctcctcttccgaccaccaacctgagggtaatgtcggcgatggtggagaagacagtttaggttttgtattctccggcaaaactggctcaagaatgctctgttttagtggaggctatcaaaacgacgacgagtcactcttcctagaaccttctgttccaacctccggagtctctgatcttgacccttcatgcattaagattgattgcaggaactcaaacgacgcgtgtacggtcgataaatctactaaatcatcaaccaagaagagaaccggaacgggtaatgggcaagagtcggatcaaaatcgaaaaccgggcaagaaagggaaacgaaatcaagagaaatcatcagttggaattgcaaaggtcaggaaagaaaggttaggggaaagaattgcagcgttgcagcagttggtttctccatacggcaagacagatgcagcttctgtgttgcatgaagcgatgggttacatcaaattcttacaagatcagattcaagtcctttgctctccttatctaatcaaccattctctcgacggtggagttgtcaccggagatgtaatggcggcgatgaaagcgaaagacttgagaagcagaggattatgtctagtacctgtctcatccaccgtacacgtggaaaattccaacggtgctgatttctggtcacctgctactatgggtcacactacgtcaccgtcgttacctcaaggattttaattaaacggtcgtaggctgatatatattagtagtattttagtagccttttttcttgggttttgtttttggctgaagaactattactagtaaatgttacacccagacatttttttgggattatctgggtggtataaaaaggttggaatcttttgtgtttgtaaaattagattgtctaagttttcttaaagtttctttgatgtcactgtcacagttgcgacgagtagtgatggtacttactgaaaggctaagcttattcacgctcttaaagtgttg

SEQ ID NO: 104154 - protein, 285 aa, Arabidopsis thaliana; identical to SEQ ID NO: 39851
  peptide (1)..(285): Ceres Seq. ID no. 13614417
  misc_feature (169)..(208): Pfam Name: Helix-loop-helix DNA-binding domain Pfam Description: Helix-loop-helix DNA-binding domain
  misc_feature (16)..(285): Homolog of NCBI NO: 18402256 NR Description: expressed protein [Arabidopsis thaliana] contains similarity to ER33 protein~gene_id:MLD14.24 [Arabidopsis
  misc_feature (16)..(285): Homolog of NCBI NO: 21536756 NR Description: unknown [Arabidopsis thaliana]
  misc_feature (30)..(177): Homolog of NCBI NO: 15222826 NR Description: hypothetical protein [Arabidopsis thaliana]
  misc_feature (231)..(278): Homolog of NCBI NO: 15222826 NR Description: hypothetical protein [Arabidopsis thaliana]
  misc_feature (80)..(278): Homolog of NCBI NO: 14488370 NR Description: putative ethylene-responsive protein [Oryza
  misc_feature (168)..(279): Homolog of NCBI NO: 5669656 NR Description: ER33 protein [Lycopersicon esculentum]
  misc_feature (118)..(271): Homolog of NCBI NO: 21740790 NR Description: OSJNBb0091E11.4 [Oryza sativa (japonica
  misc_feature (127)..(276): Homolog of NCBI NO: 15232315 NR Description: bHLH transcription factor (bHLH123) -related thaliana] >gi|26451163|dbj|BAC42685.1| putative bHLH factor bHLH123 [Arabidopsis thaliana] >gi|30793909|gb|AAP40407.1|
  misc_feature (127)..(276): Homolog of NCBI NO: 9294343 NR Description: gene_id:F3H11.2~unknown protein [Arabidopsis
  misc_feature (132)..(270): Homolog of NCBI NO: 22093671 NR Description: similar to bHLH (Basic-helix-loop-helix)

SEQ ID NO: 104155 - protein, 270 aa, Arabidopsis thaliana; identical to SEQ ID NO: 39852
  peptide (1)..(270): Ceres Seq. ID no. 13614418
  misc_feature (154)..(193): Pfam Name: Helix-loop-helix DNA-binding domain Pfam Description: Helix-loop-helix DNA-binding domain
  misc_feature (1)..(270): Homolog of NCBI NO: 18402256 NR Description: expressed protein [Arabidopsis thaliana] contains similarity to ER33 protein~gene_id:MLD14.24 [Arabidopsis
  misc_feature (1)..(270): Homolog of NCBI NO: 21536756 NR Description: unknown [Arabidopsis thaliana]
  misc_feature (15)..(162): Homolog of NCBI NO: 15222826 NR Description: hypothetical protein [Arabidopsis thaliana]
  misc_feature (216)..(263): Homolog of NCBI NO: 15222826 NR Description: hypothetical protein [Arabidopsis thaliana]
  misc_feature (65)..(263): Homolog of NCBI NO: 14488370 NR Description: putative ethylene-responsive protein [Oryza
  misc_feature (153)..(264): Homolog of NCBI NO: 5669656 NR Description: ER33 protein [Lycopersicon esculentum]
  misc_feature (103)..(256): Homolog of NCBI NO: 21740790 NR Description: OSJNBb0091E11.4 [Oryza sativa (japonica
  misc_feature (112)..(261): Homolog of NCBI NO: 15232315 NR Description: bHLH transcription factor (bHLH123) -related thaliana] >gi|26451163|dbj|BAC42685.1| putative bHLH factor bHLH123 [Arabidopsis thaliana] >gi|30793909|gb|AAP40407.1|
  misc_feature (112)..(261): Homolog of NCBI NO: 9294343 NR Description: gene_id:F3H11.2~unknown protein [Arabidopsis
  misc_feature (117)..(255): Homolog of NCBI NO: 22093671 NR Description: similar to bHLH (Basic-helix-loop-helix)

SEQ ID NO: 104156 - protein, 258 aa, Arabidopsis thaliana; identical to SEQ ID NO: 39853
  peptide (1)..(258): Ceres Seq. ID no. 13614419
  misc_feature (142)..(181): Pfam Name: Helix-loop-helix DNA-binding domain Pfam Description: Helix-loop-helix DNA-binding domain
  misc_feature (1)..(258): Homolog of NCBI NO: 18402256 NR Description: expressed protein [Arabidopsis thaliana] contains similarity to ER33 protein~gene_id:MLD14.24 [Arabidopsis
  misc_feature (1)..(258): Homolog of NCBI NO: 21536756 NR Description: unknown [Arabidopsis thaliana]
  misc_feature (3)..(150): Homolog of NCBI NO: 15222826 NR Description: hypothetical protein [Arabidopsis thaliana]
  misc_feature (204)..(251): Homolog of NCBI NO: 15222826 NR Description: hypothetical protein [Arabidopsis thaliana]
  misc_feature (53)..(251): Homolog of NCBI NO: 14488370 NR Description: putative ethylene-responsive protein [Oryza
  misc_feature (141)..(252): Homolog of NCBI NO: 5669656 NR Description: ER33 protein [Lycopersicon esculentum]
  misc_feature (91)..(244): Homolog of NCBI NO: 21740790 NR Description: OSJNBb0091E11.4 [Oryza sativa (japonica
  misc_feature (100)..(249): Homolog of NCBI NO: 15232315 NR Description: bHLH transcription factor (bHLH123) -related thaliana] >gi|26451163|dbj|BAC42685.1| putative bHLH factor bHLH123 [Arabidopsis thaliana] >gi|30793909|gb|AAP40407.1|
  misc_feature (100)..(249): Homolog of NCBI NO: 9294343 NR Description: gene_id:F3H11.2~unknown protein [Arabidopsis
  misc_feature (105)..(243): Homolog of NCBI NO: 22093671 NR Description: similar to bHLH (Basic-helix-loop-helix)

SEQ ID NO: 104157 - DNA, 1142 bp, Arabidopsis thaliana
  misc_feature (1)..(1142): Ceres Seq. ID no. 13614424
  misc_feature: MA Experiment ID: 108434 Result: Down-regulated in Transcription
  misc_feature: MA Experiment 108434 PARAMETER Experiment Name: At_Root_Tips_cDNA_P Parameter: Tissue Value: Root Tips
  misc_feature: MA Experiment ID: 108463 Result: Up-regulated in Transcription
  misc_feature: MA Experiment 108463 PARAMETER Experiment Name: At_Germinating_Seeds_cDNA_P Parameter: Age (day) Value: 3 vs. 0
  misc_feature: MA Experiment 108463 PARAMETER Experiment Name: At_Germinating_Seeds_cDNA_P Parameter: Tissue Value: Germinating Seeds
  misc_feature: MA Experiment ID: 108464 Result: Up-regulated in Transcription
  misc_feature: MA Experiment 108464 PARAMETER Experiment Name: At_Germinating_Seeds_cDNA_P Parameter: Age (day) Value: 4 vs. 0
  misc_feature: MA Experiment 108464 PARAMETER Experiment Name: At_Germinating_Seeds_cDNA_P Parameter: Tissue Value: Germinating Seeds
  misc_feature: MA Experiment ID: 108474 Result: Down-regulated in Transcription
  misc_feature: MA Experiment 108474 PARAMETER Experiment Name: At_Drought_Flowers_cDNA_P Parameter: Timepoint (hr) Value: null
  misc_feature: MA Experiment 108474 PARAMETER Experiment Name: At_Drought_Flowers_cDNA_P Parameter: Treatment Value: Drought vs. No Drought
  misc_feature: MA Experiment ID: 108488 Result: Down-regulated in Transcription
  misc_feature: MA Experiment ID: 108489 Result: Up-regulated in Transcription
  misc_feature: MA Experiment ID: 108501 Result: Down-regulated in Transcription
  misc_feature: MA Experiment 108501 PARAMETER Experiment Name: At_ap2_floral_buds_cDNA_P Parameter: Plant Line Value: ap2 (Ler.)
  misc_feature: MA Experiment 108501 PARAMETER Experiment Name: At_ap2_floral_buds_cDNA_P Parameter: Tissue Value: Closed Flower
  misc_feature: MA Experiment ID: 108561 Result: Up-regulated in Transcription
  misc_feature: MA Experiment 108561 PARAMETER Experiment Name: At_100uM_ABA_cDNA_P Parameter: Timepoint (hr) Value: 6
  misc_feature: MA Experiment 108561 PARAMETER Experiment Name: At_100uM_ABA_cDNA_P Parameter: Tissue Value: Aerial
  misc_feature: MA Experiment 108561 PARAMETER Experiment Name: At_100uM_ABA_cDNA_P Parameter: Treatment Value: 100uM ABA vs. No Treatment
  misc_feature: MA Experiment ID: 108572 Result: Up-regulated in Transcription
  misc_feature: MA Experiment 108572 PARAMETER Experiment Name: At_Drought_cDNA_P Parameter: Timepoint (hr) Value: 1
  misc_feature: MA Experiment 108572 PARAMETER Experiment Name: At_Drought_cDNA_P Parameter: Tissue Value: Aerial
  misc_feature: MA Experiment 108572 PARAMETER Experiment Name: At_Drought_cDNA_P Parameter: Treatment Value: Drought vs. No Drought
  misc_feature: MA Experiment ID: 108573 Result: Up-regulated in Transcription
  misc_feature: MA Experiment 108573 PARAMETER Experiment Name: At_Drought_cDNA_P Parameter: Timepoint (hr) Value: 6
  misc_feature: MA Experiment 108573 PARAMETER Experiment Name: At_Drought_cDNA_P Parameter: Tissue Value: Aerial
  misc_feature: MA Experiment 108573 PARAMETER Experiment Name: At_Drought_cDNA_P Parameter: Treatment Value: Drought vs. No Drought
  misc_feature: MA Experiment ID: 108585 Result: Up-regulated in Transcription
  misc_feature: MA Experiment 108585 PARAMETER Experiment Name: At_5mM_NaNP_cDNA_P Parameter: Timepoint (hr) Value: 6
  misc_feature: MA Experiment 108585 PARAMETER Experiment Name: At_5mM_NaNP_cDNA_P Parameter: Tissue Value: Aerial
  misc_feature: MA Experiment 108585 PARAMETER Experiment Name: At_5mM_NaNP_cDNA_P Parameter: Treatment Value: null
  misc_feature: MA Experiment ID: 108594 Result: Down-regulated in Transcription
  misc_feature: MA Experiment 108594 PARAMETER Experiment Name: At_Ler-rhl_Root_cDNA_P Parameter: Plant Line Value: null
  misc_feature: MA Experiment ID: 108595 Result: Up-regulated in Transcription
  misc_feature: MA Experiment 108595 PARAMETER Experiment Name: At_Ler-pi_Ovule_cDNA_P Parameter: Plant Line Value: null
  misc_feature: MA Experiment ID: 108605 Result: Up-regulated in Transcription
  misc_feature: MA Experiment 108605 PARAMETER Experiment Name: At_100uM_ABA_cDNA_P Parameter: Timepoint (hr) Value: 6
  misc_feature: MA Experiment 108605 PARAMETER Experiment Name: At_100uM_ABA_cDNA_P Parameter: Tissue Value: Aerial
  misc_feature: MA Experiment 108605 PARAMETER Experiment Name: At_100uM_ABA_cDNA_P Parameter: Treatment Value: 100uM ABA vs. No Treatment
  misc_feature: MA Experiment ID: 108607 Result: Up-regulated in Transcription
  misc_feature: MA Experiment 108607 PARAMETER Experiment Name: At_100uM_ABA_cDNA_P Parameter: Timepoint (hr) Value: 4
  misc_feature: MA Experiment 108607 PARAMETER Experiment Name: At_100uM_ABA_cDNA_P Parameter: Tissue Value: Aerial
  misc_feature: MA Experiment 108607 PARAMETER Experiment Name: At_100uM_ABA_cDNA_P Parameter: Treatment Value: 100uM ABA vs. No Treatment
  misc_feature: MA Experiment ID: 108608 Result: Up-regulated in Transcription
  misc_feature: MA Experiment 108608 PARAMETER Experiment Name: At_100uM_ABA_cDNA_P Parameter: Timepoint (hr) Value: 1
  misc_feature: MA Experiment 108608 PARAMETER Experiment Name: At_100uM_ABA_cDNA_P Parameter: Tissue Value: Aerial
  misc_feature: MA Experiment 108608 PARAMETER Experiment Name: At_100uM_ABA_cDNA_P Parameter: Treatment Value: 100uM ABA vs. No Treatment
  misc_feature: MA Experiment ID: 108668 Result: Up-regulated in Transcription
  misc_feature: MA Experiment 108668 PARAMETER Experiment Name: At_2mM_SA_cDNA_P Parameter: Plant Line Value: WS
  misc_feature: MA Experiment 108668 PARAMETER Experiment Name: At_2mM_SA_cDNA_P Parameter: Timepoint (hr) Value: 6
  misc_feature: MA Experiment 108668 PARAMETER Experiment Name: At_2mM_SA_cDNA_P Parameter: Treatment Value: 2mM SA vs. No Treatment
  misc_feature: MA Experiment ID: 20000069 Result: Up-regulated in Transcription
  misc_feature: MA Experiment 20000069 PARAMETER Experiment Name: At_100uM_ABA_Mutants_cDNA_P Parameter: Plant Line Value: CS23
  misc_feature: MA Experiment 20000069 PARAMETER Experiment Name: At_100uM_ABA_Mutants_cDNA_P Parameter: Timepoint (hr) Value: 6
  misc_feature: MA Experiment 20000069 PARAMETER Experiment Name: At_100uM_ABA_Mutants_cDNA_P Parameter: Tissue Value: Aerial
  misc_feature: MA Experiment 20000069 PARAMETER Experiment Name: At_100uM_ABA_Mutants_cDNA_P Parameter: Treatment Value: 100uM ABA vs. No Treatment
  misc_feature: MA Experiment ID: 20000070 Result: Up-regulated in Transcription
  misc_feature: MA Experiment 20000070 PARAMETER Experiment Name: At_100uM_ABA_Mutants_cDNA_P Parameter: Plant Line Value: CS24
  misc_feature: MA Experiment 20000070 PARAMETER Experiment Name: At_100uM_ABA_Mutants_cDNA_P Parameter: Timepoint (hr) Value: 6
  misc_feature: MA Experiment 20000070 PARAMETER Experiment Name: At_100uM_ABA_Mutants_cDNA_P Parameter: Tissue Value: Aerial
  misc_feature: MA Experiment 20000070 PARAMETER Experiment Name: At_100uM_ABA_Mutants_cDNA_P Parameter: Treatment Value: 100uM ABA vs. No Treatment
  misc_feature: MA Experiment ID: 20000071 Result: Up-regulated in Transcription
  misc_feature: MA Experiment 20000071 PARAMETER Experiment Name: At_100uM_ABA_Mutants_cDNA_P Parameter: Plant Line Value: CS8104
  misc_feature: MA Experiment 20000071 PARAMETER Experiment Name: At_100uM_ABA_Mutants_cDNA_P Parameter: Timepoint (hr) Value: 6
  misc_feature: MA Experiment 20000071 PARAMETER Experiment Name: At_100uM_ABA_Mutants_cDNA_P Parameter: Tissue Value: Aerial
  misc_feature: MA Experiment 20000071 PARAMETER Experiment Name: At_100uM_ABA_Mutants_cDNA_P Parameter: Treatment Value: 100uM ABA vs. No Treatment
  misc_feature: MA Experiment ID: 20000072 Result: Up-regulated in Transcription
  misc_feature: MA Experiment 20000072 PARAMETER Experiment Name: At_100uM_ABA_Mutants_cDNA_P Parameter: Plant Line Value: CS8105
  misc_feature: MA Experiment 20000072 PARAMETER Experiment Name: At_100uM_ABA_Mutants_cDNA_P Parameter: Timepoint (hr) Value: 6
  misc_feature: MA Experiment 20000072 PARAMETER Experiment Name: At_100uM_ABA_Mutants_cDNA_P Parameter: Tissue Value: Aerial
  misc_feature: MA Experiment 20000072 PARAMETER Experiment Name: At_100uM_ABA_Mutants_cDNA_P Parameter: Treatment Value: 100uM ABA vs. No Treatment
  misc_feature: MA Experiment ID: 20000087 Result: Up-regulated in Transcription
  misc_feature: MA Experiment 20000087 PARAMETER Experiment Name: At_100uM_ABA_Mutants_cDNA_P Parameter: Plant Line Value: WS
  misc_feature: MA Experiment 20000087 PARAMETER Experiment Name: At_100uM_ABA_Mutants_cDNA_P Parameter: Timepoint (hr) Value: 6
  misc_feature: MA Experiment 20000087 PARAMETER Experiment Name: At_100uM_ABA_Mutants_cDNA_P Parameter: Tissue Value: Aerial
  misc_feature: MA Experiment 20000087 PARAMETER Experiment Name: At_100uM_ABA_Mutants_cDNA_P Parameter: Treatment Value: 100uM ABA vs. No Treatment
  misc_feature: MA Experiment ID: 20000089 Result: Down-regulated in Transcription
  misc_feature: MA Experiment ID: 20000111 Result: Up-regulated in Transcription
  misc_feature: MA Experiment 20000111 PARAMETER Experiment Name: At_42deg_Heat_cDNA_P Parameter: Temperature (deg C) Value: 42 vs. 22
  misc_feature: MA Experiment 20000111 PARAMETER Experiment Name: At_42deg_Heat_cDNA_P Parameter: Timepoint (hr) Value: 6
  misc_feature: MA Experiment 20000111 PARAMETER Experiment Name: At_42deg_Heat_cDNA_P Parameter: Tissue Value: Aerial
  misc_feature: MA Experiment ID: 20000113 Result: Up-regulated in Transcription
  misc_feature: MA Experiment 20000113 PARAMETER Experiment Name: At_42deg_Heat_cDNA_P Parameter: Temperature (deg C) Value: 42 vs. 22
  misc_feature: MA Experiment 20000113 PARAMETER Experiment Name: At_42deg_Heat_cDNA_P Parameter: Timepoint (hr) Value: 8
  misc_feature: MA Experiment 20000113 PARAMETER Experiment Name: At_42deg_Heat_cDNA_P Parameter: Tissue Value: Aerial
  misc_feature: MA Experiment ID: 20000117 Result: Up-regulated in Transcription
  misc_feature: MA Experiment 20000117 PARAMETER Experiment Name: At_100uM_ABA_Mutants_cDNA_P Parameter: Plant Line Value: Columbia
  misc_feature: MA Experiment 20000117 PARAMETER Experiment Name: At_100uM_ABA_Mutants_cDNA_P Parameter: Timepoint (hr) Value: 6
  misc_feature: MA Experiment 20000117 PARAMETER Experiment Name: At_100uM_ABA_Mutants_cDNA_P Parameter: Tissue Value: Aerial
  misc_feature: MA Experiment 20000117 PARAMETER Experiment Name: At_100uM_ABA_Mutants_cDNA_P Parameter: Treatment Value: 100uM ABA vs. No Treatment
  misc_feature: MA Experiment ID: 20000166 Result: Up-regulated in Transcription
  misc_feature: MA Experiment 20000166 PARAMETER Experiment Name: At_100uM_ABA_P Parameter: Age (day) Value: 14
  misc_feature: MA Experiment 20000166 PARAMETER Experiment Name: At_100uM_ABA_P Parameter: Organism Value: A. thaliana
  misc_feature: MA Experiment 20000166 PARAMETER Experiment Name: At_100uM_ABA_P Parameter: Plant Line Value: WS
  misc_feature: MA Experiment 20000166 PARAMETER Experiment Name: At_100uM_ABA_P Parameter: Timepoint (hr) Value: 1
  misc_feature: MA Experiment 20000166 PARAMETER Experiment Name: At_100uM_ABA_P Parameter: Tissue Value: Aerial
  misc_feature: MA Experiment 20000166 PARAMETER Experiment Name: At_100uM_ABA_P Parameter: Treatment Value: 100uM ABA vs. No Treatment
  misc_feature: MA Experiment ID: 20000169 Result: Up-regulated in Transcription
  misc_feature: MA Experiment 20000169 PARAMETER Experiment Name: At_100uM_ABA_P Parameter: Age (day) Value: 14
  misc_feature: MA Experiment 20000169 PARAMETER Experiment Name: At_100uM_ABA_P Parameter: Organism Value: A. thaliana
  misc_feature: MA Experiment 20000169 PARAMETER Experiment Name: At_100uM_ABA_P Parameter: Plant Line Value: WS
  misc_feature: MA Experiment 20000169 PARAMETER Experiment Name: At_100uM_ABA_P Parameter: Timepoint (hr) Value: 6
  misc_feature: MA Experiment 20000169 PARAMETER Experiment Name: At_100uM_ABA_P Parameter: Tissue Value: Aerial
  misc_feature: MA Experiment 20000169 PARAMETER Experiment Name: At_100uM_ABA_P Parameter: Treatment Value: 100uM ABA vs. No Treatment
  misc_feature: MA Experiment ID: 20000173 Result: Up-regulated in Transcription
  misc_feature: MA Experiment 20000173 PARAMETER Experiment Name: At_42deg_Heat_P Parameter: Age (day) Value: 14
  misc_feature: MA Experiment 20000173 PARAMETER Experiment Name: At_42deg_Heat_P Parameter: Organism Value: A. thaliana
  misc_feature: MA Experiment 20000173 PARAMETER Experiment Name: At_42deg_Heat_P Parameter: Plant Line Value: WS
  misc_feature: MA Experiment 20000173 PARAMETER Experiment Name: At_42deg_Heat_P Parameter: Temperature (deg C) Value: 42 vs. 22
  misc_feature: MA Experiment 20000173 PARAMETER Experiment Name: At_42deg_Heat_P Parameter: Timepoint (hr) Value: 6
  misc_feature: MA Experiment 20000173 PARAMETER Experiment Name: At_42deg_Heat_P Parameter: Tissue Value: Aerial
  misc_feature: MA Experiment ID: 20000182 Result: Up-regulated in Transcription
  misc_feature: MA Experiment 20000182 PARAMETER Experiment Name: At_2mM_SA_P Parameter: Age (day) Value: 14
  misc_feature: MA Experiment 20000182 PARAMETER Experiment Name: At_2mM_SA_P Parameter: Organism Value: A. thaliana
  misc_feature: MA Experiment 20000182 PARAMETER Experiment Name: At_2mM_SA_P Parameter: Plant Line Value: WS
  misc_feature: MA Experiment 20000182 PARAMETER Experiment Name: At_2mM_SA_P Parameter: Timepoint (hr) Value: 6
  misc_feature: MA Experiment 20000182 PARAMETER Experiment Name: At_2mM_SA_P Parameter: Tissue Value: Aerial
  misc_feature: MA Experiment 20000182 PARAMETER Experiment Name: At_2mM_SA_P Parameter: Treatment Value: 2mM SA vs. No Treatment
  misc_feature: MA Experiment ID: 20000184 Result: Down-regulated in Transcription
  misc_feature: MA Experiment 20000184 PARAMETER Experiment Name: At_Shoots__P Parameter: Age (day) Value: 7
  misc_feature: MA Experiment 20000184 PARAMETER Experiment Name: At_Shoots__P Parameter: Tissue Value: Shoots vs. Whole Plant
  misc_feature: MA Experiment ID: 20000227 Result: Down-regulated in Transcription
  misc_feature: MA Experiment 20000227 PARAMETER Experiment Name: At_Root-Tips-vs-Tops_P Parameter: Tissue Value: Root Tips vs. Root Tops
  misc_feature: MA Experiment ID: 20000234 Result: Down-regulated in Transcription
  misc_feature: MA Experiment 20000234 PARAMETER Experiment Name: At_Siliques_P Parameter: Age (day) Value: 21
  misc_feature: MA Experiment 20000234 PARAMETER Experiment Name: At_Siliques_P Parameter: Organism Value: A. thaliana
  misc_feature: MA Experiment 20000234 PARAMETER Experiment Name: At_Siliques_P Parameter: Plant Line Value: WS
  misc_feature: MA Experiment 20000234 PARAMETER Experiment Name: At_Siliques_P Parameter: Tissue Value: Less Than 5mm Siliques vs. Whole Plant
  misc_feature: MA Experiment ID: 20000235 Result: Down-regulated in Transcription
  misc_feature: MA Experiment 20000235 PARAMETER Experiment Name: At_Siliques_P Parameter: Age (day) Value: 21
  misc_feature: MA Experiment 20000235 PARAMETER Experiment Name: At_Siliques_P Parameter: Organism Value: A. thaliana
  misc_feature: MA Experiment 20000235 PARAMETER Experiment Name: At_Siliques_P Parameter: Plant Line Value: WS
  misc_feature: MA Experiment 20000235 PARAMETER Experiment Name: At_Siliques_P Parameter: Tissue Value: 5-10mm Siliques vs. Whole Plant
  misc_feature: MA Experiment ID: 20000265 Result: Down-regulated in Transcription
  misc_feature: MA Experiment 20000265 PARAMETER Experiment Name: At_Open_Flower_P Parameter: Age (day) Value: 21
  misc_feature: MA Experiment 20000265 PARAMETER Experiment Name: At_Open_Flower_P Parameter: Plant Line Value: WS
  misc_feature: MA Experiment 20000265 PARAMETER Experiment Name: At_Open_Flower_P Parameter: Tissue Value: Closed Flower vs. Whole Plant
  misc_feature: MA Experiment ID: 20000267 Result: Up-regulated in Transcription
  misc_feature: MA Experiment 20000267 PARAMETER Experiment Name: At_Drought_P Parameter: Age (day) Value: 7
  misc_feature: MA Experiment 20000267 PARAMETER Experiment Name: At_Drought_P Parameter: Organism Value: A. thaliana
  misc_feature: MA Experiment 20000267 PARAMETER Experiment Name: At_Drought_P Parameter: Plant Line Value: WS
  misc_feature: MA Experiment 20000267 PARAMETER Experiment Name: At_Drought_P Parameter: Timepoint (hr) Value: 6
  misc_feature: MA Experiment 20000267 PARAMETER Experiment Name: At_Drought_P Parameter: Tissue Value: Whole Plant
  misc_feature: MA Experiment 20000267 PARAMETER Experiment Name: At_Drought_P Parameter: Treatment Value: Drought vs. No Drought
  misc_feature: MA Experiment ID: 20000286 Result: Down-regulated in Transcription
  misc_feature: MA Experiment 20000286 PARAMETER Experiment Name: At_Open_Flower_P Parameter: Age (day) Value: 21
  misc_feature: MA Experiment 20000286 PARAMETER Experiment Name: At_Open_Flower_P Parameter: Plant Line Value: WS
  misc_feature: MA Experiment 20000286 PARAMETER Experiment Name: At_Open_Flower_P Parameter: Tissue Value: Half Open vs. Whole Plant
  misc_feature: MA Experiment ID: 20000436 Result: Up-regulated in Transcription
  misc_feature: MA Experiment 20000436 PARAMETER Experiment Name: At_Drought_P Parameter: Age (day) Value: 7
  misc_feature: MA Experiment 20000436 PARAMETER Experiment Name: At_Drought_P Parameter: Organism Value: A. thaliana
  misc_feature: MA Experiment 20000436 PARAMETER Experiment Name: At_Drought_P Parameter: Plant Line Value: WS
  misc_feature: MA Experiment 20000436 PARAMETER Experiment Name: At_Drought_P Parameter: Timepoint (hr) Value: 12
  misc_feature: MA Experiment 20000436 PARAMETER Experiment Name: At_Drought_P Parameter: Tissue Value: Whole Plant
  misc_feature: MA Experiment 20000436 PARAMETER Experiment Name: At_Drought_P Parameter: Treatment Value: Drought vs. No Drought
  misc_feature: MA Experiment ID: 20000437 Result: Up-regulated in Transcription
  misc_feature: MA Experiment 20000437 PARAMETER Experiment Name: At_Drought_P Parameter: Age (day) Value: 8
  misc_feature: MA Experiment 20000437 PARAMETER Experiment Name: At_Drought_P Parameter: Organism Value: A. thaliana
  misc_feature: MA Experiment 20000437 PARAMETER Experiment Name: At_Drought_P Parameter: Plant Line Value: WS
  misc_feature: MA Experiment 20000437 PARAMETER Experiment Name: At_Drought_P Parameter: Timepoint (hr) Value: 24
  misc_feature: MA Experiment 20000437 PARAMETER Experiment Name: At_Drought_P Parameter: Tissue Value: Whole Plant
  misc_feature: MA Experiment 20000437 PARAMETER Experiment Name: At_Drought_P Parameter: Treatment Value: Drought vs. No Drought
  misc_feature: MA Experiment ID: 20000438 Result: Down-regulated in Transcription
  misc_feature: MA Experiment 20000438 PARAMETER Experiment Name: At_Shoots__P Parameter: Age (day) Value: 14
  misc_feature: MA Experiment 20000438 PARAMETER Experiment Name: At_Shoots__P Parameter: Tissue Value: Shoots vs. Whole Plant
  misc_feature: MA Experiment ID: 20000439 Result: Down-regulated in Transcription
  misc_feature: MA Experiment 20000439 PARAMETER Experiment Name: At_Roots__P Parameter: Age (day) Value: 14 vs. 21
  misc_feature: MA Experiment 20000439 PARAMETER Experiment Name: At_Roots__P Parameter: Organism Value: A. thaliana
  misc_feature: MA Experiment 20000439 PARAMETER Experiment Name: At_Roots__P Parameter: Tissue Value: Roots vs. Whole Plant
  misc_feature: MA Experiment ID: 20000460 Result: Up-regulated in Transcription
  misc_feature: MA Experiment 20000460 PARAMETER Experiment Name: At_10percent_PEG_P Parameter: Age (day) Value: 12
  misc_feature: MA Experiment 20000460 PARAMETER Experiment Name: At_10percent_PEG_P Parameter: Organism Value: A. thaliana
  misc_feature: MA Experiment 20000460 PARAMETER Experiment Name: At_10percent_PEG_P Parameter: Plant Line Value: WS
  misc_feature: MA Experiment 20000460 PARAMETER Experiment Name: At_10percent_PEG_P Parameter: Timepoint (day) Value: 12
  misc_feature: MA Experiment 20000460 PARAMETER Experiment Name: At_10percent_PEG_P Parameter: Tissue Value: Whole Plant
  misc_feature: MA Experiment 20000460 PARAMETER Experiment Name: At_10percent_PEG_P Parameter: Treatment Value: 10percent PEG vs. No Treatment
  misc_feature: MA Experiment ID: 20000495 Result: Down-regulated in Transcription
  misc_feature: MA Experiment 20000495 PARAMETER Experiment Name: At_Guard_Cells_P Parameter: Harvest Date Value: 8/2/2002
  misc_feature: MA Experiment 20000495 PARAMETER Experiment Name: At_Guard_Cells_P Parameter: Organism Value: A. thaliana
  misc_feature: MA Experiment 20000495 PARAMETER Experiment Name: At_Guard_Cells_P Parameter: Tissue Value: Guard Cells vs. Leaves
  misc_feature: MA Experiment ID: 20000573 Result: Down-regulated in Transcription
  misc_feature: MA Experiment 20000573 PARAMETER Experiment Name: At_100uM_ABA_Mutants__P Parameter: Organism Value: A. thaliana
  misc_feature: MA Experiment 20000573 PARAMETER Experiment Name: At_100uM_ABA_Mutants__P Parameter: Plant Line Value: CS22 vs. Ler wt
  misc_feature: MA Experiment 20000573 PARAMETER Experiment Name: At_100uM_ABA_Mutants__P Parameter: Timepoint (hr) Value: N/A
  misc_feature: MA Experiment 20000573 PARAMETER Experiment Name: At_100uM_ABA_Mutants__P Parameter: Tissue Value: Whole Plant
  misc_feature: MA Experiment 20000573 PARAMETER Experiment Name: At_100uM_ABA_Mutants__P Parameter: Treatment Value: None
  misc_feature: MA Experiment ID: 20000574 Result: Down-regulated in Transcription
  misc_feature: MA Experiment 20000574 PARAMETER Experiment Name: At_100uM_ABA_Mutants__P Parameter: Organism Value: A. thaliana
  misc_feature: MA Experiment 20000574 PARAMETER Experiment Name: At_100uM_ABA_Mutants__P Parameter: Plant Line Value: CS23 vs. Ler wt
  misc_feature: MA Experiment 20000574 PARAMETER Experiment Name: At_100uM_ABA_Mutants__P Parameter: Timepoint (hr) Value: N/A
  misc_feature: MA Experiment 20000574 PARAMETER Experiment Name: At_100uM_ABA_Mutants__P Parameter: Tissue Value: Whole Plant
  misc_feature: MA Experiment 20000574 PARAMETER Experiment Name: At_100uM_ABA_Mutants__P Parameter: Treatment Value: None
  misc_feature: MA Experiment ID: 20000794 Result: Up-regulated in Transcription
  misc_feature: MA Experiment 20000794 PARAMETER Experiment Name: At_Petals_P Parameter: Age (day) Value: 23-25 days
  misc_feature: MA Experiment 20000794 PARAMETER Experiment Name: At_Petals_P Parameter: Plant Line Value: WS
  misc_feature: MA Experiment 20000794 PARAMETER Experiment Name: At_Petals_P Parameter: Tissue Value: Petals vs. Whole plant
  misc_feature: MA Experiment ID: 20001247 Result: Up-regulated in Transcription
  misc_feature: MA Experiment 20001247 PARAMETER Experiment Name: At_Far-red-induction_P Parameter: Age (day) Value: 7
  misc_feature: MA Experiment 20001247 PARAMETER Experiment Name: At_Far-red-induction_P Parameter: Light Value: Far-red vs. White
  misc_feature: MA Experiment 20001247 PARAMETER Experiment Name: At_Far-red-induction_P Parameter: Organism Value: A. thaliana
  misc_feature: MA Experiment 20001247 PARAMETER Experiment Name: At_Far-red-induction_P Parameter: Plant Line Value: Columbia
  misc_feature: MA Experiment 20001247 PARAMETER Experiment Name: At_Far-red-induction_P Parameter: Timepoint (hr) Value: 1
  misc_feature: MA Experiment 20001247 PARAMETER Experiment Name: At_Far-red-induction_P Parameter: Tissue Value: Whole Plant
  misc_feature: MA Experiment ID: 20001248 Result: Up-regulated in Transcription
  misc_feature: MA Experiment 20001248 PARAMETER Experiment Name: At_Far-red-induction_P Parameter: Age (day) Value: 7
  misc_feature: MA Experiment 20001248 PARAMETER Experiment Name: At_Far-red-induction_P Parameter: Light Value: Far-red vs. White
  misc_feature: MA Experiment 20001248 PARAMETER Experiment Name: At_Far-red-induction_P Parameter: Organism Value: A. thaliana
  misc_feature: MA Experiment 20001248 PARAMETER Experiment Name: At_Far-red-induction_P Parameter: Plant Line Value: Columbia
  misc_feature: MA Experiment 20001248 PARAMETER Experiment Name: At_Far-red-induction_P Parameter: Timepoint (hr) Value: 4
  misc_feature: MA Experiment 20001248 PARAMETER Experiment Name: At_Far-red-induction_P Parameter: Tissue Value: Whole Plant
  misc_feature: MA Experiment ID: 20001451 Result: Up-regulated in Transcription
  misc_feature: MA Experiment 20001451 PARAMETER Experiment Name: At_Far-red-induction_P Parameter: Age (day) Value: 7
  misc_feature: MA Experiment 20001451 PARAMETER Experiment Name: At_Far-red-induction_P Parameter: Light Value: Far-red vs. White
  misc_feature: MA Experiment 20001451 PARAMETER Experiment Name: At_Far-red-induction_P Parameter: Organism Value: A. thaliana
  misc_feature: MA Experiment 20001451 PARAMETER Experiment Name: At_Far-red-induction_P Parameter: Plant Line Value: Columbia
  misc_feature: MA Experiment 20001451 PARAMETER Experiment Name: At_Far-red-induction_P Parameter: Timepoint (hr) Value: 24
  misc_feature: MA Experiment 20001451 PARAMETER Experiment Name: At_Far-red-induction_P Parameter: Tissue Value: Whole Plant
  misc_feature: MA Experiment ID: 20001554 Result: Up-regulated in Transcription
  misc_feature: MA Experiment 20001554 PARAMETER Experiment Name: At_Drought_Soil_Dry_P Parameter: Age (day) Value: 21
  misc_feature: MA Experiment 20001554 PARAMETER Experiment Name: At_Drought_Soil_Dry_P Parameter: Organism Value: A. thaliana
  misc_feature: MA Experiment 20001554 PARAMETER Experiment Name: At_Drought_Soil_Dry_P Parameter: Plant Line Value: WS
  misc_feature: MA Experiment 20001554 PARAMETER Experiment Name: At_Drought_Soil_Dry_P Parameter: Post Timepoint (hr) Value: None
  misc_feature: MA Experiment 20001554 PARAMETER Experiment Name: At_Drought_Soil_Dry_P Parameter: Post-Treatment Value: None
  misc_feature: MA Experiment 20001554 PARAMETER Experiment Name: At_Drought_Soil_Dry_P Parameter: Timepoint (day) Value: 7
  misc_feature: MA Experiment 20001554 PARAMETER Experiment Name: At_Drought_Soil_Dry_P Parameter: Treatment Value: Drought vs. No Drought
  misc_feature: MA Experiment ID: 20001904 Result: Up-regulated in Transcription
  misc_feature: MA Experiment 20001904 PARAMETER Experiment Name: At_Drought_Reproduction_P Parameter: Age (day) Value: 37
  misc_feature: MA Experiment 20001904 PARAMETER Experiment Name: At_Drought_Reproduction_P Parameter: Organism Value: A. thaliana
  misc_feature: MA Experiment 20001904 PARAMETER Experiment Name: At_Drought_Reproduction_P Parameter: Plant Line Value: WS
  misc_feature: MA Experiment 20001904 PARAMETER Experiment Name: At_Drought_Reproduction_P Parameter: Timepoint (day) Value: 7
  misc_feature: MA Experiment 20001904 PARAMETER Experiment Name: At_Drought_Reproduction_P Parameter: Tissue Value: Rosettes
  misc_feature: MA Experiment 20001904 PARAMETER Experiment Name: At_Drought_Reproduction_P Parameter: Treatment Value: Drought vs. No Drought
  misc_feature: MA Experiment ID: 20001905 Result: Up-regulated in Transcription
  misc_feature: MA Experiment 20001905 PARAMETER Experiment Name: At_Drought_Reproduction_P Parameter: Age (day) Value: 40
  misc_feature: MA Experiment 20001905 PARAMETER Experiment Name: At_Drought_Reproduction_P Parameter: Organism Value: A. thaliana
  misc_feature: MA Experiment 20001905 PARAMETER Experiment Name: At_Drought_Reproduction_P Parameter: Plant Line Value: WS
  misc_feature: MA Experiment 20001905 PARAMETER Experiment Name: At_Drought_Reproduction_P Parameter: Timepoint (day) Value: 10
  misc_feature: MA Experiment 20001905 PARAMETER Experiment Name: At_Drought_Reproduction_P Parameter: Tissue Value: Rosettes
  misc_feature: MA Experiment 20001905 PARAMETER Experiment Name: At_Drought_Reproduction_P Parameter: Treatment Value: Drought vs. No Drought
  misc_feature: MA Experiment ID: 20001906 Result: Up-regulated in Transcription
  misc_feature: MA Experiment 20001906 PARAMETER Experiment Name: At_Drought_Reproduction_P Parameter: Age (day) Value: 35
  misc_feature: MA Experiment 20001906 PARAMETER Experiment Name: At_Drought_Reproduction_P Parameter: Organism Value: A. thaliana
  misc_feature: MA Experiment 20001906 PARAMETER Experiment Name: At_Drought_Reproduction_P Parameter: Plant Line Value: WS
  misc_feature: MA Experiment 20001906 PARAMETER Experiment Name: At_Drought_Reproduction_P Parameter: Timepoint (day) Value: 5
  misc_feature: MA Experiment 20001906 PARAMETER Experiment Name: At_Drought_Reproduction_P Parameter: Tissue Value: Siliques
  misc_feature: MA Experiment 20001906 PARAMETER Experiment Name: At_Drought_Reproduction_P Parameter: Treatment Value: Drought vs. No Drought
  misc_feature: MA Experiment ID: 20001908 Result: Up-regulated in Transcription
  misc_feature: MA Experiment 20001908 PARAMETER Experiment Name: At_Drought_Reproduction_P Parameter: Age (day) Value: 40
  misc_feature: MA Experiment 20001908 PARAMETER Experiment Name: At_Drought_Reproduction_P Parameter: Organism Value: A. thaliana
  misc_feature: MA Experiment 20001908 PARAMETER Experiment Name: At_Drought_Reproduction_P Parameter: Plant Line Value: WS
  misc_feature: MA Experiment 20001908 PARAMETER Experiment Name: At_Drought_Reproduction_P Parameter: Timepoint (day) Value: 10
  misc_feature: MA Experiment 20001908 PARAMETER Experiment Name: At_Drought_Reproduction_P Parameter: Tissue Value: Siliques
  misc_feature: MA Experiment 20001908 PARAMETER Experiment Name: At_Drought_Reproduction_P Parameter: Treatment Value: Drought vs. No Drought
  misc_feature: MA Experiment ID: 20001911 Result: Up-regulated in Transcription
  misc_feature: MA Experiment 20001911 PARAMETER Experiment Name: At_Drought_Reproduction_P Parameter: Age (day) Value: 40
  misc_feature: MA Experiment 20001911 PARAMETER Experiment Name: At_Drought_Reproduction_P Parameter: Organism Value: A. thaliana
  misc_feature: MA Experiment 20001911 PARAMETER Experiment Name: At_Drought_Reproduction_P Parameter: Plant Line Value: WS
  misc_feature: MA Experiment 20001911 PARAMETER Experiment Name: At_Drought_Reproduction_P Parameter: Timepoint (day) Value: 10
  misc_feature: MA Experiment 20001911 PARAMETER Experiment Name: At_Drought_Reproduction_P Parameter: Tissue Value: Flowers
  misc_feature: MA Experiment 20001911 PARAMETER Experiment Name: At_Drought_Reproduction_P Parameter: Treatment Value: Drought vs. No Drought
aagcacttcactctctaatttccttctctctatctctcaccatattcgcgattaaaaactctcaacttttctctcaaatttctgatcctttgatccaacagttagaagaagattcatctgatcatggccctcgaagcgatgaacactccaacttcttctttcaccagaatcgaaacgaaagaagatttgatgaacgacgccgttttcattgagccgtggcttaaacgcaaacgctccaaacgtcagcgttctcacagcccttcttcgtcttcttcctcaccgcctcgatctcgacccaaatcccagaatcaagatcttacggaagaagagtatctcgctctttgtctcctcatgctcgctaaagatcaaccgtcgcaaacgcgatttcatcaacagtcgcaatcgttaacgccgccgccagaatcaaagaaccttccgtacaagtgtaacgtctgtgaaaaagcgtttccttcctatcaggctttaggcggtcacaaagcaagtcaccgaatcaaaccaccaaccgtaatctcaacaaccgccgatgattcaacagctccgaccatctccatcgtcgccggagaaaaacatccgattgctgcctccggaaagatccacgagtgttcaatctgtcataaagtgtttccgacgggtcaagctttaggcggtcacaaacgttgtcactacgaaggcaacctcggcggcggaggaggaggaggaagcaaatcaatcagtcacagtggaagcgtgtcgagcacggtatcggaagaaaggagccaccgtggattcatcgatctaaacctaccggcgttacctgaactcagccttcatcacaatccaatcgtcgacgaagagatcttgagtccgttgaccggtaaaaaaccgcttttgttgaccgatcacgaccaagtcatcaagaaagaagatttatctttaaaaatctaatactcgactattaattcttgtgttttcattttcatttttttagttacaaatttttaattgttctgatttggattgaatattggtatattgttaggggttgatacaaaaatttgatgattgattaagtcagaatttcttatttattttggtaactaatctcttgatcagtccactctgtataaatattgcgtggcatt

SEQ ID NO: 104158 - protein, 273 aa, Arabidopsis thaliana; identical to SEQ ID NO: 37506
  peptide (1)..(273): Ceres Seq. ID no. 13614425
  misc_feature (165)..(187): Pfam Name: Zinc finger, C2H2 type Pfam Description: Zinc finger, C2H2 type
  misc_feature (1)..(273): Homolog of NCBI NO: 15230889 NR Description: zinc finger protein -related [Arabidopsis
  misc_feature (1)..(256): Homolog of NCBI NO: 439493 NR Description: zinc-finger protein [Petunia x hybrida]
  misc_feature (21)..(256): Homolog of NCBI NO: 7228329 NR Description: putative TFIIIA (or kruppel)-like zinc finger
  misc_feature (48)..(253): Homolog of NCBI NO: 15237692 NR Description: c2h2 zinc finger transcription factor -related thaliana] >gi|2511546|gb|AAB80922.1| putative c2h2 zinc finger
  misc_feature (48)..(253): Homolog of NCBI NO: 26452746 NR Description: putative C2H2 zinc finger transcription factor
  misc_feature (55)..(254): Homolog of NCBI NO: 6693033 NR Description: T22C5.18 [Arabidopsis thaliana]
  misc_feature (55)..(254): Homolog of NCBI NO: 15217692 NR Description: salt-tolerance zinc finger protein [Arabidopsis
  misc_feature (1)..(256): Homolog of NCBI NO: 33331578 NR Description: zinc finger protein [Capsicum annuum]
  misc_feature (55)..(254): Homolog of NCBI NO: 1418323 NR Description: zinc finger protein [Arabidopsis thaliana]
  misc_feature (46)..(257): Homolog of NCBI NO: 4666360 NR Description: zinc-finger protein 1 [Datisca glomerata]

SEQ ID NO: 104159 - protein, 268 aa, Arabidopsis thaliana; identical to SEQ ID NO: 37507
  peptide (1)..(268): Ceres Seq. ID no. 13614426
  misc_feature (160)..(182): Pfam Name: Zinc finger, C2H2 type Pfam Description: Zinc finger, C2H2 type
  misc_feature (1)..(268): Homolog of NCBI NO: 15230889 NR Description: zinc finger protein -related [Arabidopsis
  misc_feature (1)..(251): Homolog of NCBI NO: 439493 NR Description: zinc-finger protein [Petunia x hybrida]
  misc_feature (16)..(251): Homolog of NCBI NO: 7228329 NR Description: putative TFIIIA (or kruppel)-like zinc finger
  misc_feature (43)..(248): Homolog of NCBI NO: 15237692 NR Description: c2h2 zinc finger transcription factor -related thaliana] >gi|2511546|gb|AAB80922.1| putative c2h2 zinc finger
  misc_feature (43)..(248): Homolog of NCBI NO: 26452746 NR Description: putative C2H2 zinc finger transcription factor
  misc_feature (50)..(249): Homolog of NCBI NO: 6693033 NR Description: T22C5.18 [Arabidopsis thaliana]
  misc_feature (50)..(249): Homolog of NCBI NO: 15217692 NR Description: salt-tolerance zinc finger protein [Arabidopsis
  misc_feature (1)..(251): Homolog of NCBI NO: 33331578 NR Description: zinc finger protein [Capsicum annuum]
  misc_feature (50)..(249): Homolog of NCBI NO: 1418323 NR Description: zinc finger protein [Arabidopsis thaliana]
  misc_feature (41)..(252): Homolog of NCBI NO: 4666360 NR Description: zinc-finger protein 1 [Datisca glomerata]

SEQ ID NO: 104160 - protein, 251 aa, Arabidopsis thaliana; identical to SEQ ID NO: 37508
  peptide (1)..(251): Ceres Seq. ID no. 13614427
  misc_feature (143)..(165): Pfam Name: Zinc finger, C2H2 type Pfam Description: Zinc finger, C2H2 type
  misc_feature (1)..(251): Homolog of NCBI NO: 15230889 NR Description: zinc finger protein -related [Arabidopsis
  misc_feature (1)..(234): Homolog of NCBI NO: 439493 NR Description: zinc-finger protein [Petunia x hybrida]
  misc_feature (1)..(234): Homolog of NCBI NO: 7228329 NR Description: putative TFIIIA (or kruppel)-like zinc finger
  misc_feature (26)..(231): Homolog of NCBI NO: 15237692 NR Description: c2h2 zinc finger transcription factor -related thaliana] >gi|2511546|gb|AAB80922.1| putative c2h2 zinc finger
  misc_feature (26)..(231): Homolog of NCBI NO: 26452746 NR Description: putative C2H2 zinc finger transcription factor
  misc_feature (33)..(232): Homolog of NCBI NO: 6693033 NR Description: T22C5.18 [Arabidopsis thaliana]
  misc_feature (33)..(232): Homolog of NCBI NO: 15217692 NR Description: salt-tolerance zinc finger protein [Arabidopsis
  misc_feature (1)..(234): Homolog of NCBI NO: 33331578 NR Description: zinc finger protein [Capsicum annuum]
  misc_feature (33)..(232): Homolog of NCBI NO: 1418323 NR Description: zinc finger protein [Arabidopsis thaliana]
  misc_feature (24)..(235): Homolog of NCBI NO: 4666360 NR Description: zinc-finger protein 1 [Datisca glomerata]

SEQ ID NO: 104161 - DNA, 1302 bp, Arabidopsis thaliana
  misc_feature (1)..(1302): Ceres Seq. ID no. 13614434
  misc_feature: MA Experiment ID: 108434 Result: Down-regulated in Transcription
  misc_feature: MA Experiment 108434 PARAMETER Experiment Name: At_Root_Tips_cDNA_P Parameter: Tissue Value: Root Tips
  misc_feature: MA Experiment ID: 108435 Result: Up-regulated in Transcription
  misc_feature: MA Experiment 108435 PARAMETER Experiment Name: At_stm_Mutants_cDNA_P Parameter: Plant Line Value: wt Landsburg vs stm
  misc_feature: MA Experiment 108435 PARAMETER Experiment Name: At_stm_Mutants_cDNA_P Parameter: Tissue Value: Shoot Apical Meristem Region
  misc_feature: MA Experiment ID: 108464 Result: Up-regulated in Transcription
  misc_feature: MA Experiment 108464 PARAMETER Experiment Name: At_Germinating_Seeds_cDNA_P Parameter: Age (day) Value: 4 vs. 0
  misc_feature: MA Experiment 108464 PARAMETER Experiment Name: At_Germinating_Seeds_cDNA_P Parameter: Tissue Value: Germinating Seeds
  misc_feature: MA Experiment ID: 108469 Result: Down-regulated in Transcription
  misc_feature: MA Experiment ID: 108488 Result: Up-regulated in Transcription
  misc_feature: MA Experiment ID: 108569 Result: Up-regulated in Transcription
  misc_feature: MA Experiment 108569 PARAMETER Experiment Name: At_0.001%_MeJA__cDNA_P Parameter: Timepoint (hr) Value: 6
  misc_feature: MA Experiment 108569 PARAMETER Experiment Name: At_0.001%_MeJA__cDNA_P Parameter: Tissue Value: Aerial
  misc_feature: MA Experiment 108569 PARAMETER Experiment Name: At_0.001%_MeJA__cDNA_P Parameter: Treatment Value: 0.001% MeJA vs. No Treatment
  misc_feature: MA Experiment ID: 108572 Result: Up-regulated in Transcription
  misc_feature: MA Experiment 108572 PARAMETER Experiment Name: At_Drought_cDNA_P Parameter: Timepoint (hr) Value: 1
  misc_feature: MA Experiment 108572 PARAMETER Experiment Name: At_Drought_cDNA_P Parameter: Tissue Value: Aerial
  misc_feature: MA Experiment 108572 PARAMETER Experiment Name: At_Drought_cDNA_P Parameter: Treatment Value: Drought vs. No Drought
  misc_feature: MA Experiment ID: 108577 Result: Down-regulated in Transcription
  misc_feature: MA Experiment 108577 PARAMETER Experiment Name: At_42deg_Heat_cDNA_P Parameter: Temperature (deg C) Value: 42 vs. 22
  misc_feature: MA Experiment 108577 PARAMETER Experiment Name: At_42deg_Heat_cDNA_P Parameter: Timepoint (hr) Value: 6
  misc_feature: MA Experiment 108577 PARAMETER Experiment Name: At_42deg_Heat_cDNA_P Parameter: Tissue Value: Aerial
  misc_feature: MA Experiment ID: 108579 Result: Up-regulated in Transcription
  misc_feature: MA Experiment 108579 PARAMETER Experiment Name: At_4deg_Cold_cDNA_P Parameter: Temperature (deg C) Value: 4 vs. 22
  misc_feature: MA Experiment 108579 PARAMETER Experiment Name: At_4deg_Cold_cDNA_P Parameter: Timepoint (hr) Value: 6
  misc_feature: MA Experiment 108579 PARAMETER Experiment Name: At_4deg_Cold_cDNA_P Parameter: Tissue Value: Aerial
  misc_feature: MA Experiment ID: 108595 Result: Down-regulated in Transcription
  misc_feature: MA Experiment 108595 PARAMETER Experiment Name: At_Ler-pi_Ovule_cDNA_P Parameter: Plant Line Value: null
  misc_feature: MA Experiment ID: 108668 Result: Down-regulated in Transcription
  misc_feature: MA Experiment 108668 PARAMETER Experiment Name: At_2mM_SA_cDNA_P Parameter: Plant Line Value: WS
  misc_feature: MA Experiment 108668 PARAMETER Experiment Name: At_2mM_SA_cDNA_P Parameter: Timepoint (hr) Value: 6
  misc_feature: MA Experiment 108668 PARAMETER Experiment Name: At_2mM_SA_cDNA_P Parameter: Treatment Value: 2mM SA vs. No Treatment
  misc_feature: MA Experiment ID: 20000090 Result: Down-regulated in Transcription
  misc_feature: MA Experiment ID: 20000113 Result: Down-regulated in Transcription
  misc_feature: MA Experiment 20000113 PARAMETER Experiment Name: At_42deg_Heat_cDNA_P Parameter: Temperature (deg C) Value: 42 vs. 22
  misc_feature: MA Experiment 20000113 PARAMETER Experiment Name: At_42deg_Heat_cDNA_P Parameter: Timepoint (hr) Value: 8
  misc_feature: MA Experiment 20000113 PARAMETER Experiment Name: At_42deg_Heat_cDNA_P Parameter: Tissue Value: Aerial
  misc_feature: MA Experiment ID: 20000182 Result: Down-regulated in Transcription
  misc_feature: MA Experiment 20000182 PARAMETER Experiment Name: At_2mM_SA_P Parameter: Age (day) Value: 14
  misc_feature: MA Experiment 20000182 PARAMETER Experiment Name: At_2mM_SA_P Parameter: Organism Value: A. thaliana
  misc_feature: MA Experiment 20000182 PARAMETER Experiment Name: At_2mM_SA_P Parameter: Plant Line Value: WS
  misc_feature: MA Experiment 20000182 PARAMETER Experiment Name: At_2mM_SA_P Parameter: Timepoint (hr) Value: 6
  misc_feature: MA Experiment 20000182 PARAMETER Experiment Name: At_2mM_SA_P Parameter: Tissue Value: Aerial
  misc_feature: MA Experiment 20000182 PARAMETER Experiment Name: At_2mM_SA_P Parameter: Treatment Value: 2mM SA vs. No Treatment
  misc_feature: MA Experiment ID: 20000234 Result: Down-regulated in Transcription
  misc_feature: MA Experiment 20000234 PARAMETER Experiment Name: At_Siliques_P Parameter: Age (day) Value: 21
  misc_feature: MA Experiment 20000234 PARAMETER Experiment Name: At_Siliques_P Parameter: Organism Value: A. thaliana
  misc_feature: MA Experiment 20000234 PARAMETER Experiment Name: At_Siliques_P Parameter: Plant Line Value: WS
  misc_feature: MA Experiment 20000234 PARAMETER Experiment Name: At_Siliques_P Parameter: Tissue Value: Less Than 5mm Siliques vs. Whole Plant
  misc_feature: MA Experiment ID: 20000264 Result: Down-regulated in Transcription
  misc_feature: MA Experiment 20000264 PARAMETER Experiment Name: At_Open_Flower_P Parameter: Age (day) Value: 21
  misc_feature: MA Experiment 20000264 PARAMETER Experiment Name: At_Open_Flower_P Parameter: Plant Line Value: WS
  misc_feature: MA Experiment 20000264 PARAMETER Experiment Name: At_Open_Flower_P Parameter: Tissue Value: Open Flower vs. Whole Plant
  misc_feature: MA Experiment ID: 20000265 Result: Down-regulated in Transcription
  misc_feature: MA Experiment 20000265 PARAMETER Experiment Name: At_Open_Flower_P Parameter: Age (day) Value: 21
  misc_feature: MA Experiment 20000265 PARAMETER Experiment Name: At_Open_Flower_P Parameter: Plant Line Value: WS
  misc_feature: MA Experiment 20000265 PARAMETER Experiment Name: At_Open_Flower_P Parameter: Tissue Value: Closed Flower vs. Whole Plant
  misc_feature: MA Experiment ID: 20000269 Result: Up-regulated in Transcription
  misc_feature: MA Experiment 20000269 PARAMETER Experiment Name: At_1mM_KNO3_L-vs-H_Roots_P Parameter: Age (day) Value: 7,10,12
  misc_feature: MA Experiment 20000269 PARAMETER Experiment Name: At_1mM_KNO3_L-vs-H_Roots_P Parameter: Organism Value: A. thaliana
  misc_feature: MA Experiment 20000269 PARAMETER Experiment Name: At_1mM_KNO3_L-vs-H_Roots_P Parameter: Plant Line Value: WS
  misc_feature: MA Experiment 20000269 PARAMETER Experiment Name: At_1mM_KNO3_L-vs-H_Roots_P Parameter: Timepoint (day) Value: 7,10,12
  misc_feature: MA Experiment 20000269 PARAMETER Experiment Name: At_1mM_KNO3_L-vs-H_Roots_P Parameter: Tissue Value: Roots
  misc_feature: MA Experiment 20000269 PARAMETER Experiment Name: At_1mM_KNO3_L-vs-H_Roots_P Parameter: Treatment Value: 1mM KNO3 vs. 50mM KNO3
  misc_feature: MA Experiment ID: 20000286 Result: Down-regulated in Transcription
  misc_feature: MA Experiment 20000286 PARAMETER Experiment Name: At_Open_Flower_P Parameter: Age (day) Value: 21
  misc_feature: MA Experiment 20000286 PARAMETER Experiment Name: At_Open_Flower_P Parameter: Plant Line Value: WS
  misc_feature: MA Experiment 20000286 PARAMETER Experiment Name: At_Open_Flower_P Parameter: Tissue Value: Half Open vs. Whole Plant
  misc_feature: MA Experiment ID: 20000436 Result: Down-regulated in Transcription
  misc_feature: MA Experiment 20000436 PARAMETER Experiment Name: At_Drought_P Parameter: Age (day) Value: 7
  misc_feature: MA Experiment 20000436 PARAMETER Experiment Name: At_Drought_P Parameter: Organism Value: A. thaliana
  misc_feature: MA Experiment 20000436 PARAMETER Experiment Name: At_Drought_P Parameter: Plant Line Value: WS
  misc_feature: MA Experiment 20000436 PARAMETER Experiment Name: At_Drought_P Parameter: Timepoint (hr) Value: 12
  misc_feature: MA Experiment 20000436 PARAMETER Experiment Name: At_Drought_P Parameter: Tissue Value: Whole Plant
  misc_feature: MA Experiment 20000436 PARAMETER Experiment Name: At_Drought_P Parameter: Treatment Value: Drought vs. No Drought
  misc_feature: MA Experiment ID: 20000437 Result: Down-regulated in Transcription
  misc_feature: MA Experiment 20000437 PARAMETER Experiment Name: At_Drought_P Parameter: Age (day) Value: 8
  misc_feature: MA Experiment 20000437 PARAMETER Experiment Name: At_Drought_P Parameter: Organism Value: A. thaliana
  misc_feature: MA Experiment 20000437 PARAMETER Experiment Name: At_Drought_P Parameter: Plant Line Value: WS
  misc_feature: MA Experiment 20000437 PARAMETER Experiment Name: At_Drought_P Parameter: Timepoint (hr) Value: 24
  misc_feature: MA Experiment 20000437 PARAMETER Experiment Name: At_Drought_P Parameter: Tissue Value: Whole Plant
  misc_feature: MA Experiment 20000437 PARAMETER Experiment Name: At_Drought_P Parameter: Treatment Value: Drought vs. No Drought
  misc_feature: MA Experiment ID: 20000439 Result: Down-regulated in Transcription
  misc_feature: MA Experiment 20000439 PARAMETER Experiment Name: At_Roots__P Parameter: Age (day) Value: 14 vs. 21
  misc_feature: MA Experiment 20000439 PARAMETER Experiment Name: At_Roots__P Parameter: Organism Value: A. thaliana
  misc_feature: MA Experiment 20000439 PARAMETER Experiment Name: At_Roots__P Parameter: Tissue Value: Roots vs. Whole Plant
  misc_feature: MA Experiment ID: 20000445 Result: Down-regulated in Transcription
  misc_feature: MA Experiment 20000445 PARAMETER Experiment Name: At_100uM_NAA__P Parameter: Age (day) Value: 14
  misc_feature: MA Experiment 20000445 PARAMETER Experiment Name: At_100uM_NAA__P Parameter: Organism Value: A. thaliana
  misc_feature: MA Experiment 20000445 PARAMETER Experiment Name: At_100uM_NAA__P Parameter: Plant Line Value: WS
  misc_feature: MA Experiment 20000445 PARAMETER Experiment Name: At_100uM_NAA__P Parameter: Timepoint (hr) Value: 6
  misc_feature: MA Experiment 20000445 PARAMETER Experiment Name: At_100uM_NAA__P Parameter: Tissue Value: Aerial
  misc_feature: MA Experiment 20000445 PARAMETER Experiment Name: At_100uM_NAA__P Parameter: Treatment Value: 100uM NAA vs. No Treatment
  misc_feature: MA Experiment ID: 20000451 Result: Up-regulated in Transcription
  misc_feature: MA Experiment 20000451 PARAMETER Experiment Name: At_CS6879_Shoots-Roots_P Parameter: Age (day) Value: 14
  misc_feature: MA Experiment 20000451 PARAMETER Experiment Name: At_CS6879_Shoots-Roots_P Parameter: Organism Value: A. thaliana
  misc_feature: MA Experiment 20000451 PARAMETER Experiment Name: At_CS6879_Shoots-Roots_P Parameter: Plant Line Value: CS6879 vs. WS
  misc_feature: MA Experiment 20000451 PARAMETER Experiment Name: At_CS6879_Shoots-Roots_P Parameter: Tissue Value: Roots
  misc_feature: MA Experiment ID: 20000527 Result: Up-regulated in Transcription
  misc_feature: MA Experiment 20000527 PARAMETER Experiment Name: At_10percent_PEG_P Parameter: Age (day) Value: 20
  misc_feature: MA Experiment 20000527 PARAMETER Experiment Name: At_10percent_PEG_P Parameter: Organism Value: A. thaliana
  misc_feature: MA Experiment 20000527 PARAMETER Experiment Name: At_10percent_PEG_P Parameter: Plant Line Value: WS
  misc_feature: MA Experiment 20000527 PARAMETER Experiment Name: At_10percent_PEG_P Parameter: Timepoint (day) Value: 20
  misc_feature: MA Experiment 20000527 PARAMETER Experiment Name: At_10percent_PEG_P Parameter: Tissue Value: Whole Plant
  misc_feature: MA Experiment 20000527 PARAMETER Experiment Name: At_10percent_PEG_P Parameter: Treatment Value: 10percent PEG vs. No Treatment
  misc_feature: MA Experiment ID: 20000794 Result: Down-regulated in Transcription
  misc_feature: MA Experiment 20000794 PARAMETER Experiment Name: At_Petals_P Parameter: Age (day) Value: 23-25 days
  misc_feature: MA Experiment 20000794 PARAMETER Experiment Name: At_Petals_P Parameter: Plant Line Value: WS
  misc_feature: MA Experiment 20000794 PARAMETER Experiment Name: At_Petals_P Parameter: Tissue Value: Petals vs. Whole plant
  misc_feature: MA Experiment ID: 20001248 Result: Down-regulated in Transcription
  misc_feature: MA Experiment 20001248 PARAMETER Experiment Name: At_Far-red-induction_P Parameter: Age (day) Value: 7
  misc_feature: MA Experiment 20001248 PARAMETER Experiment Name: At_Far-red-induction_P Parameter: Light Value: Far-red vs. White
  misc_feature: MA Experiment 20001248 PARAMETER Experiment Name: At_Far-red-induction_P Parameter: Organism Value: A. thaliana
  misc_feature: MA Experiment 20001248 PARAMETER Experiment Name: At_Far-red-induction_P Parameter: Plant Line Value: Columbia
  misc_feature: MA Experiment 20001248 PARAMETER Experiment Name: At_Far-red-induction_P Parameter: Timepoint (hr) Value: 4
  misc_feature: MA Experiment 20001248 PARAMETER Experiment Name: At_Far-red-induction_P Parameter: Tissue Value: Whole Plant
  misc_feature: MA Experiment ID: 20001450 Result: Down-regulated in Transcription
  misc_feature: MA Experiment 20001450 PARAMETER Experiment Name: At_Far-red-induction_P Parameter: Age (day) Value: 7
  misc_feature: MA Experiment 20001450 PARAMETER Experiment Name: At_Far-red-induction_P Parameter: Light Value: Far-red vs. White
  misc_feature: MA Experiment 20001450 PARAMETER Experiment Name: At_Far-red-induction_P Parameter: Organism Value: A. thaliana
  misc_feature: MA Experiment 20001450 PARAMETER Experiment Name: At_Far-red-induction_P Parameter: Plant Line Value: Columbia
  misc_feature: MA Experiment 20001450 PARAMETER Experiment Name: At_Far-red-induction_P Parameter: Timepoint (hr) Value: 8
  misc_feature: MA Experiment 20001450 PARAMETER Experiment Name: At_Far-red-induction_P Parameter: Tissue Value: Whole Plant
  misc_feature: MA Experiment ID: 20001451 Result: Down-regulated in Transcription
  misc_feature: MA Experiment 20001451 PARAMETER Experiment Name: At_Far-red-induction_P Parameter: Age (day) Value: 7
  misc_feature: MA Experiment 20001451 PARAMETER Experiment Name: At_Far-red-induction_P Parameter: Light Value: Far-red vs. White
  misc_feature: MA Experiment 20001451 PARAMETER Experiment Name: At_Far-red-induction_P Parameter: Organism Value: A. thaliana
  misc_feature: MA Experiment 20001451 PARAMETER Experiment Name: At_Far-red-induction_P Parameter: Plant Line Value: Columbia
  misc_feature: MA Experiment 20001451 PARAMETER Experiment Name: At_Far-red-induction_P Parameter: Timepoint (hr) Value: 24
  misc_feature: MA Experiment 20001451 PARAMETER Experiment Name: At_Far-red-induction_P Parameter: Tissue Value: Whole Plant
  misc_feature: MA Experiment ID: 20001555 Result: Up-regulated in Transcription
  misc_feature: MA Experiment 20001555 PARAMETER Experiment Name: At_Drought_Soil_Dry_P Parameter: Age (day) Value: 24
  misc_feature: MA Experiment 20001555 PARAMETER Experiment Name: At_Drought_Soil_Dry_P Parameter: Organism Value: A. thaliana
  misc_feature: MA Experiment 20001555 PARAMETER Experiment Name: At_Drought_Soil_Dry_P Parameter: Plant Line Value: WS
  misc_feature: MA Experiment 20001555 PARAMETER Experiment Name: At_Drought_Soil_Dry_P Parameter: Post Timepoint (hr) Value: None
  misc_feature: MA Experiment 20001555 PARAMETER Experiment Name: At_Drought_Soil_Dry_P Parameter: Post-Treatment Value: None
  misc_feature: MA Experiment 20001555 PARAMETER Experiment Name: At_Drought_Soil_Dry_P Parameter: Timepoint (day) Value: 10
  misc_feature: MA Experiment 20001555 PARAMETER Experiment Name: At_Drought_Soil_Dry_P Parameter: Treatment Value: Drought vs. No Drought
  misc_feature: MA Experiment ID: 20001558 Result: Down-regulated in Transcription
  misc_feature: MA Experiment 20001558 PARAMETER Experiment Name: At_Drought_Soil_Dry_P Parameter: Age (day) Value: 27
  misc_feature: MA Experiment 20001558 PARAMETER Experiment Name: At_Drought_Soil_Dry_P Parameter: Organism Value: A. thaliana
  misc_feature: MA Experiment 20001558 PARAMETER Experiment Name: At_Drought_Soil_Dry_P Parameter: Plant Line Value: WS
  misc_feature: MA Experiment 20001558 PARAMETER Experiment Name: At_Drought_Soil_Dry_P Parameter: Post Timepoint (hr) Value: 6
  misc_feature: MA Experiment 20001558 PARAMETER Experiment Name: At_Drought_Soil_Dry_P Parameter: Post-Treatment Value: Re-Water vs. No Drought
  misc_feature: MA Experiment 20001558 PARAMETER Experiment Name: At_Drought_Soil_Dry_P Parameter: Timepoint (day) Value: 13
  misc_feature: MA Experiment 20001558 PARAMETER Experiment Name: At_Drought_Soil_Dry_P Parameter: Treatment Value: Drought vs. No Drought
  misc_feature: MA Experiment ID: 20001756 Result: Up-regulated in Transcription
  misc_feature: MA Experiment 20001756 PARAMETER Experiment Name: At_50mM_NH4NO3_L-to-H_P Parameter: Timepoint (hr) Value: 4
  misc_feature: MA Experiment 20001756 PARAMETER Experiment Name: At_50mM_NH4NO3_L-to-H_P Parameter: Tissue Value: Leaf
  misc_feature: MA Experiment 20001756 PARAMETER Experiment Name: At_50mM_NH4NO3_L-to-H_P Parameter: Treatment Value: 50mM NH4NO3 vs 100mM Mannitol
  misc_feature: MA Experiment ID: 20001757 Result: Up-regulated in Transcription
  misc_feature: MA Experiment 20001757 PARAMETER Experiment Name: At_50mM_NH4NO3_L-to-H_P Parameter: Timepoint (hr) Value: 6
  misc_feature: MA Experiment 20001757 PARAMETER Experiment Name: At_50mM_NH4NO3_L-to-H_P Parameter: Tissue Value: Leaf
  misc_feature: MA Experiment 20001757 PARAMETER Experiment Name: At_50mM_NH4NO3_L-to-H_P Parameter: Treatment Value: 50mM NH4NO3 vs 100mM Mannitol
  misc_feature: MA Experiment ID: 20001905 Result: Down-regulated in Transcription
  misc_feature: MA Experiment 20001905 PARAMETER Experiment Name: At_Drought_Reproduction_P Parameter: Age (day) Value: 40
  misc_feature: MA Experiment 20001905 PARAMETER Experiment Name: At_Drought_Reproduction_P Parameter: Organism Value: A. thaliana
  misc_feature: MA Experiment 20001905 PARAMETER Experiment Name: At_Drought_Reproduction_P Parameter: Plant Line Value: WS
  misc_feature: MA Experiment 20001905 PARAMETER Experiment Name: At_Drought_Reproduction_P Parameter: Timepoint (day) Value: 10
  misc_feature: MA Experiment 20001905 PARAMETER Experiment Name: At_Drought_Reproduction_P Parameter: Tissue Value: Rosettes
  misc_feature: MA Experiment 20001905 PARAMETER Experiment Name: At_Drought_Reproduction_P Parameter: Treatment Value: Drought vs. No Drought
  misc_feature: MA Experiment ID: 20001910 Result: Down-regulated in Transcription
  misc_feature: MA Experiment 20001910 PARAMETER Experiment Name: At_Drought_Reproduction_P Parameter: Age (day) Value: 37
  misc_feature: MA Experiment 20001910 PARAMETER Experiment Name: At_Drought_Reproduction_P Parameter: Organism Value: A. thaliana
  misc_feature: MA Experiment 20001910 PARAMETER Experiment Name: At_Drought_Reproduction_P Parameter: Plant Line Value: WS
  misc_feature: MA Experiment 20001910 PARAMETER Experiment Name: At_Drought_Reproduction_P Parameter: Timepoint (day) Value: 7
  misc_feature: MA Experiment 20001910 PARAMETER Experiment Name: At_Drought_Reproduction_P Parameter: Tissue Value: Flowers
  misc_feature: MA Experiment 20001910 PARAMETER Experiment Name: At_Drought_Reproduction_P Parameter: Treatment Value: Drought vs. No Drought
  misc_feature: MA Experiment ID: 20001911 Result: Down-regulated in Transcription
  misc_feature: MA Experiment 20001911 PARAMETER Experiment Name: At_Drought_Reproduction_P Parameter: Age (day) Value: 40
  misc_feature: MA Experiment 20001911 PARAMETER Experiment Name: At_Drought_Reproduction_P Parameter: Organism Value: A. thaliana
  misc_feature: MA Experiment 20001911 PARAMETER Experiment Name: At_Drought_Reproduction_P Parameter: Plant Line Value: WS
  misc_feature: MA Experiment 20001911 PARAMETER Experiment Name: At_Drought_Reproduction_P Parameter: Timepoint (day) Value: 10
  misc_feature: MA Experiment 20001911 PARAMETER Experiment Name: At_Drought_Reproduction_P Parameter: Tissue Value: Flowers
  misc_feature: MA Experiment 20001911 PARAMETER Experiment Name: At_Drought_Reproduction_P Parameter: Treatment Value: Drought vs. No Drought
aactcaagtttcttgcaattacctacttacaacaaagcaactcgactcgaacaaacacatccatggctccttctgcgcaacctcttcctgtgagtgtttcggatgaaaaatatgcgaatgtcaagtgggaagagttggcattcaagtttgttcgtacggattatatgtatgttgcgaagtgcaatcatggagagagttttcaagaggggaagattcttccttttgctgatttgcaacttaacccttgcgctgctgttcttcagtatggccagggtttatatgaaggactgaaagcttacaggacagaagatggtcggattctgctattccgaccagaccaaaacggtctccgccttcaagccggagctgacagactctatatgccttatccttcggtcgatcaattcgtctccgccatcaaacaagttgctcttgccaacaagaaatggattcctcctccggggaaaggaacattgtatattaggcctatcttgtttgggagtggtccgattcttggttcatttcccattcctgagaccaccttcacagcttttgcctgtcctgttggacgttatcataaggataactctggtttgaatctgaaaatcgaagatcagtttcgtcgagcttttcctagtggaactggtggtgtgaagagcatcacaaactattgtcctgtttggataccattggcagaggcgaaaaaacaaggtttctctgatattttgtttttggatgctgcaactggcaaaaacattgaagaacttttcgcagctaatgtttttatgctcaagggcaatgttgtatcgacaccaacaattgcaggaactattttgcccggagtcactcgaaactgcgtaatggaattgtgtcgtgatttcggctaccaggtcgaggaacgtacgattcctctagtggactttctcgatgcggacgaagctttctgtactggcactgcttccattgtgactagtattgcatccgtaacctttaaagacaaaaagaccggattcaaaacaggggaagaaacattggctgcgaagctatacgagacgttaagtgatatccagacgggtcgggtcgaggataccaagggatggacggtggagattgaccgccagggctgaaagttgaaactgtaacttgatgctaaatatgtgtgtgtgtgtatacaaaacttatgtaagaaacatctgaagatgtctctgatctttgtgattgtgatgatcatgcatgtcctatcgttgcgatgtattttataaatgttcgtctgtaagttatttaataactatggctttttgc

SEQ ID NO: 104162 - protein, 374 aa, Arabidopsis thaliana
  peptide (1)..(374): Ceres Seq. ID no. 13614435
  misc_feature (68)..(353): Pfam Name: Aminotransferase class IV Pfam Description: Aminotransferase class IV
  misc_feature (21)..(374): Homolog of NCBI NO: 15230923 NR Description: branched-chain amino acid aminotransferase
  misc_feature (21)..(371): Homolog of NCBI NO: 15222882 NR Description: branched-chain amino acid aminotransferase
  misc_feature (21)..(371): Homolog of NCBI NO: 21617893 NR Description: branched-chain amino acid aminotransferase,
  misc_feature (20)..(371): Homolog of NCBI NO: 15222881 NR Description: branched-chain amino acid aminotransferase
  misc_feature (34)..(371): Homolog of NCBI NO: 15218409 NR Description: tat-binding protein -related [Arabidopsis
  misc_feature (2)..(371): Homolog of NCBI NO: 14280354 NR Description: branched-chain amino acid aminotransferase
  misc_feature (55)..(371): Homolog of NCBI NO: 7450517 NR Description: branched-chain amino acid aminotransferase
  misc_feature (34)..(370): Homolog of NCBI NO: 30681524 NR Description: branched-chain amino acid aminotransferase
  misc_feature (33)..(371): Homolog of NCBI NO: 27311239 NR Description: Unknown protein [Oryza sativa (japonica
  misc_feature (38)..(372): Homolog of NCBI NO: 34902362 NR Description: Putative aminotransferase [Oryza sativa (japonica group)] >gi|24418036|gb|AAN60486.1| Putative aminotransferase
LKFLAITYLQQSNSTRTNTSMAPSAQPLPVSVSDEKYANVKWEELAFKFVRTDYMYVAKCNHGESFQEGKILPFADLQLNPCAAVLQYGQGLYEGLKAYRTEDGRILLFRPDQNGLRLQAGADRLYMPYPSVDQFVSAIKQVALANKKWIPPPGKGTLYIRPILFGSGPILGSFPIPETTFTAFACPVGRYHKDNSGLNLKIEDQFRRAFPSGTGGVKSITNYCPVWIPLAEAKKQGFSDILFLDAATGKNIEELFAANVFMLKGNVVSTPTIAGTILPGVTRNCVMELCRDFGYQVEERTIPLVDFLDADEAFCTGTASIVTSIASVTFKDKKTGFKTGEETLAAKLYETLSDIQTGRVEDTKGWTVEIDRQG

SEQ ID NO: 104163 - protein, 354 aa, Arabidopsis thaliana; identical to SEQ ID NO: 24286
  peptide (1)..(354): Ceres Seq. ID no. 13614436
  misc_feature (48)..(333): Pfam Name: Aminotransferase class IV Pfam Description: Aminotransferase class IV
  misc_feature (1)..(354): Homolog of NCBI NO: 15230923 NR Description: branched-chain amino acid aminotransferase
  misc_feature (1)..(351): Homolog of NCBI NO: 15222882 NR Description: branched-chain amino acid aminotransferase
  misc_feature (1)..(351): Homolog of NCBI NO: 21617893 NR Description: branched-chain amino acid aminotransferase,
  misc_feature (1)..(351): Homolog of NCBI NO: 15222881 NR Description: branched-chain amino acid aminotransferase
  misc_feature (14)..(351): Homolog of NCBI NO: 15218409 NR Description: tat-binding protein -related [Arabidopsis
  misc_feature (1)..(351): Homolog of NCBI NO: 14280354 NR Description: branched-chain amino acid aminotransferase
  misc_feature (35)..(351): Homolog of NCBI NO: 7450517 NR Description: branched-chain amino acid aminotransferase
  misc_feature (14)..(350): Homolog of NCBI NO: 30681524 NR Description: branched-chain amino acid aminotransferase
  misc_feature (13)..(351): Homolog of NCBI NO: 27311239 NR Description: Unknown protein [Oryza sativa (japonica
  misc_feature (18)..(352): Homolog of NCBI NO: 34902362 NR Description: Putative aminotransferase [Oryza sativa (japonica group)] >gi|24418036|gb|AAN60486.1| Putative aminotransferase

SEQ ID NO: 104164 - protein, 320 aa, Arabidopsis thaliana; identical to SEQ ID NO: 24287
  peptide (1)..(320): Ceres Seq. ID no. 13614437
  misc_feature (14)..(299): Pfam Name: Aminotransferase class IV Pfam Description: Aminotransferase class IV
  misc_feature (1)..(320): Homolog of NCBI NO: 15230923 NR Description: branched-chain amino acid aminotransferase
  misc_feature (1)..(317): Homolog of NCBI NO: 15222882 NR Description: branched-chain amino acid aminotransferase
  misc_feature (1)..(317): Homolog of NCBI NO: 21617893 NR Description: branched-chain amino acid aminotransferase,
  misc_feature (1)..(317): Homolog of NCBI NO: 15222881 NR Description: branched-chain amino acid aminotransferase
  misc_feature (1)..(317): Homolog of NCBI NO: 15218409 NR Description: tat-binding protein -related [Arabidopsis
  misc_feature (1)..(317): Homolog of NCBI NO: 14280354 NR Description: branched-chain amino acid aminotransferase
  misc_feature (1)..(317): Homolog of NCBI NO: 7450517 NR Description: branched-chain amino acid aminotransferase
  misc_feature (1)..(316): Homolog of NCBI NO: 30681524 NR Description: branched-chain amino acid aminotransferase
  misc_feature (1)..(317): Homolog of NCBI NO: 27311239 NR Description: Unknown protein [Oryza sativa (japonica
  misc_feature (1)..(318): Homolog of NCBI NO: 34902362 NR Description: Putative aminotransferase [Oryza sativa (japonica group)] >gi|24418036|gb|AAN60486.1| Putative aminotransferase

SEQ ID NO: 104165 - DNA, 1644 bp, Arabidopsis thaliana
  misc_feature (1)..(1644): Ceres Seq. ID no. 13614442
  misc_feature: MA Experiment ID: 108462 Result: Down-regulated in Transcription
  misc_feature: MA Experiment 108462 PARAMETER Experiment Name: At_Germinating_Seeds_cDNA_P Parameter: Age (day) Value: 2 vs. 0
  misc_feature: MA Experiment 108462 PARAMETER Experiment Name: At_Germinating_Seeds_cDNA_P Parameter: Tissue Value: Germinating Seeds
  misc_feature: MA Experiment ID: 108463 Result: Down-regulated in Transcription
  misc_feature: MA Experiment 108463 PARAMETER Experiment Name: At_Germinating_Seeds_cDNA_P Parameter: Age (day) Value: 3 vs. 0
  misc_feature: MA Experiment 108463 PARAMETER Experiment Name: At_Germinating_Seeds_cDNA_P Parameter: Tissue Value: Germinating Seeds
  misc_feature: MA Experiment ID: 108573 Result: Up-regulated in Transcription
  misc_feature: MA Experiment 108573 PARAMETER Experiment Name: At_Drought_cDNA_P Parameter: Timepoint (hr) Value: 6
  misc_feature: MA Experiment 108573 PARAMETER Experiment Name: At_Drought_cDNA_P Parameter: Tissue Value: Aerial
  misc_feature: MA Experiment 108573 PARAMETER Experiment Name: At_Drought_cDNA_P Parameter: Treatment Value: Drought vs. No Drought
  misc_feature: MA Experiment ID: 108577 Result: Up-regulated in Transcription
  misc_feature: MA Experiment 108577 PARAMETER Experiment Name: At_42deg_Heat_cDNA_P Parameter: Temperature (deg C) Value: 42 vs. 22
  misc_feature: MA Experiment 108577 PARAMETER Experiment Name: At_42deg_Heat_cDNA_P Parameter: Timepoint (hr) Value: 6
  misc_feature: MA Experiment 108577 PARAMETER Experiment Name: At_42deg_Heat_cDNA_P Parameter: Tissue Value: Aerial
  misc_feature: MA Experiment ID: 20000087 Result: Down-regulated in Transcription
  misc_feature: MA Experiment 20000087 PARAMETER Experiment Name: At_100uM_ABA_Mutants_cDNA_P Parameter: Plant Line Value: WS
  misc_feature: MA Experiment 20000087 PARAMETER Experiment Name: At_100uM_ABA_Mutants_cDNA_P Parameter: Timepoint (hr) Value: 6
  misc_feature: MA Experiment 20000087 PARAMETER Experiment Name: At_100uM_ABA_Mutants_cDNA_P Parameter: Tissue Value: Aerial
  misc_feature: MA Experiment 20000087 PARAMETER Experiment Name: At_100uM_ABA_Mutants_cDNA_P Parameter: Treatment Value: 100uM ABA vs. No Treatment
  misc_feature: MA Experiment ID: 20000111 Result: Up-regulated in Transcription
  misc_feature: MA Experiment 20000111 PARAMETER Experiment Name: At_42deg_Heat_cDNA_P Parameter: Temperature (deg C) Value: 42 vs. 22
  misc_feature: MA Experiment 20000111 PARAMETER Experiment Name: At_42deg_Heat_cDNA_P Parameter: Timepoint (hr) Value: 6
  misc_feature: MA Experiment 20000111 PARAMETER Experiment Name: At_42deg_Heat_cDNA_P Parameter: Tissue Value: Aerial
  misc_feature: MA Experiment ID: 20000113 Result: Up-regulated in Transcription
  misc_feature: MA Experiment 20000113 PARAMETER Experiment Name: At_42deg_Heat_cDNA_P Parameter: Temperature (deg C) Value: 42 vs. 22
  misc_feature: MA Experiment 20000113 PARAMETER Experiment Name: At_42deg_Heat_cDNA_P Parameter: Timepoint (hr) Value: 8
  misc_feature: MA Experiment 20000113 PARAMETER Experiment Name: At_42deg_Heat_cDNA_P Parameter: Tissue Value: Aerial
  misc_feature: MA Experiment ID: 20000173 Result: Up-regulated in Transcription
  misc_feature: MA Experiment 20000173 PARAMETER Experiment Name: At_42deg_Heat_P Parameter: Age (day) Value: 14
  misc_feature: MA Experiment 20000173 PARAMETER Experiment Name: At_42deg_Heat_P Parameter: Organism Value: A. thaliana
  misc_feature: MA Experiment 20000173 PARAMETER Experiment Name: At_42deg_Heat_P Parameter: Plant Line Value: WS
  misc_feature: MA Experiment 20000173 PARAMETER Experiment Name: At_42deg_Heat_P Parameter: Temperature (deg C) Value: 42 vs. 22
  misc_feature: MA Experiment 20000173 PARAMETER Experiment Name: At_42deg_Heat_P Parameter: Timepoint (hr) Value: 6
  misc_feature: MA Experiment 20000173 PARAMETER Experiment Name: At_42deg_Heat_P Parameter: Tissue Value: Aerial
  misc_feature: MA Experiment ID: 20000179 Result: Down-regulated in Transcription
  misc_feature: MA Experiment 20000179 PARAMETER Experiment Name: At_Germinating_Seeds_P Parameter: Age (hr) Value: 6 vs. 0
  misc_feature: MA Experiment 20000179 PARAMETER Experiment Name: At_Germinating_Seeds_P Parameter: Tissue Value: Germinating Seeds
  misc_feature: MA Experiment ID: 20000180 Result: Down-regulated in Transcription
  misc_feature: MA Experiment 20000180 PARAMETER Experiment Name: At_Germinating_Seeds_P Parameter: Age (hr) Value: 24 vs. 0
  misc_feature: MA Experiment 20000180 PARAMETER Experiment Name: At_Germinating_Seeds_P Parameter: Tissue Value: Germinating Seeds
  misc_feature: MA Experiment ID: 20001557 Result: Up-regulated in Transcription
  misc_feature: MA Experiment 20001557 PARAMETER Experiment Name: At_Drought_Soil_Dry_P Parameter: Age (day) Value: 27
  misc_feature: MA Experiment 20001557 PARAMETER Experiment Name: At_Drought_Soil_Dry_P Parameter: Organism Value: A. thaliana
  misc_feature: MA Experiment 20001557 PARAMETER Experiment Name: At_Drought_Soil_Dry_P Parameter: Plant Line Value: WS
  misc_feature: MA Experiment 20001557 PARAMETER Experiment Name: At_Drought_Soil_Dry_P Parameter: Post Timepoint (hr) Value: 3
  misc_feature: MA Experiment 20001557 PARAMETER Experiment Name: At_Drought_Soil_Dry_P Parameter: Post-Treatment Value: Re-Water vs. No Drought
  misc_feature: MA Experiment 20001557 PARAMETER Experiment Name: At_Drought_Soil_Dry_P Parameter: Timepoint (day) Value: 13
  misc_feature: MA Experiment 20001557 PARAMETER Experiment Name: At_Drought_Soil_Dry_P Parameter: Treatment Value: Drought vs. No Drought
aagcatttgggggaaatcaatcgaaaaccctaggagagataaaaacaaaaatctagacggagatttatggcgacagcgaatcctggccgtggaggtggtagaagaggcggtggagctatggatgacgataagttggtcttcgagactaccgatggaattgagcccatcacgagcttcaatgatatgggcattaaggaagatgtgcttcgcggtgtctacgaatatggattcgagaagccttccgcgattcagcagagggctgttatgccgattcttcaaggacgtgatgttattgctcaagctcagtccggtaccgggaagacatctatgattgctctctccgtttgtcaagtcgttgatacttcttctagagaggttcaggccttgatattatccccaacaagagagctggctacacaaacagagaagacgatacaagctattggattacatgccaatattcaggcacatgcttgcatcggtgggaatagtgttggagaagacatcaggaagctggagcatggtgttcatgttgtgtctgggacacctggtcgtgtctgtgacatgataaagaggagaagtcttcgtaccagagctattaaacttctgattcttgatgaatcagatgaaatgctgagcagagggttcaaggaccagatctatgatgtttacagatatcttccaccagatcttcaggtttgcttggtttctgcaactcttcctcacgagattttggagatgacatccaagtttatgacagaaccagtgaagatacttgtgaagcgtgatgagttgactcttgaaggaatcaaacaattttttgttgctgttgagaaggaagagtggaaatttgatacactctgtgatctttatgacacgcttactatcactcaagctgttatcttctgcaatactaaacgaaaggtggattatcttagtgagaaaatgagaagtcacaacttcactgtctcatcaatgcatggagacatgcctcagaaggagagagacgccatcatgaatgagtttcggtcaggtgatagtcgtgttttgataacaacagatgtatgggcacgtgggattgatgtgcaacaagtttctcttgttatcaattatgatctccccaacaaccgtgagctctacatccatcgtattgggcggtctggtcgattcgggcgtaagggtgttgcaatcaactttgttaaaagcgacgacatcaagattctcagagacattgagcagtactacagtacccagattgatgagatgccaatgaatgtagctgatcttatctaaaagagcttgtctgagatttttgtgctttcagcggggaagtgtctggatgaaaaagtattgttgagcgcttctgtcaaattattgcactatcttaacggtgtatttcctttgatgtttctgtgggctcttttgaacaaacttaaactcgcgtgtggtaaatgtttaatgacttgagaagcgatttaggtttagggtttggaccgtttggtttttcgtttcctcgtaattgattctgggggctttgattgtggtttgtgggtcaaaactctcaactatcactacttgtaagacttttgctcgacagttgaaacggttcattgttatcttatttcgtaaagcttggatcattgc

SEQ ID NO: 104166 - protein, 408 aa, Arabidopsis thaliana; identical to SEQ ID NO: 28696
  peptide (1)..(408): Ceres Seq. ID no. 13614443
  misc_feature (48)..(251): Pfam Name: DEAD/DEAH box helicase Pfam Description: DEAD/DEAH box helicase
  misc_feature (1)..(408): Homolog of NCBI NO: 15230945 NR Description: eukaryotic translation initiation factor 4A
  misc_feature (1)..(408): Homolog of NCBI NO: 15215678 NR Description: AT3g19760/MMB12_21 [Arabidopsis thaliana]
  misc_feature (18)..(408): Homolog of NCBI NO: 11277760 NR Description: RNA helicase RH2 [imported] - Arabidopsis >gi|3775985|emb|CAA09195.1| RNA helicase [Arabidopsis thaliana]
  misc_feature (12)..(408): Homolog of NCBI NO: 34896594 NR Description: putative translation initiation factor [Oryza >gi|13957631|gb|AAK50586.1| putative translation initiation
  misc_feature (18)..(408): Homolog of NCBI NO: 1170507 NR Description: Eukaryotic initiation factor 4A-3 (eIF-4A-3)
  misc_feature (13)..(408): Homolog of NCBI NO: 7443503 NR Description: translation initiation factor - garden pea
  misc_feature (12)..(408): Homolog of NCBI NO: 24645031 NR Description: CG7483-PA [Drosophila melanogaster]
  misc_feature (19)..(408): Homolog of NCBI NO: 31207619 NR Description: ENSANGP00000020417 [Anopheles gambiae]
  misc_feature (12)..(408): Homolog of NCBI NO: 19528517 NR Description: RE50350p [Drosophila melanogaster]
  misc_feature (19)..(408): Homolog of NCBI NO: 28277876 NR Description: Unknown (protein for MGC:56139) [Danio rerio]

SEQ ID NO: 104167 - protein, 391 aa, Arabidopsis thaliana; identical to SEQ ID NO: 28697
  peptide (1)..(391): Ceres Seq. ID no. 13614444
  misc_feature (31)..(234): Pfam Name: DEAD/DEAH box helicase Pfam Description: DEAD/DEAH box helicase
  misc_feature (1)..(391): Homolog of NCBI NO: 15230945 NR Description: eukaryotic translation initiation factor 4A
  misc_feature (1)..(391): Homolog of NCBI NO: 15215678 NR Description: AT3g19760/MMB12_21 [Arabidopsis thaliana]
  misc_feature (1)..(391): Homolog of NCBI NO: 11277760 NR Description: RNA helicase RH2 [imported] - Arabidopsis >gi|3775985|emb|CAA09195.1| RNA helicase [Arabidopsis thaliana]
  misc_feature (1)..(391): Homolog of NCBI NO: 34896594 NR Description: putative translation initiation factor [Oryza >gi|13957631|gb|AAK50586.1| putative translation initiation
  misc_feature (1)..(391): Homolog of NCBI NO: 1170507 NR Description: Eukaryotic initiation factor 4A-3 (eIF-4A-3)
  misc_feature (1)..(391): Homolog of NCBI NO: 7443503 NR Description: translation initiation factor - garden pea
  misc_feature (1)..(391): Homolog of NCBI NO: 24645031 NR Description: CG7483-PA [Drosophila melanogaster]
  misc_feature (2)..(391): Homolog of NCBI NO: 31207619 NR Description: ENSANGP00000020417 [Anopheles gambiae]
  misc_feature (1)..(391): Homolog of NCBI NO: 19528517 NR Description: RE50350p [Drosophila melanogaster]
  misc_feature (2)..(391): Homolog of NCBI NO: 28277876 NR Description: Unknown (protein for MGC:56139) [Danio rerio]

SEQ ID NO: 104168 - protein, 369 aa, Arabidopsis thaliana; identical to SEQ ID NO: 28698
  peptide (1)..(369): Ceres Seq. ID no. 13614445
  misc_feature (9)..(212): Pfam Name: DEAD/DEAH box helicase Pfam Description: DEAD/DEAH box helicase
  misc_feature (1)..(369): Homolog of NCBI NO: 15230945 NR Description: eukaryotic translation initiation factor 4A
  misc_feature (1)..(369): Homolog of NCBI NO: 15215678 NR Description: AT3g19760/MMB12_21 [Arabidopsis thaliana]
  misc_feature (1)..(369): Homolog of NCBI NO: 11277760 NR Description: RNA helicase RH2 [imported] - Arabidopsis >gi|3775985|emb|CAA09195.1| RNA helicase [Arabidopsis thaliana]
  misc_feature (1)..(369): Homolog of NCBI NO: 34896594 NR Description: putative translation initiation factor [Oryza >gi|13957631|gb|AAK50586.1| putative translation initiation
  misc_feature (1)..(369): Homolog of NCBI NO: 1170507 NR Description: Eukaryotic initiation factor 4A-3 (eIF-4A-3)
  misc_feature (1)..(369): Homolog of NCBI NO: 7443503 NR Description: translation initiation factor - garden pea
  misc_feature (1)..(369): Homolog of NCBI NO: 24645031 NR Description: CG7483-PA [Drosophila melanogaster]
  misc_feature (1)..(369): Homolog of NCBI NO: 31207619 NR Description: ENSANGP00000020417 [Anopheles gambiae]
  misc_feature (1)..(369): Homolog of NCBI NO: 19528517 NR Description: RE50350p [Drosophila melanogaster]
  misc_feature (1)..(369): Homolog of NCBI NO: 28277876 NR Description: Unknown (protein for MGC:56139) [Danio rerio]

SEQ ID NO: 104169 - DNA, 1335 bp, Arabidopsis thaliana
  misc_feature (1)..(1335): Ceres Seq. ID no. 13614446
  misc_feature: MA Experiment ID: 108434 Result: Up-regulated in Transcription
  misc_feature: MA Experiment 108434 PARAMETER Experiment Name: At_Root_Tips_cDNA_P Parameter: Tissue Value: Root Tips
  misc_feature: MA Experiment ID: 108469 Result: Up-regulated in Transcription
  misc_feature: MA Experiment ID: 108488 Result: Down-regulated in Transcription
  misc_feature: MA Experiment ID: 108573 Result: Up-regulated in Transcription
  misc_feature: MA Experiment 108573 PARAMETER Experiment Name: At_Drought_cDNA_P Parameter: Timepoint (hr) Value: 6
  misc_feature: MA Experiment 108573 PARAMETER Experiment Name: At_Drought_cDNA_P Parameter: Tissue Value: Aerial
  misc_feature: MA Experiment 108573 PARAMETER Experiment Name: At_Drought_cDNA_P Parameter: Treatment Value: Drought vs. No Drought
  misc_feature: MA Experiment ID: 108585 Result: Up-regulated in Transcription
  misc_feature: MA Experiment 108585 PARAMETER Experiment Name: At_5mM_NaNP_cDNA_P Parameter: Timepoint (hr) Value: 6
  misc_feature: MA Experiment 108585 PARAMETER Experiment Name: At_5mM_NaNP_cDNA_P Parameter: Tissue Value: Aerial
  misc_feature: MA Experiment 108585 PARAMETER Experiment Name: At_5mM_NaNP_cDNA_P Parameter: Treatment Value: null
  misc_feature: MA Experiment ID: 108595 Result: Down-regulated in Transcription
  misc_feature: MA Experiment 108595 PARAMETER Experiment Name: At_Ler-pi_Ovule_cDNA_P Parameter: Plant Line Value: null
  misc_feature: MA Experiment ID: 108668 Result: Up-regulated in Transcription
  misc_feature: MA Experiment 108668 PARAMETER Experiment Name: At_2mM_SA_cDNA_P Parameter: Plant Line Value: WS
  misc_feature: MA Experiment 108668 PARAMETER Experiment Name: At_2mM_SA_cDNA_P Parameter: Timepoint (hr) Value: 6
  misc_feature: MA Experiment 108668 PARAMETER Experiment Name: At_2mM_SA_cDNA_P Parameter: Treatment Value: 2mM SA vs. No Treatment
  misc_feature: MA Experiment ID: 20000182 Result: Up-regulated in Transcription
  misc_feature: MA Experiment 20000182 PARAMETER Experiment Name: At_2mM_SA_P Parameter: Age (day) Value: 14
  misc_feature: MA Experiment 20000182 PARAMETER Experiment Name: At_2mM_SA_P Parameter: Organism Value: A. thaliana
  misc_feature: MA Experiment 20000182 PARAMETER Experiment Name: At_2mM_SA_P Parameter: Plant Line Value: WS
  misc_feature: MA Experiment 20000182 PARAMETER Experiment Name: At_2mM_SA_P Parameter: Timepoint (hr) Value: 6
  misc_feature: MA Experiment 20000182 PARAMETER Experiment Name: At_2mM_SA_P Parameter: Tissue Value: Aerial
  misc_feature: MA Experiment 20000182 PARAMETER Experiment Name: At_2mM_SA_P Parameter: Treatment Value: 2mM SA vs. No Treatment
  misc_feature: MA Experiment ID: 20000184 Result: Down-regulated in Transcription
  misc_feature: MA Experiment 20000184 PARAMETER Experiment Name: At_Shoots__P Parameter: Age (day) Value: 7
  misc_feature: MA Experiment 20000184 PARAMETER Experiment Name: At_Shoots__P Parameter: Tissue Value: Shoots vs. Whole Plant
  misc_feature: MA Experiment ID: 20000214 Result: Down-regulated in Transcription
  misc_feature: MA Experiment 20000214 PARAMETER Experiment Name: At_4deg_Cold_P Parameter: Timepoint (hr) Value: 6
  misc_feature: MA Experiment ID: 20000227 Result: Up-regulated in Transcription
  misc_feature: MA Experiment 20000227 PARAMETER Experiment Name: At_Root-Tips-vs-Tops_P Parameter: Tissue Value: Root Tips vs. Root Tops
  misc_feature: MA Experiment ID: 20000234 Result: Down-regulated in Transcription
  misc_feature: MA Experiment 20000234 PARAMETER Experiment Name: At_Siliques_P Parameter: Age (day) Value: 21
  misc_feature: MA Experiment 20000234 PARAMETER Experiment Name: At_Siliques_P Parameter: Organism Value: A. thaliana
  misc_feature: MA Experiment 20000234 PARAMETER Experiment Name: At_Siliques_P Parameter: Plant Line Value: WS
  misc_feature: MA Experiment 20000234 PARAMETER Experiment Name: At_Siliques_P Parameter: Tissue Value: Less Than 5mm Siliques vs. Whole Plant
  misc_feature: MA Experiment ID: 20000235 Result: Down-regulated in Transcription
  misc_feature: MA Experiment 20000235 PARAMETER Experiment Name: At_Siliques_P Parameter: Age (day) Value: 21
  misc_feature: MA Experiment 20000235 PARAMETER Experiment Name: At_Siliques_P Parameter: Organism Value: A. thaliana
  misc_feature: MA Experiment 20000235 PARAMETER Experiment Name: At_Siliques_P Parameter: Plant Line Value: WS
  misc_feature: MA Experiment 20000235 PARAMETER Experiment Name: At_Siliques_P Parameter: Tissue Value: 5-10mm Siliques vs. Whole Plant
  misc_feature: MA Experiment ID: 20000437 Result: Up-regulated in Transcription
  misc_feature: MA Experiment 20000437 PARAMETER Experiment Name: At_Drought_P Parameter: Age (day) Value: 8
  misc_feature: MA Experiment 20000437 PARAMETER Experiment Name: At_Drought_P Parameter: Organism Value: A. thaliana
  misc_feature: MA Experiment 20000437 PARAMETER Experiment Name: At_Drought_P Parameter: Plant Line Value: WS
  misc_feature: MA Experiment 20000437 PARAMETER Experiment Name: At_Drought_P Parameter: Timepoint (hr) Value: 24
  misc_feature: MA Experiment 20000437 PARAMETER Experiment Name: At_Drought_P Parameter: Tissue Value: Whole Plant
  misc_feature: MA Experiment 20000437 PARAMETER Experiment Name: At_Drought_P Parameter: Treatment Value: Drought vs. No Drought
  misc_feature: MA Experiment ID: 20001248 Result: Up-regulated in Transcription
  misc_feature: MA Experiment 20001248 PARAMETER Experiment Name: At_Far-red-induction_P Parameter: Age (day) Value: 7
  misc_feature: MA Experiment 20001248 PARAMETER Experiment Name: At_Far-red-induction_P Parameter: Light Value: Far-red vs. White
  misc_feature: MA Experiment 20001248 PARAMETER Experiment Name: At_Far-red-induction_P Parameter: Organism Value: A. thaliana
  misc_feature: MA Experiment 20001248 PARAMETER Experiment Name: At_Far-red-induction_P Parameter: Plant Line Value: Columbia
  misc_feature: MA Experiment 20001248 PARAMETER Experiment Name: At_Far-red-induction_P Parameter: Timepoint (hr) Value: 4
  misc_feature: MA Experiment 20001248 PARAMETER Experiment Name: At_Far-red-induction_P Parameter: Tissue Value: Whole Plant
  misc_feature: MA Experiment ID: 20001450 Result: Up-regulated in Transcription
  misc_feature: MA Experiment 20001450 PARAMETER Experiment Name: At_Far-red-induction_P Parameter: Age (day) Value: 7
  misc_feature: MA Experiment 20001450 PARAMETER Experiment Name: At_Far-red-induction_P Parameter: Light Value: Far-red vs. White
  misc_feature: MA Experiment 20001450 PARAMETER Experiment Name: At_Far-red-induction_P Parameter: Organism Value: A. thaliana
  misc_feature: MA Experiment 20001450 PARAMETER Experiment Name: At_Far-red-induction_P Parameter: Plant Line Value: Columbia
  misc_feature: MA Experiment 20001450 PARAMETER Experiment Name: At_Far-red-induction_P Parameter: Timepoint (hr) Value: 8
  misc_feature: MA Experiment 20001450 PARAMETER Experiment Name: At_Far-red-induction_P Parameter: Tissue Value: Whole Plant
  misc_feature: MA Experiment ID: 20001451 Result: Up-regulated in Transcription
  misc_feature: MA Experiment 20001451 PARAMETER Experiment Name: At_Far-red-induction_P Parameter: Age (day) Value: 7
  misc_feature: MA Experiment 20001451 PARAMETER Experiment Name: At_Far-red-induction_P Parameter: Light Value: Far-red vs. White
  misc_feature: MA Experiment 20001451 PARAMETER Experiment Name: At_Far-red-induction_P Parameter: Organism Value: A. thaliana
  misc_feature: MA Experiment 20001451 PARAMETER Experiment Name: At_Far-red-induction_P Parameter: Plant Line Value: Columbia
  misc_feature: MA Experiment 20001451 PARAMETER Experiment Name: At_Far-red-induction_P Parameter: Timepoint (hr) Value: 24
  misc_feature: MA Experiment 20001451 PARAMETER Experiment Name: At_Far-red-induction_P Parameter: Tissue Value: Whole Plant
ctcagctaaagagagaaagagaagcaccatttttctttctcgtcgtgtcatcgttttctcagattcctgaataatcattcccttccgattccaaaatccccaaacctcatccactcctccatctcccggattcggattcccagaatcatgcccatggagaacgacaatggcccacacgttggcaacgtcgtcgtcaccgctgagcaagcgaccaagattaacgagactgatggacggttgccggagaatcggcagaccggtgttgtctctgacaccggaagtggtagcgagagaggagagcaaggggttggagagtcggcagttgctgtggcggtgccggtggaggagagcggatcgatttcggtgggagagctacctgctccccgatcttcctctgctagagttccgtttactaatctaagccaaattgatgcggatcttgctcttgctcgcacactccaagaacaggagcgggcgtatatgatgttgaccatgaatagtgaaatcagtgactatgggagctgggaaactggaagctatgtatacgatgaggatgagtttgatgaccccgagaatgaggatgaggatgatgatgaagatgaatatgaaacagatgatgatcctcaggaagatgggcttgatgtcaatgtgcacgccaatgaagatgatcaagaagatgacggtaactctgacattgaagaagttgcttatacagatgatgaggcctatgctagagctcttcaagaagctgaagaaagggatatggctgctagattgtctgccttatctgggttagcaaaccgggtggttgaagatctagaggatgagagtcatacttctcaggatgcctgggatgagatggatcctgatgagctttcatatgaggagttgcttgcacttggcgacattgtgggaaccgaaagtagaggattgtctgctgatacaattgcatctttgccttcaaaaagatataaagaaggagacaatcagaacggaaccaatgagtcatgtgttatatgtcgtttagactatgaggatgacgaagacctgatactgctcccatgcaaacattcttaccactcggagtgcataaacaactggttgaagataaacaaggtttgccccgtatgcagtgcagaagtttcaacttcgacctctggacaaagctgatgaggcaaaggaagaaagattcagaaagaatcataagctaagaacttcaaaaccttagctgcctgtttgtacacttcttataaacaaaataacatcatcagatttccttggatcctttaaaaaatctcaaagattggaacattctcaagcgtttttagtttttgc

SEQ ID NO: 104170 - protein, 340 aa, Arabidopsis thaliana; identical to SEQ ID NO: 39651
  peptide (1)..(340): Ceres Seq. ID no. 13614447
  misc_feature (288)..(328): Pfam Name: Zinc finger, C3HC4 type (RING finger) Pfam Description: Zinc finger, C3HC4 type (RING finger)
  misc_feature (1)..(340): Homolog of NCBI NO: 18402411 NR Description: zinc finger (C3HC4-type RING finger) protein [Arabidopsis thaliana] >gi|11994203|dbj|BAB01306.1| protein [Arabidopsis thaliana] >gi|15010578|gb|AAK73948.1|
  misc_feature (1)..(340): Homolog of NCBI NO: 21536693 NR Description: unknown [Arabidopsis thaliana]
  misc_feature (117)..(340): Homolog of NCBI NO: 10334499 NR Description: hypothetical protein [Cicer arietinum]
  misc_feature (225)..(332): Homolog of NCBI NO: 22331928 NR Description: zinc finger (C3HC4-type RING finger) protein [Arabidopsis thaliana] >gi|21104275|emb|CAD32249.1| putative
  misc_feature (172)..(335): Homolog of NCBI NO: 15232746 NR Description: zinc-finger protein-related protein [Arabidopsis
  misc_feature (191)..(332): Homolog of NCBI NO: 38567912 NR Description: OSJNBa0088I22.8 [Oryza sativa (japonica
  misc_feature (160)..(332): Homolog of NCBI NO: 34898016 NR Description: ESTs C26000(C11448),AU082130(C11448) correspond
  misc_feature (230)..(328): Homolog of NCBI NO: 11358785 NR Description: RING-H2 finger protein RHG1a [imported] -
  misc_feature (238)..(331): Homolog of NCBI NO: 18400621 NR Description: zinc finger (C3HC4-type RING finger) protein [Arabidopsis thaliana] >gi|14326493|gb|AAK60292.1|AF385699_1 [Arabidopsis thaliana] >gi|23506055|gb|AAN28887.1|
  misc_feature (238)..(331): Homolog of NCBI NO: 8777490 NR Description: RING-finger protein (C-terminal)-like

SEQ ID NO: 104171 - protein, 338 aa, Arabidopsis thaliana; identical to SEQ ID NO: 39652
  peptide (1)..(338): Ceres Seq. ID no. 13614448
  misc_feature (286)..(326): Pfam Name: Zinc finger, C3HC4 type (RING finger) Pfam Description: Zinc finger, C3HC4 type (RING finger)
  misc_feature (1)..(338): Homolog of NCBI NO: 18402411 NR Description: zinc finger (C3HC4-type RING finger) protein [Arabidopsis thaliana] >gi|11994203|dbj|BAB01306.1| protein [Arabidopsis thaliana] >gi|15010578|gb|AAK73948.1|
  misc_feature (1)..(338): Homolog of NCBI NO: 21536693 NR Description: unknown [Arabidopsis thaliana]
  misc_feature (115)..(338): Homolog of NCBI NO: 10334499 NR Description: hypothetical protein [Cicer arietinum]
  misc_feature (223)..(330): Homolog of NCBI NO: 22331928 NR Description: zinc finger (C3HC4-type RING finger) protein [Arabidopsis thaliana] >gi|21104275|emb|CAD32249.1| putative
  misc_feature (170)..(333): Homolog of NCBI NO: 15232746 NR Description: zinc-finger protein-related protein [Arabidopsis
  misc_feature (189)..(330): Homolog of NCBI NO: 38567912 NR Description: OSJNBa0088I22.8 [Oryza sativa (japonica
  misc_feature (158)..(330): Homolog of NCBI NO: 34898016 NR Description: ESTs C26000(C11448),AU082130(C11448) correspond
  misc_feature (228)..(326): Homolog of NCBI NO: 11358785 NR Description: RING-H2 finger protein RHG1a [imported] -
  misc_feature (236)..(329): Homolog of NCBI NO: 18400621 NR Description: zinc finger (C3HC4-type RING finger) protein [Arabidopsis thaliana] >gi|14326493|gb|AAK60292.1|AF385699_1 [Arabidopsis thaliana] >gi|23506055|gb|AAN28887.1|
  misc_feature (236)..(329): Homolog of NCBI NO: 8777490 NR Description: RING-finger protein (C-terminal)-like

SEQ ID NO: 104172 - protein, 229 aa, Arabidopsis thaliana; identical to SEQ ID NO: 39653
  peptide (1)..(229): Ceres Seq. ID no. 13614449
  misc_feature (177)..(217): Pfam Name: Zinc finger, C3HC4 type (RING finger) Pfam Description: Zinc finger, C3HC4 type (RING finger)
  misc_feature (1)..(229): Homolog of NCBI NO: 18402411 NR Description: zinc finger (C3HC4-type RING finger) protein [Arabidopsis thaliana] >gi|11994203|dbj|BAB01306.1| protein [Arabidopsis thaliana] >gi|15010578|gb|AAK73948.1|
  misc_feature (1)..(229): Homolog of NCBI NO: 21536693 NR Description: unknown [Arabidopsis thaliana]
  misc_feature (6)..(229): Homolog of NCBI NO: 10334499 NR Description: hypothetical protein [Cicer arietinum]
  misc_feature (114)..(221): Homolog of NCBI NO: 22331928 NR Description: zinc finger (C3HC4-type RING finger) protein [Arabidopsis thaliana] >gi|21104275|emb|CAD32249.1| putative
  misc_feature (61)..(224): Homolog of NCBI NO: 15232746 NR Description: zinc-finger protein-related protein [Arabidopsis
  misc_feature (80)..(221): Homolog of NCBI NO: 38567912 NR Description: OSJNBa0088I22.8 [Oryza sativa (japonica
  misc_feature (49)..(221): Homolog of NCBI NO: 34898016 NR Description: ESTs C26000(C11448),AU082130(C11448) correspond
  misc_feature (119)..(217): Homolog of NCBI NO: 11358785 NR Description: RING-H2 finger protein RHG1a [imported] -
  misc_feature (127)..(220): Homolog of NCBI NO: 18400621 NR Description: zinc finger (C3HC4-type RING finger) protein [Arabidopsis thaliana] >gi|14326493|gb|AAK60292.1|AF385699_1 [Arabidopsis thaliana] >gi|23506055|gb|AAN28887.1|
  misc_feature (127)..(220): Homolog of NCBI NO: 8777490 NR Description: RING-finger protein (C-terminal)-like

SEQ ID NO: 104173 - DNA, 1396 bp, Arabidopsis thaliana
  misc_feature (1)..(1396): Ceres Seq. ID no. 13614450
  misc_feature: MA Experiment ID: 108488 Result: Down-regulated in Transcription
  misc_feature: MA Experiment ID: 108573 Result: Up-regulated in Transcription
  misc_feature: MA Experiment 108573 PARAMETER Experiment Name: At_Drought_cDNA_P Parameter: Timepoint (hr) Value: 6
  misc_feature: MA Experiment 108573 PARAMETER Experiment Name: At_Drought_cDNA_P Parameter: Tissue Value: Aerial
  misc_feature: MA Experiment 108573 PARAMETER Experiment Name: At_Drought_cDNA_P Parameter: Treatment Value: Drought vs. No Drought
  misc_feature: MA Experiment ID: 108585 Result: Up-regulated in Transcription
  misc_feature: MA Experiment 108585 PARAMETER Experiment Name: At_5mM_NaNP_cDNA_P Parameter: Timepoint (hr) Value: 6
  misc_feature: MA Experiment 108585 PARAMETER Experiment Name: At_5mM_NaNP_cDNA_P Parameter: Tissue Value: Aerial
  misc_feature: MA Experiment 108585 PARAMETER Experiment Name: At_5mM_NaNP_cDNA_P Parameter: Treatment Value: null
  misc_feature: MA Experiment ID: 20001451 Result: Up-regulated in Transcription
  misc_feature: MA Experiment 20001451 PARAMETER Experiment Name: At_Far-red-induction_P Parameter: Age (day) Value: 7
  misc_feature: MA Experiment 20001451 PARAMETER Experiment Name: At_Far-red-induction_P Parameter: Light Value: Far-red vs. White
  misc_feature: MA Experiment 20001451 PARAMETER Experiment Name: At_Far-red-induction_P Parameter: Organism Value: A. thaliana
  misc_feature: MA Experiment 20001451 PARAMETER Experiment Name: At_Far-red-induction_P Parameter: Plant Line Value: Columbia
  misc_feature: MA Experiment 20001451 PARAMETER Experiment Name: At_Far-red-induction_P Parameter: Timepoint (hr) Value: 24
  misc_feature: MA Experiment 20001451 PARAMETER Experiment Name: At_Far-red-induction_P Parameter: Tissue Value: Whole Plant
  misc_feature: MA Experiment ID: 20001905 Result: Up-regulated in Transcription
  misc_feature: MA Experiment 20001905 PARAMETER Experiment Name: At_Drought_Reproduction_P Parameter: Age (day) Value: 40
  misc_feature: MA Experiment 20001905 PARAMETER Experiment Name: At_Drought_Reproduction_P Parameter: Organism Value: A. thaliana
  misc_feature: MA Experiment 20001905 PARAMETER Experiment Name: At_Drought_Reproduction_P Parameter: Plant Line Value: WS
  misc_feature: MA Experiment 20001905 PARAMETER Experiment Name: At_Drought_Reproduction_P Parameter: Timepoint (day) Value: 10
  misc_feature: MA Experiment 20001905 PARAMETER Experiment Name: At_Drought_Reproduction_P Parameter: Tissue Value: Rosettes
  misc_feature: MA Experiment 20001905 PARAMETER Experiment Name: At_Drought_Reproduction_P Parameter: Treatment Value: Drought vs. No Drought
  misc_feature: MA Experiment ID: 20001911 Result: Up-regulated in Transcription
  misc_feature: MA Experiment 20001911 PARAMETER Experiment Name: At_Drought_Reproduction_P Parameter: Age (day) Value: 40
  misc_feature: MA Experiment 20001911 PARAMETER Experiment Name: At_Drought_Reproduction_P Parameter: Organism Value: A. thaliana
  misc_feature: MA Experiment 20001911 PARAMETER Experiment Name: At_Drought_Reproduction_P Parameter: Plant Line Value: WS
  misc_feature: MA Experiment 20001911 PARAMETER Experiment Name: At_Drought_Reproduction_P Parameter: Timepoint (day) Value: 10
  misc_feature: MA Experiment 20001911 PARAMETER Experiment Name: At_Drought_Reproduction_P Parameter: Tissue Value: Flowers
  misc_feature: MA Experiment 20001911 PARAMETER Experiment Name: At_Drought_Reproduction_P Parameter: Treatment Value: Drought vs. No Drought
atgggcttcagcccaaaatctgtaatcatcgtttctgagttggagtcggccacatatgacataactgagaattacttttctctctcctctgacggttcttttcttccttcgtcctctcgttttttttgtttcgtcgtctctctctcgcgctctgaaaaattcgcagaatccgtcatgtcttccggcgtaaattcaactggctccgccgcagcagcaccggaggttgacaagatgttcttctgctaccagtgcaatcaaacagtcacaatctcaatttcctcatccgctgatcctttttgtccaatttgtaaccaagggtttcttgaagaatacgaagaccctaaccctaatcaatccctcaatttcaaccctaactcttctgattcctttttccccatggccgatcctttctccaccttgctcccgctcatattcggctcttccgctgccgctccttccggcatggacttcatgagcttattcggtccttcgatgcaaccacaggctcgttccactcagcagaatcctcagtctgacgcgtttgatccgtttacgtttcttcagaatcatctccagactttgcgatctagcggtacgcactttgagttcgtgatcgagaatcatccttcggatccaggtaatcgtatgcctgggaatttcggtgattacttctttggtccaggtcttgagcagttgattcagcaactagctgagaatgatcctaatcgttacggaactcctcctgcttccaaatccgccattgatgctcttcctactgttaaggtaacgaaggatatgttgaaatcggagatgaaccaatgcgcggtgtgtatggatgagtttgaggatggtagcgatgttaagcagatgccttgtaagcacgtctttcatcaggactgtttgctcccttggctggagttgcataattcgtgtcctgtttgtcgattcgagttgcctacggatgatcctgattatgagaacaggagtcaaggaagtcaggggagtggtgatggacaaggatcggttgagggtcagcagacgccgaggtttagtatacaacttccttggccgttcaggagacaagatggctctggttcaggctcgggagcacctggtactggtggaggtaatcttgagaccaggggtgaagatttggattgagaatgtgttggccagtcattgcttggaaactggatcagaaggatatctatcccaagttctccaacaaaaaatgaaaaaacagttttattagggaaacaaaagtgacattgaggtcttaccatattttgtacatttaaaaaaagttatttttttcgttgttattttgggattatataacgaatgtgaaagtttttaaaaatcgcaaattttcaattgagtgttgtttatttttctc

SEQ ID NO: 104174 - protein, 386 aa, Arabidopsis thaliana
  peptide (1)..(386): Ceres Seq. ID no. 13614451
  misc_feature (274)..(314): Pfam Name: Zinc finger, C3HC4 type (RING finger) Pfam Description: Zinc finger, C3HC4 type (RING finger)
  misc_feature (1)..(386): Homolog of NCBI NO: 11994207 NR Description: gene_id:MPN9.20~unknown protein [Arabidopsis
  misc_feature (59)..(386): Homolog of NCBI NO: 15231003 NR Description: expressed protein [Arabidopsis thaliana] AT3g19950/MPN9_19 [Arabidopsis thaliana]
  misc_feature (266)..(386): Homolog of NCBI NO: 26451608 NR Description: unknown protein [Arabidopsis thaliana]
  misc_feature (123)..(347): Homolog of NCBI NO: 37535546 NR Description: putative zinc finger protein [Oryza sativa
  misc_feature (80)..(384): Homolog of NCBI NO: 18405518 NR Description: RING-H2 finger protein (RHC1a) [Arabidopsis
  misc_feature (218)..(341): Homolog of NCBI NO: 18405411 NR Description: expressed protein [Arabidopsis thaliana]
  misc_feature (209)..(333): Homolog of NCBI NO: 15241188 NR Description: expressed protein [Arabidopsis thaliana] gene_id:MCD7.7~pir||T05064~similar to unknown protein thaliana] >gi|17380898|gb|AAL36261.1| unknown protein
  misc_feature (59)..(359): Homolog of NCBI NO: 15219060 NR Description: hypothetical protein [Arabidopsis thaliana]
  misc_feature (218)..(337): Homolog of NCBI NO: 15231238 NR Description: expressed protein [Arabidopsis thaliana]
  misc_feature (218)..(337): Homolog of NCBI NO: 38454178 NR Description: At3g13430 [Arabidopsis thaliana]
MGFSPKSVIIVSELESATYDITENYFSLSSDGSFLPSSSRFFCFVVSLSRSEKFAESVMSSGVNSTGSAAAAPEVDKMFFCYQCNQTVTISISSSADPFCPICNQGFLEEYEDPNPNQSLNFNPNSSDSFFPMADPFSTLLPLIFGSSAAAPSGMDFMSLFGPSMQPQARSTQQNPQSDAFDPFTFLQNHLQTLRSSGTHFEFVIENHPSDPGNRMPGNFGDYFFGPGLEQLIQQLAENDPNRYGTPPASKSAIDALPTVKVTKDMLKSEMNQCAVCMDEFEDGSDVKQMPCKHVFHQDCLLPWLELHNSCPVCRFELPTDDPDYENRSQGSQGSGDGQGSVEGQQTPRFSIQLPWPFRRQDGSGSGSGAPGTGGGNLETRGEDLD

SEQ ID NO: 104175 - protein, 328 aa, Arabidopsis thaliana; identical to SEQ ID NO: 22707
  peptide (1)..(328): Ceres Seq. ID no. 13614452
  misc_feature (216)..(256): Pfam Name: Zinc finger, C3HC4 type (RING finger) Pfam Description: Zinc finger, C3HC4 type (RING finger)
  misc_feature (1)..(328): Homolog of NCBI NO: 11994207 NR Description: gene_id:MPN9.20~unknown protein [Arabidopsis
  misc_feature (1)..(328): Homolog of NCBI NO: 15231003 NR Description: expressed protein [Arabidopsis thaliana] AT3g19950/MPN9_19 [Arabidopsis thaliana]
  misc_feature (208)..(328): Homolog of NCBI NO: 26451608 NR Description: unknown protein [Arabidopsis thaliana]
  misc_feature (65)..(289): Homolog of NCBI NO: 37535546 NR Description: putative zinc finger protein [Oryza sativa
  misc_feature (22)..(326): Homolog of NCBI NO: 18405518 NR Description: RING-H2 finger protein (RHC1a) [Arabidopsis
  misc_feature (160)..(283): Homolog of NCBI NO: 18405411 NR Description: expressed protein [Arabidopsis thaliana]
  misc_feature (151)..(275): Homolog of NCBI NO: 15241188 NR Description: expressed protein [Arabidopsis thaliana] gene_id:MCD7.7~pir||T05064~similar to unknown protein thaliana] >gi|17380898|gb|AAL36261.1| unknown protein
  misc_feature (1)..(301): Homolog of NCBI NO: 15219060 NR Description: hypothetical protein [Arabidopsis thaliana]
  misc_feature (160)..(279): Homolog of NCBI NO: 15231238 NR Description: expressed protein [Arabidopsis thaliana]
  misc_feature (160)..(279): Homolog of NCBI NO: 38454178 NR Description: At3g13430 [Arabidopsis thaliana]

SEQ ID NO: 104176 - protein, 309 aa, Arabidopsis thaliana; identical to SEQ ID NO: 22708
  peptide (1)..(309): Ceres Seq. ID no. 13614453
  misc_feature (197)..(237): Pfam Name: Zinc finger, C3HC4 type (RING finger) Pfam Description: Zinc finger, C3HC4 type (RING finger)
  misc_feature (1)..(309): Homolog of NCBI NO: 11994207 NR Description: gene_id:MPN9.20~unknown protein [Arabidopsis
  misc_feature (1)..(309): Homolog of NCBI NO: 15231003 NR Description: expressed protein [Arabidopsis thaliana] AT3g19950/MPN9_19 [Arabidopsis thaliana]
  misc_feature (189)..(309): Homolog of NCBI NO: 26451608 NR Description: unknown protein [Arabidopsis thaliana]
  misc_feature (46)..(270): Homolog of NCBI NO: 37535546 NR Description: putative zinc finger protein [Oryza sativa
  misc_feature (3)..(307): Homolog of NCBI NO: 18405518 NR Description: RING-H2 finger protein (RHC1a) [Arabidopsis
  misc_feature (141)..(264): Homolog of NCBI NO: 18405411 NR Description: expressed protein [Arabidopsis thaliana]
  misc_feature (132)..(256): Homolog of NCBI NO: 15241188 NR Description: expressed protein [Arabidopsis thaliana] gene_id:MCD7.7~pir||T05064~similar to unknown protein thaliana] >gi|17380898|gb|AAL36261.1| unknown protein
  misc_feature (1)..(282): Homolog of NCBI NO: 15219060 NR Description: hypothetical protein [Arabidopsis thaliana]
  misc_feature (141)..(260): Homolog of NCBI NO: 15231238 NR Description: expressed protein [Arabidopsis thaliana]
  misc_feature (141)..(260): Homolog of NCBI NO: 38454178 NR Description: At3g13430 [Arabidopsis thaliana]

SEQ ID NO: 104177 - DNA, 1849 bp, Arabidopsis thaliana
  misc_feature (1)..(1849): Ceres Seq. ID no. 13614454
  misc_feature: MA Experiment ID: 108434 Result: Down-regulated in Transcription
  misc_feature: MA Experiment 108434 PARAMETER Experiment Name: At_Root_Tips_cDNA_P Parameter: Tissue Value: Root Tips
  misc_feature: MA Experiment ID: 108488 Result: Down-regulated in Transcription
  misc_feature: MA Experiment ID: 108489 Result: Up-regulated in Transcription
  misc_feature: MA Experiment ID: 108573 Result: Up-regulated in Transcription
  misc_feature: MA Experiment 108573 PARAMETER Experiment Name: At_Drought_cDNA_P Parameter: Timepoint (hr) Value: 6
  misc_feature: MA Experiment 108573 PARAMETER Experiment Name: At_Drought_cDNA_P Parameter: Tissue Value: Aerial
  misc_feature: MA Experiment 108573 PARAMETER Experiment Name: At_Drought_cDNA_P Parameter: Treatment Value: Drought vs. No Drought
  misc_feature: MA Experiment ID: 108574 Result: Up-regulated in Transcription
  misc_feature: MA Experiment 108574 PARAMETER Experiment Name: At_Wounding__cDNA_P Parameter: Timepoint (hr) Value: 1
  misc_feature: MA Experiment 108574 PARAMETER Experiment Name: At_Wounding__cDNA_P Parameter: Tissue Value: Aerial
  misc_feature: MA Experiment 108574 PARAMETER Experiment Name: At_Wounding__cDNA_P Parameter: Treatment Value: Wounding vs. No Wounding
  misc_feature: MA Experiment ID: 108585 Result: Up-regulated in Transcription
  misc_feature: MA Experiment 108585 PARAMETER Experiment Name: At_5mM_NaNP_cDNA_P Parameter: Timepoint (hr) Value: 6
  misc_feature: MA Experiment 108585 PARAMETER Experiment Name: At_5mM_NaNP_cDNA_P Parameter: Tissue Value: Aerial
  misc_feature: MA Experiment 108585 PARAMETER Experiment Name: At_5mM_NaNP_cDNA_P Parameter: Treatment Value: null
  misc_feature: MA Experiment ID: 108595 Result: Up-regulated in Transcription
  misc_feature: MA Experiment 108595 PARAMETER Experiment Name: At_Ler-pi_Ovule_cDNA_P Parameter: Plant Line Value: null
  misc_feature: MA Experiment ID: 108668 Result: Up-regulated in Transcription
  misc_feature: MA Experiment 108668 PARAMETER Experiment Name: At_2mM_SA_cDNA_P Parameter: Plant Line Value: WS
  misc_feature: MA Experiment 108668 PARAMETER Experiment Name: At_2mM_SA_cDNA_P Parameter: Timepoint (hr) Value: 6
  misc_feature: MA Experiment 108668 PARAMETER Experiment Name: At_2mM_SA_cDNA_P Parameter: Treatment Value: 2mM SA vs. No Treatment
  misc_feature: MA Experiment ID: 20000090 Result: Down-regulated in Transcription
  misc_feature: MA Experiment ID: 20000495 Result: Down-regulated in Transcription
  misc_feature: MA Experiment 20000495 PARAMETER Experiment Name: At_Guard_Cells_P Parameter: Harvest Date Value: 8/2/2002
  misc_feature: MA Experiment 20000495 PARAMETER Experiment Name: At_Guard_Cells_P Parameter: Organism Value: A. thaliana
  misc_feature: MA Experiment 20000495 PARAMETER Experiment Name: At_Guard_Cells_P Parameter: Tissue Value: Guard Cells vs. Leaves
  misc_feature: MA Experiment ID: 20001905 Result: Up-regulated in Transcription
  misc_feature: MA Experiment 20001905 PARAMETER Experiment Name: At_Drought_Reproduction_P Parameter: Age (day) Value: 40
  misc_feature: MA Experiment 20001905 PARAMETER Experiment Name: At_Drought_Reproduction_P Parameter: Organism Value: A. thaliana
  misc_feature: MA Experiment 20001905 PARAMETER Experiment Name: At_Drought_Reproduction_P Parameter: Plant Line Value: WS
  misc_feature: MA Experiment 20001905 PARAMETER Experiment Name: At_Drought_Reproduction_P Parameter: Timepoint (day) Value: 10
  misc_feature: MA Experiment 20001905 PARAMETER Experiment Name: At_Drought_Reproduction_P Parameter: Tissue Value: Rosettes
  misc_feature: MA Experiment 20001905 PARAMETER Experiment Name: At_Drought_Reproduction_P Parameter: Treatment Value: Drought vs. No Drought
  misc_feature: MA Experiment ID: 20001910 Result: Up-regulated in Transcription
  misc_feature: MA Experiment 20001910 PARAMETER Experiment Name: At_Drought_Reproduction_P Parameter: Age (day) Value: 37
  misc_feature: MA Experiment 20001910 PARAMETER Experiment Name: At_Drought_Reproduction_P Parameter: Organism Value: A. thaliana
  misc_feature: MA Experiment 20001910 PARAMETER Experiment Name: At_Drought_Reproduction_P Parameter: Plant Line Value: WS
  misc_feature: MA Experiment 20001910 PARAMETER Experiment Name: At_Drought_Reproduction_P Parameter: Timepoint (day) Value: 7
  misc_feature: MA Experiment 20001910 PARAMETER Experiment Name: At_Drought_Reproduction_P Parameter: Tissue Value: Flowers
  misc_feature: MA Experiment 20001910 PARAMETER Experiment Name: At_Drought_Reproduction_P Parameter: Treatment Value: Drought vs. No Drought
ggggtcatacaataaaaattgtgtttcttttttgccctaaaccaaaaatttcatctctcttttccctcttcccgtctctatctctctgagaagcgttttttcggtggagagaaagagagatttgactctgtcaagttattagtacattgaggtcgggctgtcaaaacttgacagcccgagtttgaagcttccaggactctttttctattaatgagattggtatgctagatttggagtgtattggattagattgtggcgatcatgggttctttgtctgggatcattcaacggccacttgttgctgctgctgctgtgattacagcttctgtgtctgcagatgtctctgagaggttctcatctcttagatcactagttcgaggttctgaatcagagcagattgctccttcagtgtctggtttagttcaggaagaaaggtccttgtgggtttctcaagtctcggcctccaagcttgcagatttatcttttgtgtcgaggatttgtgttcctgtaccaaatgttgatctcctagcttctaatcctagctgtagtctcgctacttctgttacttctctgtccgctcttcgtagtgtttatcagtctgcagagttggctaaagcatcgaaaccggttgcattcacaatcggtgcctcacttgtggttcctgatatttcctacagatggcatttacctgagcctagtgcagtcgatatgtctggttcttcgagttgtgtgtctgaaaagaatagaactgttgtggttttgcttggatggcttggatcaaagcagaagcatctgaagaaatatgctgattggtacacttcaaagggttaccatgtcattacatttactcttccgatgaatgagattatgagttatcaagttggagggaaagcagagaagaacatcgagtcgctggttaatcacttggctgattggttggatgaagagcaaaagaaaaatctcgtctttcacaccttcagcaacaccgggtggttaacatatggagccattttggaaaagtttcagaagcaagattcatcattgatgggaagagttaaaggttgcatagtggactcagctcctgttgctgctgcagatcctacggtatgggcatcaggtttctcagctgcgttcttgaagaaaagcagtgtagccactaaaggatctgcgagctcatcatatgagtcaaacggtataaacatctcccagcctaaacccgctgcaacagaaacagctttgcttttggttcttgaaaagttctttgcggtgattctaaatcttcccaaagtaaacaggagacttgccgatgttcttgacacattatcaacagcacaaccaagttgtccacagttatacatttacagctctgcagacagagttataccggtggaacaagttgaatcattcattgtagagcagaggaaagcaggacatgaggtccgtgcttgcaacttcatatcttcacctcatgtagaccatttccggagtaacccagaactgtatacagctgagctcaaccatttcatgaacaactttgtcctttcttgctgccaccattcttcatagcgacttccacaagtgttgttgttgctaaccatttttggggtccttttaactcttatacaagaaagagaaaaatagttactgattgatgattctttttggtttggattggtttatagattcaaattcattattcctttgtaaattgttggatattgtacatttaggagaatgaagattcaagaaagtgacgtccttgtcctttgtagtggagatttggatcttatggttgtcttttgttatttgttcaaagagggttgttaagaacccaatcataaagtttttg

SEQ ID NO: 104178 - protein, 434 aa, Arabidopsis thaliana; identical to SEQ ID NO: 43737
  peptide (1)..(434): Ceres Seq. ID no. 13614455
  misc_feature (161)..(425): Pfam Name: Eukaryotic protein of unknown function (DUF829) Pfam Description: Eukaryotic protein of unknown function (DUF829)
  misc_feature (1)..(434): Homolog of NCBI NO: 18402437 NR Description: expressed protein [Arabidopsis thaliana] gene_id:MZE19.2~unknown protein [Arabidopsis thaliana]
  misc_feature (145)..(422): Homolog of NCBI NO: 18398681 NR Description: expressed protein [Arabidopsis thaliana]
  misc_feature (145)..(422): Homolog of NCBI NO: 21536700 NR Description: unknown [Arabidopsis thaliana]
  misc_feature (145)..(280): Homolog of NCBI NO: 25411844 NR Description: probable integral membrane protein [imported] -
  misc_feature (135)..(274): Homolog of NCBI NO: 13375774 NR Description: hypothetical protein FLJ22353 [Homo sapiens]
  misc_feature (325)..(426): Homolog of NCBI NO: 13375774 NR Description: hypothetical protein FLJ22353 [Homo sapiens]
  misc_feature (135)..(274): Homolog of NCBI NO: 40555886 NR Description: Hypothetical protein FLJ22353 [Homo sapiens]
  misc_feature (352)..(426): Homolog of NCBI NO: 40555886 NR Description: Hypothetical protein FLJ22353 [Homo sapiens]
  misc_feature (135)..(274): Homolog of NCBI NO: 34870283 NR Description: similar to RIKEN cDNA 1110038M16 [Rattus
  misc_feature (360)..(426): Homolog of NCBI NO: 34870283 NR Description: similar to RIKEN cDNA 1110038M16 [Rattus

SEQ ID NO: 104179 - protein, 285 aa, Arabidopsis thaliana; identical to SEQ ID NO: 43738
  peptide (1)..(285): Ceres Seq. ID no. 13614456
  misc_feature (12)..(276): Pfam Name: Eukaryotic protein of unknown function (DUF829) Pfam Description: Eukaryotic protein of unknown function (DUF829)
  misc_feature (1)..(285): Homolog of NCBI NO: 18402437 NR Description: expressed protein [Arabidopsis thaliana] gene_id:MZE19.2~unknown protein [Arabidopsis thaliana]
  misc_feature (1)..(273): Homolog of NCBI NO: 18398681 NR Description: expressed protein [Arabidopsis thaliana]
  misc_feature (1)..(273): Homolog of NCBI NO: 21536700 NR Description: unknown [Arabidopsis thaliana]
  misc_feature (1)..(131): Homolog of NCBI NO: 25411844 NR Description: probable integral membrane protein [imported] -
  misc_feature (1)..(125): Homolog of NCBI NO: 13375774 NR Description: hypothetical protein FLJ22353 [Homo sapiens]
  misc_feature (176)..(277): Homolog of NCBI NO: 13375774 NR Description: hypothetical protein FLJ22353 [Homo sapiens]
  misc_feature (1)..(125): Homolog of NCBI NO: 40555886 NR Description: Hypothetical protein FLJ22353 [Homo sapiens]
  misc_feature (203)..(277): Homolog of NCBI NO: 40555886 NR Description: Hypothetical protein FLJ22353 [Homo sapiens]
  misc_feature (1)..(125): Homolog of NCBI NO: 34870283 NR Description: similar to RIKEN cDNA 1110038M16 [Rattus
  misc_feature (211)..(277): Homolog of NCBI NO: 34870283 NR Description: similar to RIKEN cDNA 1110038M16 [Rattus

SEQ ID NO: 104180 - protein, 236 aa, Arabidopsis thaliana; identical to SEQ ID NO: 43739
  peptide (1)..(236): Ceres Seq. ID no. 13614457
  misc_feature (1)..(227): Pfam Name: Eukaryotic protein of unknown function (DUF829) Pfam Description: Eukaryotic protein of unknown function (DUF829)
  misc_feature (1)..(236): Homolog of NCBI NO: 18402437 NR Description: expressed protein [Arabidopsis thaliana] gene_id:MZE19.2~unknown protein [Arabidopsis thaliana]
  misc_feature (1)..(224): Homolog of NCBI NO: 18398681 NR Description: expressed protein [Arabidopsis thaliana]
  misc_feature (1)..(224): Homolog of NCBI NO: 21536700 NR Description: unknown [Arabidopsis thaliana]
  misc_feature (1)..(82): Homolog of NCBI NO: 25411844 NR Description: probable integral membrane protein [imported] -
  misc_feature (1)..(76): Homolog of NCBI NO: 13375774 NR Description: hypothetical protein FLJ22353 [Homo sapiens]
  misc_feature (127)..(228): Homolog of NCBI NO: 13375774 NR Description: hypothetical protein FLJ22353 [Homo sapiens]
  misc_feature (1)..(76): Homolog of NCBI NO: 40555886 NR Description: Hypothetical protein FLJ22353 [Homo sapiens]
  misc_feature (154)..(228): Homolog of NCBI NO: 40555886 NR Description: Hypothetical protein FLJ22353 [Homo sapiens]
  misc_feature (1)..(76): Homolog of NCBI NO: 34870283 NR Description: similar to RIKEN cDNA 1110038M16 [Rattus
  misc_feature (162)..(228): Homolog of NCBI NO: 34870283 NR Description: similar to RIKEN cDNA 1110038M16 [Rattus

SEQ ID NO: 104181 - DNA, 1000 bp, Arabidopsis thaliana
  misc_feature (1)..(1000): Ceres Seq. ID no. 13614462
  misc_feature: MA Experiment ID: 108461 Result: Up-regulated in Transcription
  misc_feature: MA Experiment 108461 PARAMETER Experiment Name: At_Germinating_Seeds_cDNA_P Parameter: Age (day) Value: 1 vs. 0
  misc_feature: MA Experiment 108461 PARAMETER Experiment Name: At_Germinating_Seeds_cDNA_P Parameter: Tissue Value: Germinating Seeds
  misc_feature: MA Experiment ID: 108462 Result: Up-regulated in Transcription
  misc_feature: MA Experiment 108462 PARAMETER Experiment Name: At_Germinating_Seeds_cDNA_P Parameter: Age (day) Value: 2 vs. 0
  misc_feature: MA Experiment 108462 PARAMETER Experiment Name: At_Germinating_Seeds_cDNA_P Parameter: Tissue Value: Germinating Seeds
  misc_feature: MA Experiment ID: 108463 Result: Up-regulated in Transcription
  misc_feature: MA Experiment 108463 PARAMETER Experiment Name: At_Germinating_Seeds_cDNA_P Parameter: Age (day) Value: 3 vs. 0
  misc_feature: MA Experiment 108463 PARAMETER Experiment Name: At_Germinating_Seeds_cDNA_P Parameter: Tissue Value: Germinating Seeds
  misc_feature: MA Experiment ID: 108595 Result: Up-regulated in Transcription
  misc_feature: MA Experiment 108595 PARAMETER Experiment Name: At_Ler-pi_Ovule_cDNA_P Parameter: Plant Line Value: null
  misc_feature: MA Experiment ID: 20000180 Result: Up-regulated in Transcription
  misc_feature: MA Experiment 20000180 PARAMETER Experiment Name: At_Germinating_Seeds_P Parameter: Age (hr) Value: 24 vs. 0
  misc_feature: MA Experiment 20000180 PARAMETER Experiment Name: At_Germinating_Seeds_P Parameter: Tissue Value: Germinating Seeds
  misc_feature: MA Experiment ID: 20000495 Result: Down-regulated in Transcription
  misc_feature: MA Experiment 20000495 PARAMETER Experiment Name: At_Guard_Cells_P Parameter: Harvest Date Value: 8/2/2002
  misc_feature: MA Experiment 20000495 PARAMETER Experiment Name: At_Guard_Cells_P Parameter: Organism Value: A. thaliana
  misc_feature: MA Experiment 20000495 PARAMETER Experiment Name: At_Guard_Cells_P Parameter: Tissue Value: Guard Cells vs. Leaves
  misc_feature: MA Experiment ID: 20000573 Result: Down-regulated in Transcription
  misc_feature: MA Experiment 20000573 PARAMETER Experiment Name: At_100uM_ABA_Mutants__P Parameter: Organism Value: A. thaliana
  misc_feature: MA Experiment 20000573 PARAMETER Experiment Name: At_100uM_ABA_Mutants__P Parameter: Plant Line Value: CS22 vs. Ler wt
  misc_feature: MA Experiment 20000573 PARAMETER Experiment Name: At_100uM_ABA_Mutants__P Parameter: Timepoint (hr) Value: N/A
  misc_feature: MA Experiment 20000573 PARAMETER Experiment Name: At_100uM_ABA_Mutants__P Parameter: Tissue Value: Whole Plant
  misc_feature: MA Experiment 20000573 PARAMETER Experiment Name: At_100uM_ABA_Mutants__P Parameter: Treatment Value: None
  misc_feature: MA Experiment ID: 20001248 Result: Down-regulated in Transcription
  misc_feature: MA Experiment 20001248 PARAMETER Experiment Name: At_Far-red-induction_P Parameter: Age (day) Value: 7
  misc_feature: MA Experiment 20001248 PARAMETER Experiment Name: At_Far-red-induction_P Parameter: Light Value: Far-red vs. White
  misc_feature: MA Experiment 20001248 PARAMETER Experiment Name: At_Far-red-induction_P Parameter: Organism Value: A. thaliana
  misc_feature: MA Experiment 20001248 PARAMETER Experiment Name: At_Far-red-induction_P Parameter: Plant Line Value: Columbia
  misc_feature: MA Experiment 20001248 PARAMETER Experiment Name: At_Far-red-induction_P Parameter: Timepoint (hr) Value: 4
  misc_feature: MA Experiment 20001248 PARAMETER Experiment Name: At_Far-red-induction_P Parameter: Tissue Value: Whole Plant
  misc_feature: MA Experiment ID: 20001905 Result: Up-regulated in Transcription
  misc_feature: MA Experiment 20001905 PARAMETER Experiment Name: At_Drought_Reproduction_P Parameter: Age (day) Value: 40
  misc_feature: MA Experiment 20001905 PARAMETER Experiment Name: At_Drought_Reproduction_P Parameter: Organism Value: A. thaliana
  misc_feature: MA Experiment 20001905 PARAMETER Experiment Name: At_Drought_Reproduction_P Parameter: Plant Line Value: WS
  misc_feature: MA Experiment 20001905 PARAMETER Experiment Name: At_Drought_Reproduction_P Parameter: Timepoint (day) Value: 10
  misc_feature: MA Experiment 20001905 PARAMETER Experiment Name: At_Drought_Reproduction_P Parameter: Tissue Value: Rosettes
  misc_feature: MA Experiment 20001905 PARAMETER Experiment Name: At_Drought_Reproduction_P Parameter: Treatment Value: Drought vs. No Drought
aaggaagagaagagtgtccatatcatagattaaaaatcattcgttaatcaaaccacaaaatctaacttccacacacaaaacacacatacacaagaaaataaaaataaaaatggaattagttgaagagaccattccaaaagaagggaaaaagatgggagaaagaattgtggtcgacaaagcttatctttaccaagaagacaaaccactcaccgtctgcaagacttctctcttctacaccggcgatggcttcgccgcctatgactgccgtggtgatatcatcttcagggttgattcttatggacctgacacaagagataacgatgagattgtcctcatggacgcgaccgggaagtgtctccttaccgttaaacgaaagagaccaactctacaccaaagatgggaaggttttctcggcgagagatcggaaggtcagaaaccgatattcagcgtccgtagatcgtcgataatcggacggtgtacgatggaagtagaagtttacgacggaacaggagaagagtacattatcgatggagacttctcgcaacgaagctgtctcatatacgacacgaagaaatgtactgtggctgagatcaaacgcaaagtagacgcgtcaacgaacgtgatgcttggtcgagatgtgttcactctagagattaaaccgggttttgatggcgctttcgcgatgggtttggtcgttgtgcttgaccagatcaacggtgatgatccagttgagattggtgatgaacaggtacacccttttgtagaggattagtgtcggtctctctctcacctctctcagcggtcttcacgttaacatatcgaatctaatctttagtttttcaatctttggatttggaccatatgggattatggagatctgtttgtatcattctgtgttaagtcatttaagttgctacgttacataatatttatagactatagtctgtctcgggaaattcgttgactatacgtttgatgttacaaaattatttgtgcgttc

SEQ ID NO: 104182 - protein, 220 aa, Arabidopsis thaliana; identical to SEQ ID NO: 26322
  peptide (1)..(220): Ceres Seq. ID no. 13614463
  misc_feature (18)..(197): Pfam Name: Protein of unknown function (DUF567) Pfam Description: Protein of unknown function (DUF567)
  misc_feature (1)..(220): Homolog of NCBI NO: 18400907 NR Description: expressed protein [Arabidopsis thaliana] gb|AAD55470.1~gene_id:MSJ11.21~similar to unknown protein thaliana] >gi|17380788|gb|AAL36224.1| unknown protein
  misc_feature (15)..(220): Homolog of NCBI NO: 21554362 NR Description: unknown [Arabidopsis thaliana]
  misc_feature (19)..(220): Homolog of NCBI NO: 15220064 NR Description: expressed protein [Arabidopsis thaliana]
  misc_feature (20)..(121): Homolog of NCBI NO: 34909922 NR Description: P0665A11.21 [Oryza sativa (japonica
  misc_feature (139)..(205): Homolog of NCBI NO: 34909922 NR Description: P0665A11.21 [Oryza sativa (japonica
  misc_feature (33)..(201): Homolog of NCBI NO: 27542769 NR Description: hypothetical protein-like protein [Sorghum
  misc_feature (28)..(203): Homolog of NCBI NO: 34909256 NR Description: B1148D12.16 [Oryza sativa (japonica
  misc_feature (33)..(201): Homolog of NCBI NO: 27542765 NR Description: hypothetical protein-like protein [Sorghum
  misc_feature (33)..(201): Homolog of NCBI NO: 15224921 NR Description: expressed protein [Arabidopsis thaliana]
  misc_feature (109)..(201): Homolog of NCBI NO: 27542767 NR Description: hypothetical protein-like protein [Sorghum

SEQ ID NO: 104183 - protein, 206 aa, Arabidopsis thaliana; identical to SEQ ID NO: 26323
  peptide (1)..(206): Ceres Seq. ID no. 13614464
  misc_feature (4)..(183): Pfam Name: Protein of unknown function (DUF567) Pfam Description: Protein of unknown function (DUF567)
  misc_feature (1)..(206): Homolog of NCBI NO: 18400907 NR Description: expressed protein [Arabidopsis thaliana] gb|AAD55470.1~gene_id:MSJ11.21~similar to unknown protein thaliana] >gi|17380788|gb|AAL36224.1| unknown protein
  misc_feature (1)..(206): Homolog of NCBI NO: 21554362 NR Description: unknown [Arabidopsis thaliana]
  misc_feature (5)..(206): Homolog of NCBI NO: 15220064 NR Description: expressed protein [Arabidopsis thaliana]
  misc_feature (6)..(107): Homolog of NCBI NO: 34909922 NR Description: P0665A11.21 [Oryza sativa (japonica
  misc_feature (125)..(191): Homolog of NCBI NO: 34909922 NR Description: P0665A11.21 [Oryza sativa (japonica
  misc_feature (19)..(187): Homolog of NCBI NO: 27542769 NR Description: hypothetical protein-like protein [Sorghum
  misc_feature (14)..(189): Homolog of NCBI NO: 34909256 NR Description: B1148D12.16 [Oryza sativa (japonica
  misc_feature (19)..(187): Homolog of NCBI NO: 27542765 NR Description: hypothetical protein-like protein [Sorghum
  misc_feature (19)..(187): Homolog of NCBI NO: 15224921 NR Description: expressed protein [Arabidopsis thaliana]
  misc_feature (95)..(187): Homolog of NCBI NO: 27542767 NR Description: hypothetical protein-like protein [Sorghum

SEQ ID NO: 104184 - protein, 145 aa, Arabidopsis thaliana; identical to SEQ ID NO: 26324
  peptide (1)..(145): Ceres Seq. ID no. 13614465
  misc_feature (1)..(122): Pfam Name: Protein of unknown function (DUF567) Pfam Description: Protein of unknown function (DUF567)
  misc_feature (1)..(145): Homolog of NCBI NO: 18400907 NR Description: expressed protein [Arabidopsis thaliana] gb|AAD55470.1~gene_id:MSJ11.21~similar to unknown protein thaliana] >gi|17380788|gb|AAL36224.1| unknown protein
  misc_feature (1)..(145): Homolog of NCBI NO: 21554362 NR Description: unknown [Arabidopsis thaliana]
  misc_feature (1)..(145): Homolog of NCBI NO: 15220064 NR Description: expressed protein [Arabidopsis thaliana]
  misc_feature (1)..(46): Homolog of NCBI NO: 34909922 NR Description: P0665A11.21 [Oryza sativa (japonica
  misc_feature (64)..(130): Homolog of NCBI NO: 34909922 NR Description: P0665A11.21 [Oryza sativa (japonica
  misc_feature (1)..(126): Homolog of NCBI NO: 27542769 NR Description: hypothetical protein-like protein [Sorghum
  misc_feature (1)..(128): Homolog of NCBI NO: 34909256 NR Description: B1148D12.16 [Oryza sativa (japonica
  misc_feature (1)..(126): Homolog of NCBI NO: 27542765 NR Description: hypothetical protein-like protein [Sorghum
  misc_feature (1)..(126): Homolog of NCBI NO: 15224921 NR Description: expressed protein [Arabidopsis thaliana]
  misc_feature (34)..(126): Homolog of NCBI NO: 27542767 NR Description: hypothetical protein-like protein [Sorghum

SEQ ID NO: 104185 - DNA, 1197 bp, Arabidopsis thaliana
  misc_feature (1)..(1197): Ceres Seq. ID no. 13614466
  misc_feature: MA Experiment ID: 108433 Result: Down-regulated in Transcription
  misc_feature: MA Experiment 108433 PARAMETER Experiment Name: At_rhl_Mutant2_cDNA_P Parameter: Age (day) Value: 7
  misc_feature: MA Experiment 108433 PARAMETER Experiment Name: At_rhl_Mutant2_cDNA_P Parameter: Organism Value: A. thaliana
  misc_feature: MA Experiment 108433 PARAMETER Experiment Name: At_rhl_Mutant2_cDNA_P Parameter: Plant Line Value: rhl Mutant vs. wt landsburg
  misc_feature: MA Experiment 108433 PARAMETER Experiment Name: At_rhl_Mutant2_cDNA_P Parameter: Tissue Value: Roots
  misc_feature: MA Experiment ID: 108463 Result: Up-regulated in Transcription
  misc_feature: MA Experiment 108463 PARAMETER Experiment Name: At_Germinating_Seeds_cDNA_P Parameter: Age (day) Value: 3 vs. 0
  misc_feature: MA Experiment 108463 PARAMETER Experiment Name: At_Germinating_Seeds_cDNA_P Parameter: Tissue Value: Germinating Seeds
  misc_feature: MA Experiment ID: 20000089 Result: Down-regulated in Transcription
  misc_feature: MA Experiment ID: 20000224 Result: Down-regulated in Transcription
  misc_feature: MA Experiment ID: 20000437 Result: Down-regulated in Transcription
  misc_feature: MA Experiment 20000437 PARAMETER Experiment Name: At_Drought_P Parameter: Age (day) Value: 8
  misc_feature: MA Experiment 20000437 PARAMETER Experiment Name: At_Drought_P Parameter: Organism Value: A. thaliana
  misc_feature: MA Experiment 20000437 PARAMETER Experiment Name: At_Drought_P Parameter: Plant Line Value: WS
  misc_feature: MA Experiment 20000437 PARAMETER Experiment Name: At_Drought_P Parameter: Timepoint (hr) Value: 24
  misc_feature: MA Experiment 20000437 PARAMETER Experiment Name: At_Drought_P Parameter: Tissue Value: Whole Plant
  misc_feature: MA Experiment 20000437 PARAMETER Experiment Name: At_Drought_P Parameter: Treatment Value: Drought vs. No Drought
  misc_feature: MA Experiment ID: 20001450 Result: Up-regulated in Transcription
  misc_feature: MA Experiment 20001450 PARAMETER Experiment Name: At_Far-red-induction_P Parameter: Age (day) Value: 7
  misc_feature: MA Experiment 20001450 PARAMETER Experiment Name: At_Far-red-induction_P Parameter: Light Value: Far-red vs. White
  misc_feature: MA Experiment 20001450 PARAMETER Experiment Name: At_Far-red-induction_P Parameter: Organism Value: A. thaliana
  misc_feature: MA Experiment 20001450 PARAMETER Experiment Name: At_Far-red-induction_P Parameter: Plant Line Value: Columbia
  misc_feature: MA Experiment 20001450 PARAMETER Experiment Name: At_Far-red-induction_P Parameter: Timepoint (hr) Value: 8
  misc_feature: MA Experiment 20001450 PARAMETER Experiment Name: At_Far-red-induction_P Parameter: Tissue Value: Whole Plant
  misc_feature: MA Experiment ID: 20001451 Result: Up-regulated in Transcription
  misc_feature: MA Experiment 20001451 PARAMETER Experiment Name: At_Far-red-induction_P Parameter: Age (day) Value: 7
  misc_feature: MA Experiment 20001451 PARAMETER Experiment Name: At_Far-red-induction_P Parameter: Light Value: Far-red vs. White
  misc_feature: MA Experiment 20001451 PARAMETER Experiment Name: At_Far-red-induction_P Parameter: Organism Value: A. thaliana
  misc_feature: MA Experiment 20001451 PARAMETER Experiment Name: At_Far-red-induction_P Parameter: Plant Line Value: Columbia
  misc_feature: MA Experiment 20001451 PARAMETER Experiment Name: At_Far-red-induction_P Parameter: Timepoint (hr) Value: 24
  misc_feature: MA Experiment 20001451 PARAMETER Experiment Name: At_Far-red-induction_P Parameter: Tissue Value: Whole Plant
  misc_feature: MA Experiment ID: 20001555 Result: Down-regulated in Transcription
  misc_feature: MA Experiment 20001555 PARAMETER Experiment Name: At_Drought_Soil_Dry_P Parameter: Age (day) Value: 24
  misc_feature: MA Experiment 20001555 PARAMETER Experiment Name: At_Drought_Soil_Dry_P Parameter: Organism Value: A. thaliana
  misc_feature: MA Experiment 20001555 PARAMETER Experiment Name: At_Drought_Soil_Dry_P Parameter: Plant Line Value: WS
  misc_feature: MA Experiment 20001555 PARAMETER Experiment Name: At_Drought_Soil_Dry_P Parameter: Post Timepoint (hr) Value: None
  misc_feature: MA Experiment 20001555 PARAMETER Experiment Name: At_Drought_Soil_Dry_P Parameter: Post-Treatment Value: None
  misc_feature: MA Experiment 20001555 PARAMETER Experiment Name: At_Drought_Soil_Dry_P Parameter: Timepoint (day) Value: 10
  misc_feature: MA Experiment 20001555 PARAMETER Experiment Name: At_Drought_Soil_Dry_P Parameter: Treatment Value: Drought vs. No Drought
aaatttaatgtcgctctcaaaactcatttttttcatatgaattttctaacacaaacaattttccttggaaatctccgccttgtatctcttatataactcatctctctatactccgaacatgtccctctccgttaaccttaacggccatgtcagccgccgcagctgaaaccgacgtctctctccgtcgcagatctaactctcttaacggaaaccacactaacggcgtcgccattgacggaaccctagacaacaacaaccgtcgcgtcggagatacaaacactcacatggatatatctgctaagaaaactgacaacggctacgccaatggtgtcggaggaggaggatggagaagcaaagcgtcgttcacgacgtggacggcgcgtgatatcgtctacgtggtgagataccattggataccgtgcatgttcgctgccggacttctgttcttcatgggcgtggagtacacgcttcagatgattcccgcgagatctgagccgttcgatcttgggtttgtggtcacgcgctctttgaatcgcgtattagcatcttcaccggatcttaacactgttttagccgcactaaacacggtgttcgtagggatgcaaacaacgtatattgtatggacatggttagtggaaggacgagcacgagccaccatcgcggctttattcatgttcacttgtcgcggcattctcggctactctactcagcttcctctccctcaggactttctaggatcaggggttgattttccggtgggaaatgtctctttcttcctcttcttctctggccatgtcgccggctcgatgatcgcatcattggacatgagaagaatgcagaggttgagacttgcaatggtctttgacatcctcaatgtattacagtcgatcagactgctcggtacaagaggacattacacaatcgaccttgcggttggagttggcgctgggattctcttcgactcattggccggaaagtacgaagagatgatgagcaagagacatttaggcactggttttagtttgatttcgaaagactctctagtcaattaaatttgttttctatcagaatgtttagttgagttgaatctagcgtaatgaatttttttgtttttctttgaaatggttctacttgactaccgttatttgaacctaactaagtgtgatcaatcttatgttaaggggtattacatagtct

SEQ ID NO: 104186 - protein, 301 aa, Arabidopsis thaliana
  peptide (1)..(301): Ceres Seq. ID no. 13614467
  misc_feature (1)..(301): Homolog of NCBI NO: 18400910 NR Description: phosphatidic acid phosphatase (PAP2)-related thaliana] >gi|11994354|dbj|BAB02313.1| gene_id:MSJ11.22~unknown [Arabidopsis thaliana] >gi|21554290|gb|AAM63365.1| unknown
  misc_feature (47)..(301): Homolog of NCBI NO: 13926235 NR Description: AT3g15820/MSJ11_22 [Arabidopsis thaliana]
  misc_feature (1)..(300): Homolog of NCBI NO: 15232701 NR Description: phosphatidic acid phosphatase (PAP2)-related thaliana] >gi|11994355|dbj|BAB02314.1| gene_id:MSJ11.23~unknown
MSAAAAETDVSLRRRSNSLNGNHTNGVAIDGTLDNNNRRVGDTNTHMDISAKKTDNGYANGVGGGGWRSKASFTTWTARDIVYVVRYHWIPCMFAAGLLFFMGVEYTLQMIPARSEPFDLGFVVTRSLNRVLASSPDLNTVLAALNTVFVGMQTTYIVWTWLVEGRARATIAALFMFTCRGILGYSTQLPLPQDFLGSGVDFPVGNVSFFLFFSGHVAGSMIASLDMRRMQRLRLAMVFDILNVLQSIRLLGTRGHYTIDLAVGVGAGILFDSLAGKYEEMMSKRHLGTGFSLISKDSLVN

SEQ ID NO: 104187 - protein, 255 aa, Arabidopsis thaliana; identical to SEQ ID NO: 35201
  peptide (1)..(255): Ceres Seq. ID no. 13614468
  misc_feature (1)..(255): Homolog of NCBI NO: 18400910 NR Description: phosphatidic acid phosphatase (PAP2)-related thaliana] >gi|11994354|dbj|BAB02313.1| gene_id:MSJ11.22~unknown [Arabidopsis thaliana] >gi|21554290|gb|AAM63365.1| unknown
  misc_feature (1)..(255): Homolog of NCBI NO: 13926235 NR Description: AT3g15820/MSJ11_22 [Arabidopsis thaliana]
  misc_feature (1)..(254): Homolog of NCBI NO: 15232701 NR Description: phosphatidic acid phosphatase (PAP2)-related thaliana] >gi|11994355|dbj|BAB02314.1| gene_id:MSJ11.23~unknown

SEQ ID NO: 104188 - protein, 209 aa, Arabidopsis thaliana; identical to SEQ ID NO: 35202
  peptide (1)..(209): Ceres Seq. ID no. 13614469
  misc_feature (1)..(209): Homolog of NCBI NO: 18400910 NR Description: phosphatidic acid phosphatase (PAP2)-related thaliana] >gi|11994354|dbj|BAB02313.1| gene_id:MSJ11.22~unknown [Arabidopsis thaliana] >gi|21554290|gb|AAM63365.1| unknown
  misc_feature (1)..(209): Homolog of NCBI NO: 13926235 NR Description: AT3g15820/MSJ11_22 [Arabidopsis thaliana]
  misc_feature (1)..(208): Homolog of NCBI NO: 15232701 NR Description: phosphatidic acid phosphatase (PAP2)-related thaliana] >gi|11994355|dbj|BAB02314.1| gene_id:MSJ11.23~unknown

SEQ ID NO: 104189 - DNA, 1014 bp, Arabidopsis thaliana
  misc_feature (1)..(1014): Ceres Seq. ID no. 13614470
  misc_feature: MA Experiment ID: 108473 Result: Down-regulated in Transcription
  misc_feature: MA Experiment 108473 PARAMETER Experiment Name: At_Drought_Flowers_cDNA_P Parameter: Timepoint (hr) Value: 7 d
  misc_feature: MA Experiment 108473 PARAMETER Experiment Name: At_Drought_Flowers_cDNA_P Parameter: Tissue Value: Flower
  misc_feature: MA Experiment 108473 PARAMETER Experiment Name: At_Drought_Flowers_cDNA_P Parameter: Treatment Value: Drought vs. No Drought
  misc_feature: MA Experiment ID: 108501 Result: Down-regulated in Transcription
  misc_feature: MA Experiment 108501 PARAMETER Experiment Name: At_ap2_floral_buds_cDNA_P Parameter: Plant Line Value: ap2 (Ler.)
  misc_feature: MA Experiment 108501 PARAMETER Experiment Name: At_ap2_floral_buds_cDNA_P Parameter: Tissue Value: Closed Flower
  misc_feature: MA Experiment ID: 20000069 Result: Up-regulated in Transcription
  misc_feature: MA Experiment 20000069 PARAMETER Experiment Name: At_100uM_ABA_Mutants_cDNA_P Parameter: Plant Line Value: CS23
  misc_feature: MA Experiment 20000069 PARAMETER Experiment Name: At_100uM_ABA_Mutants_cDNA_P Parameter: Timepoint (hr) Value: 6
  misc_feature: MA Experiment 20000069 PARAMETER Experiment Name: At_100uM_ABA_Mutants_cDNA_P Parameter: Tissue Value: Aerial
  misc_feature: MA Experiment 20000069 PARAMETER Experiment Name: At_100uM_ABA_Mutants_cDNA_P Parameter: Treatment Value: 100uM ABA vs. No Treatment
  misc_feature: MA Experiment ID: 20000070 Result: Up-regulated in Transcription
  misc_feature: MA Experiment 20000070 PARAMETER Experiment Name: At_100uM_ABA_Mutants_cDNA_P Parameter: Plant Line Value: CS24
  misc_feature: MA Experiment 20000070 PARAMETER Experiment Name: At_100uM_ABA_Mutants_cDNA_P Parameter: Timepoint (hr) Value: 6
  misc_feature: MA Experiment 20000070 PARAMETER Experiment Name: At_100uM_ABA_Mutants_cDNA_P Parameter: Tissue Value: Aerial
  misc_feature: MA Experiment 20000070 PARAMETER Experiment Name: At_100uM_ABA_Mutants_cDNA_P Parameter: Treatment Value: 100uM ABA vs. No Treatment
  misc_feature: MA Experiment ID: 20000071 Result: Up-regulated in Transcription
  misc_feature: MA Experiment 20000071 PARAMETER Experiment Name: At_100uM_ABA_Mutants_cDNA_P Parameter: Plant Line Value: CS8104
  misc_feature: MA Experiment 20000071 PARAMETER Experiment Name: At_100uM_ABA_Mutants_cDNA_P Parameter: Timepoint (hr) Value: 6
  misc_feature: MA Experiment 20000071 PARAMETER Experiment Name: At_100uM_ABA_Mutants_cDNA_P Parameter: Tissue Value: Aerial
  misc_feature: MA Experiment 20000071 PARAMETER Experiment Name: At_100uM_ABA_Mutants_cDNA_P Parameter: Treatment Value: 100uM ABA vs. No Treatment
  misc_feature: MA Experiment ID: 20000086 Result: Up-regulated in Transcription
  misc_feature: MA Experiment 20000086 PARAMETER Experiment Name: At_100uM_ABA_Mutants_cDNA_P Parameter: Plant Line Value: CS22
  misc_feature: MA Experiment 20000086 PARAMETER Experiment Name: At_100uM_ABA_Mutants_cDNA_P Parameter: Timepoint (hr) Value: 6
  misc_feature: MA Experiment 20000086 PARAMETER Experiment Name: At_100uM_ABA_Mutants_cDNA_P Parameter: Tissue Value: Aerial
  misc_feature: MA Experiment 20000086 PARAMETER Experiment Name: At_100uM_ABA_Mutants_cDNA_P Parameter: Treatment Value: 100uM ABA vs. No Treatment
  misc_feature: MA Experiment ID: 20000087 Result: Up-regulated in Transcription
  misc_feature: MA Experiment 20000087 PARAMETER Experiment Name: At_100uM_ABA_Mutants_cDNA_P Parameter: Plant Line Value: WS
  misc_feature: MA Experiment 20000087 PARAMETER Experiment Name: At_100uM_ABA_Mutants_cDNA_P Parameter: Timepoint (hr) Value: 6
  misc_feature: MA Experiment 20000087 PARAMETER Experiment Name: At_100uM_ABA_Mutants_cDNA_P Parameter: Tissue Value: Aerial
  misc_feature: MA Experiment 20000087 PARAMETER Experiment Name: At_100uM_ABA_Mutants_cDNA_P Parameter: Treatment Value: 100uM ABA vs. No Treatment
  misc_feature: MA Experiment ID: 20000089 Result: Up-regulated in Transcription
  misc_feature: MA Experiment ID: 20000117 Result: Up-regulated in Transcription
  misc_feature: MA Experiment 20000117 PARAMETER Experiment Name: At_100uM_ABA_Mutants_cDNA_P Parameter: Plant Line Value: Columbia
  misc_feature: MA Experiment 20000117 PARAMETER Experiment Name: At_100uM_ABA_Mutants_cDNA_P Parameter: Timepoint (hr) Value: 6
  misc_feature: MA Experiment 20000117 PARAMETER Experiment Name: At_100uM_ABA_Mutants_cDNA_P Parameter: Tissue Value: Aerial
  misc_feature: MA Experiment 20000117 PARAMETER Experiment Name: At_100uM_ABA_Mutants_cDNA_P Parameter: Treatment Value: 100uM ABA vs. No Treatment
  misc_feature: MA Experiment ID: 20000355 Result: Down-regulated in Transcription
  misc_feature: MA Experiment 20000355 PARAMETER Experiment Name: At_Siliques_Sub_P Parameter: Age (day) Value: 21
  misc_feature: MA Experiment 20000355 PARAMETER Experiment Name: At_Siliques_Sub_P Parameter: Organism Value: A. thaliana
  misc_feature: MA Experiment 20000355 PARAMETER Experiment Name: At_Siliques_Sub_P Parameter: Plant Line Value: WS
  misc_feature: MA Experiment 20000355 PARAMETER Experiment Name: At_Siliques_Sub_P Parameter: Tissue Value: Less Than 5mm Siliques vs. Whole Plant
  misc_feature: MA Experiment ID: 20000440 Result: Up-regulated in Transcription
  misc_feature: MA Experiment 20000440 PARAMETER Experiment Name: At_Closed-Flower__Sub_P Parameter: Tissue Value: Closed Flower vs. Whole Plant
gtcactctccgttaattctaacggtcatgtcagacgccgtaaccaaaaccgtcgcccctctccgtcgtaaagctaatcctattaacggaaaacacactaacggcgtcaccatcgacggaatcttcgacgaccacaatcgccaaataggaccaataaatagccaaatggaagatattgctcagaaaactgatgacggtggaggaggagaatggacaagcaaagcgtcgtttatgacgtggacgatgcatgacataatttacgtggcgagacaccattggataccgtgtttattcgcggccggagttatgttttttacggttgtggagtacacgttccagatgactcctgcgagttctcagccgtttgatctaggatttgtggccacacgttatctgcatagcatcttggcatcttcacccaatcttaacaccgttttagccgctttaaacacgattttggtagggatgcaaacaacgtatattggatgtacatgggcagtggaaggacgaccacgggcaaccatcgcggctttattcatgttcacttgtcgtggcattctcggctactctactcagctccctcgccctcaggaatttttaggatcaggagtagattatccggtcggaaacgtgtcgttcttcctcttctactcaggtcacgtcgccggatcgatgatcgcatcgttggacatgaagagaatgcagaggtttaggctggcgatggtttttgacattctcaatgtattgcaatccatcaggctgcttggtacgagaggacactacacgattgatattgcggttggagttggcgctgggattctctttgactcattggccgggaagtacgaagagatgagcaagagacatttacggaatactcgttgtagtttgatttcaaaagactctctagtcacttaaatctattttttttttccggcaaaataattgtatattacactaaatctatttcttcttaaaacgtttagaaacacatttagttgaagtttaatgattt

SEQ ID NO: 104190 - protein, 304 aa, Arabidopsis thaliana
  peptide (1)..(304): Ceres Seq. ID no. 13614471
  misc_feature (9)..(304): Homolog of NCBI NO: 15232701 NR Description: phosphatidic acid phosphatase (PAP2)-related thaliana] >gi|11994355|dbj|BAB02314.1| gene_id:MSJ11.23~unknown
  misc_feature (9)..(303): Homolog of NCBI NO: 18400910 NR Description: phosphatidic acid phosphatase (PAP2)-related thaliana] >gi|11994354|dbj|BAB02313.1| gene_id:MSJ11.22~unknown [Arabidopsis thaliana] >gi|21554290|gb|AAM63365.1| unknown
  misc_feature (55)..(303): Homolog of NCBI NO: 13926235 NR Description: AT3g15820/MSJ11_22 [Arabidopsis thaliana]
HSPLILTVMSDAVTKTVAPLRRKANPINGKHTNGVTIDGIFDDHNRQIGPINSQMEDIAQKTDDGGGGEWTSKASFMTWTMHDIIYVARHHWIPCLFAAGVMFFTVVEYTFQMTPASSQPFDLGFVATRYLHSILASSPNLNTVLAALNTILVGMQTTYIGCTWAVEGRPRATIAALFMFTCRGILGYSTQLPRPQEFLGSGVDYPVGNVSFFLFYSGHVAGSMIASLDMKRMQRFRLAMVFDILNVLQSIRLLGTRGHYTIDIAVGVGAGILFDSLAGKYEEMSKRHLRNTRCSLISKDSLVT

SEQ ID NO: 104191 - protein, 296 aa, Arabidopsis thaliana
  peptide (1)..(296): Ceres Seq. ID no. 13614472
  misc_feature (1)..(296): Homolog of NCBI NO: 15232701 NR Description: phosphatidic acid phosphatase (PAP2)-related thaliana] >gi|11994355|dbj|BAB02314.1| gene_id:MSJ11.23~unknown
  misc_feature (1)..(295): Homolog of NCBI NO: 18400910 NR Description: phosphatidic acid phosphatase (PAP2)-related thaliana] >gi|11994354|dbj|BAB02313.1| gene_id:MSJ11.22~unknown [Arabidopsis thaliana] >gi|21554290|gb|AAM63365.1| unknown
  misc_feature (47)..(295): Homolog of NCBI NO: 13926235 NR Description: AT3g15820/MSJ11_22 [Arabidopsis thaliana]
MSDAVTKTVAPLRRKANPINGKHTNGVTIDGIFDDHNRQIGPINSQMEDIAQKTDDGGGGEWTSKASFMTWTMHDIIYVARHHWIPCLFAAGVMFFTVVEYTFQMTPASSQPFDLGFVATRYLHSILASSPNLNTVLAALNTILVGMQTTYIGCTWAVEGRPRATIAALFMFTCRGILGYSTQLPRPQEFLGSGVDYPVGNVSFFLFYSGHVAGSMIASLDMKRMQRFRLAMVFDILNVLQSIRLLGTRGHYTIDIAVGVGAGILFDSLAGKYEEMSKRHLRNTRCSLISKDSLVT

SEQ ID NO: 104192 - protein, 250 aa, Arabidopsis thaliana
  peptide (1)..(250): Ceres Seq. ID no. 13614473
  misc_feature (1)..(250): Homolog of NCBI NO: 15232701 NR Description: phosphatidic acid phosphatase (PAP2)-related thaliana] >gi|11994355|dbj|BAB02314.1| gene_id:MSJ11.23~unknown
  misc_feature (1)..(249): Homolog of NCBI NO: 18400910 NR Description: phosphatidic acid phosphatase (PAP2)-related thaliana] >gi|11994354|dbj|BAB02313.1| gene_id:MSJ11.22~unknown [Arabidopsis thaliana] >gi|21554290|gb|AAM63365.1| unknown
  misc_feature (1)..(249): Homolog of NCBI NO: 13926235 NR Description: AT3g15820/MSJ11_22 [Arabidopsis thaliana]
MEDIAQKTDDGGGGEWTSKASFMTWTMHDIIYVARHHWIPCLFAAGVMFFTVVEYTFQMTPASSQPFDLGFVATRYLHSILASSPNLNTVLAALNTILVGMQTTYIGCTWAVEGRPRATIAALFMFTCRGILGYSTQLPRPQEFLGSGVDYPVGNVSFFLFYSGHVAGSMIASLDMKRMQRFRLAMVFDILNVLQSIRLLGTRGHYTIDIAVGVGAGILFDSLAGKYEEMSKRHLRNTRCSLISKDSLVT

SEQ ID NO: 104193 - DNA, 1388 bp, Arabidopsis thaliana
  misc_feature (1)..(1388): Ceres Seq. ID no. 13614482
  misc_feature: MA Experiment ID: 20000315 Result: Down-regulated in Transcription
  misc_feature: MA Experiment 20000315 PARAMETER Experiment Name: At_14day_Shoots-Roots_Sub_P Parameter: Age (day) Value: 14
  misc_feature: MA Experiment 20000315 PARAMETER Experiment Name: At_14day_Shoots-Roots_Sub_P Parameter: Organism Value: A. thaliana
  misc_feature: MA Experiment 20000315 PARAMETER Experiment Name: At_14day_Shoots-Roots_Sub_P Parameter: Plant Line Value: WS
  misc_feature: MA Experiment 20000315 PARAMETER Experiment Name: At_14day_Shoots-Roots_Sub_P Parameter: Tissue Value: Shoots vs. Whole Plant
  misc_feature: MA Experiment ID: 20000328 Result: Down-regulated in Transcription
  misc_feature: MA Experiment 20000328 PARAMETER Experiment Name: At_42deg_Heat_Sub_P Parameter: Age (day) Value: 14
  misc_feature: MA Experiment 20000328 PARAMETER Experiment Name: At_42deg_Heat_Sub_P Parameter: Organism Value: A. thaliana
  misc_feature: MA Experiment 20000328 PARAMETER Experiment Name: At_42deg_Heat_Sub_P Parameter: Plant Line Value: WS
  misc_feature: MA Experiment 20000328 PARAMETER Experiment Name: At_42deg_Heat_Sub_P Parameter: Temperature (deg C) Value: 42 vs. 22
  misc_feature: MA Experiment 20000328 PARAMETER Experiment Name: At_42deg_Heat_Sub_P Parameter: Timepoint (hr) Value: 6
  misc_feature: MA Experiment 20000328 PARAMETER Experiment Name: At_42deg_Heat_Sub_P Parameter: Tissue Value: Aerial
gtttatcaatctcacatcgagacgaaattagagctactcagacttgttctattaaactgttaccttctccagacaaagcgttacctttttttttggtccgtacgaggaaaaatctaggagacagagctatttgttcgaaagatgcaacttttaaatagctgttgtggaaaaggatttgatgggaagaagaaagaaaaggaagagccatcttggagggtattttcactgaaggaacttcatgcagccaccaacagtttcaattacgataacaaactcggtgaaggtcgatttggtagtgtctattggggtcagctatgggatggctcacaaattgcagtcaagaggttgaaggaatggagtaatagagaagagatagattttgctgtggaagtcgagattcttgctcgtattcgtcacaagaatttgttgagtgttcgtggctactgtgctgaaggacaagaacgtcttcttgtgtacgagtacatgcagaatttgagcttggtttcacatcttcatggccagcattcagctgaatgtcttctagattggaccaagcgaatgaagatcgccataagctctgctcaggccattgcctacctacacgaccacgcaaccccacatatagtccatggagatgtgagagctagcaatgtgttgttagactctgaatttgaagctcgcgttacagattttggttatggtaagctgatgccagatgatgatactggagatggagctaccaaagccaaaagtaataatggatatatctcaccagaatgtgatgcatcaggaaaagaatcagaaactagcgatgtgtacagttttggtatccttttgatggtactggttagtggcaagagaccactcgagaggctaaatccaacaacaacgcggtgtataacagagtgggttttaccacttgtttatgaaagaaattttggtgaaatcgttgataagaggctgagcgaggagcatgtggcagagaaactgaagaaagtagtcttggtggggcttatgtgtgctcagacagatccagacaagagaccaacaatgtctgaagtggtggagatgctggtgaatgaatcaaaggagaaaatatctgaacttgaagctaatcccctcttcaagaatccatatagcagcaacgaaaacaatagagagcatgttgcagaggaaagctcagatgtgatcttagaagataaagatcatcaacaacaacaagaatagcaatggttaggcacagtaattcgtttggcagattatttttagaggtcttgcttattttttttagtgtgtttcttggttcataaaattgatttgatcattactgatactggagtttgtaaggtgtggtattggcacatataagattgaaacttttattctgg

SEQ ID NO: 104194 - protein, 361 aa, Arabidopsis thaliana
  peptide (1)..(361): Ceres Seq. ID no. 13614483
  misc_feature (1)..(361): Homolog of NCBI NO: 18400939 NR Description: protein kinase family [Arabidopsis thaliana]
  misc_feature (1)..(361): Homolog of NCBI NO: 21593950 NR Description: protein kinase, putative [Arabidopsis thaliana]
  misc_feature (1)..(357): Homolog of NCBI NO: 30695267 NR Description: protein kinase, putative [Arabidopsis thaliana]
  misc_feature (15)..(357): Homolog of NCBI NO: 25287618 NR Description: hypothetical protein F6D8.24 [imported] - thaliana >gi|5903051|gb|AAD55610.1|AC008016_20 Contains PF|00069 protein kinase domain. ESTs gb|W43822, gb|T20475 and gb|AA586152
  misc_feature (7)..(350): Homolog of NCBI NO: 34898392 NR Description: ESTs C22458(C62866),C22459(C62866) correspond to region of the predicted gene.~Similar to genomic sequence of
  misc_feature (27)..(333): Homolog of NCBI NO: 7488244 NR Description: protein kinase homolog F17M5.190 - Arabidopsis
  misc_feature (27)..(333): Homolog of NCBI NO: 18418211 NR Description: somatic embryogenesis receptor-related kinase protein [Arabidopsis thaliana] >gi|29427920|sp|Q94F62|BAK1_ARATH
  misc_feature (27)..(333): Homolog of NCBI NO: 14573459 NR Description: somatic embryogenesis receptor-like kinase 3
  misc_feature (27)..(348): Homolog of NCBI NO: 15217511 NR Description: protein kinase family [Arabidopsis thaliana]
  misc_feature (25)..(311): Homolog of NCBI NO: 34894174 NR Description: putative protein kinase [Oryza sativa (japonica group)] >gi|13486635|dbj|BAB39873.1| putative protein kinase
MQLLNSCCGKGFDGKKKEKEEPSWRVFSLKELHAATNSFNYDNKLGEGRFGSVYWGQLWDGSQIAVKRLKEWSNREEIDFAVEVEILARIRHKNLLSVRGYCAEGQERLLVYEYMQNLSLVSHLHGQHSAECLLDWTKRMKIAISSAQAIAYLHDHATPHIVHGDVRASNVLLDSEFEARVTDFGYGKLMPDDDTGDGATKAKSNNGYISPECDASGKESETSDVYSFGILLMVLVSGKRPLERLNPTTTRCITEWVLPLVYERNFGEIVDKRLSEEHVAEKLKKVVLVGLMCAQTDPDKRPTMSEVVEMLVNESKEKISELEANPLFKNPYSSNENNREHVAEESSDVILEDKDHQQQQE

SEQ ID NO: 104195 - protein, 247 aa, Arabidopsis thaliana
  peptide (1)..(247): Ceres Seq. ID no. 13614484
  misc_feature (1)..(247): Homolog of NCBI NO: 18400939 NR Description: protein kinase family [Arabidopsis thaliana]
  misc_feature (1)..(247): Homolog of NCBI NO: 21593950 NR Description: protein kinase, putative [Arabidopsis thaliana]
  misc_feature (1)..(243): Homolog of NCBI NO: 30695267 NR Description: protein kinase, putative [Arabidopsis thaliana]
  misc_feature (1)..(243): Homolog of NCBI NO: 25287618 NR Description: hypothetical protein F6D8.24 [imported] - thaliana >gi|5903051|gb|AAD55610.1|AC008016_20 Contains PF|00069 protein kinase domain. ESTs gb|W43822, gb|T20475 and gb|AA586152
  misc_feature (1)..(236): Homolog of NCBI NO: 34898392 NR Description: ESTs C22458(C62866),C22459(C62866) correspond to region of the predicted gene.~Similar to genomic sequence of
  misc_feature (1)..(219): Homolog of NCBI NO: 7488244 NR Description: protein kinase homolog F17M5.190 - Arabidopsis
  misc_feature (1)..(219): Homolog of NCBI NO: 14573459 NR Description: somatic embryogenesis receptor-like kinase 3
  misc_feature (1)..(219): Homolog of NCBI NO: 18418211 NR Description: somatic embryogenesis receptor-related kinase protein [Arabidopsis thaliana] >gi|29427920|sp|Q94F62|BAK1_ARATH
  misc_feature (1)..(234): Homolog of NCBI NO: 15217511 NR Description: protein kinase family [Arabidopsis thaliana]
  misc_feature (1)..(197): Homolog of NCBI NO: 34894174 NR Description: putative protein kinase [Oryza sativa (japonica group)] >gi|13486635|dbj|BAB39873.1| putative protein kinase
MQNLSLVSHLHGQHSAECLLDWTKRMKIAISSAQAIAYLHDHATPHIVHGDVRASNVLLDSEFEARVTDFGYGKLMPDDDTGDGATKAKSNNGYISPECDASGKESETSDVYSFGILLMVLVSGKRPLERLNPTTTRCITEWVLPLVYERNFGEIVDKRLSEEHVAEKLKKVVLVGLMCAQTDPDKRPTMSEVVEMLVNESKEKISELEANPLFKNPYSSNENNREHVAEESSDVILEDKDHQQQQE

SEQ ID NO: 104196 - protein, 222 aa, Arabidopsis thaliana
  peptide (1)..(222): Ceres Seq. ID no. 13614485
  misc_feature (1)..(222): Homolog of NCBI NO: 18400939 NR Description: protein kinase family [Arabidopsis thaliana]
  misc_feature (1)..(222): Homolog of NCBI NO: 21593950 NR Description: protein kinase, putative [Arabidopsis thaliana]
  misc_feature (1)..(218): Homolog of NCBI NO: 30695267 NR Description: protein kinase, putative [Arabidopsis thaliana]
  misc_feature (1)..(218): Homolog of NCBI NO: 25287618 NR Description: hypothetical protein F6D8.24 [imported] - thaliana >gi|5903051|gb|AAD55610.1|AC008016_20 Contains PF|00069 protein kinase domain. ESTs gb|W43822, gb|T20475 and gb|AA586152
  misc_feature (1)..(211): Homolog of NCBI NO: 34898392 NR Description: ESTs C22458(C62866),C22459(C62866) correspond to region of the predicted gene.~Similar to genomic sequence of
  misc_feature (1)..(194): Homolog of NCBI NO: 7488244 NR Description: protein kinase homolog F17M5.190 - Arabidopsis
  misc_feature (1)..(194): Homolog of NCBI NO: 14573459 NR Description: somatic embryogenesis receptor-like kinase 3
  misc_feature (1)..(194): Homolog of NCBI NO: 18418211 NR Description: somatic embryogenesis receptor-related kinase protein [Arabidopsis thaliana] >gi|29427920|sp|Q94F62|BAK1_ARATH
  misc_feature (1)..(209): Homolog of NCBI NO: 15217511 NR Description: protein kinase family [Arabidopsis thaliana]
  misc_feature (1)..(172): Homolog of NCBI NO: 34894174 NR Description: putative protein kinase [Oryza sativa (japonica group)] >gi|13486635|dbj|BAB39873.1| putative protein kinase
MKIAISSAQAIAYLHDHATPHIVHGDVRASNVLLDSEFEARVTDFGYGKLMPDDDTGDGATKAKSNNGYISPECDASGKESETSDVYSFGILLMVLVSGKRPLERLNPTTTRCITEWVLPLVYERNFGEIVDKRLSEEHVAEKLKKVVLVGLMCAQTDPDKRPTMSEVVEMLVNESKEKISELEANPLFKNPYSSNENNREHVAEESSDVILEDKDHQQQQE

SEQ ID NO: 104197 - DNA, 892 bp, Arabidopsis thaliana
  misc_feature (1)..(892): Ceres Seq. ID no. 13614496
  misc_feature: MA Experiment ID: 108434 Result: Up-regulated in Transcription
  misc_feature: MA Experiment 108434 PARAMETER Experiment Name: At_Root_Tips_cDNA_P Parameter: Tissue Value: Root Tips
  misc_feature: MA Experiment ID: 20001905 Result: Down-regulated in Transcription
  misc_feature: MA Experiment 20001905 PARAMETER Experiment Name: At_Drought_Reproduction_P Parameter: Age (day) Value: 40
  misc_feature: MA Experiment 20001905 PARAMETER Experiment Name: At_Drought_Reproduction_P Parameter: Organism Value: A. thaliana
  misc_feature: MA Experiment 20001905 PARAMETER Experiment Name: At_Drought_Reproduction_P Parameter: Plant Line Value: WS
  misc_feature: MA Experiment 20001905 PARAMETER Experiment Name: At_Drought_Reproduction_P Parameter: Timepoint (day) Value: 10
  misc_feature: MA Experiment 20001905 PARAMETER Experiment Name: At_Drought_Reproduction_P Parameter: Tissue Value: Rosettes
  misc_feature: MA Experiment 20001905 PARAMETER Experiment Name: At_Drought_Reproduction_P Parameter: Treatment Value: Drought vs. No Drought
  misc_feature: MA Experiment ID: 20001911 Result: Down-regulated in Transcription
  misc_feature: MA Experiment 20001911 PARAMETER Experiment Name: At_Drought_Reproduction_P Parameter: Age (day) Value: 40
  misc_feature: MA Experiment 20001911 PARAMETER Experiment Name: At_Drought_Reproduction_P Parameter: Organism Value: A. thaliana
  misc_feature: MA Experiment 20001911 PARAMETER Experiment Name: At_Drought_Reproduction_P Parameter: Plant Line Value: WS
  misc_feature: MA Experiment 20001911 PARAMETER Experiment Name: At_Drought_Reproduction_P Parameter: Timepoint (day) Value: 10
  misc_feature: MA Experiment 20001911 PARAMETER Experiment Name: At_Drought_Reproduction_P Parameter: Tissue Value: Flowers
  misc_feature: MA Experiment 20001911 PARAMETER Experiment Name: At_Drought_Reproduction_P Parameter: Treatment Value: Drought vs. No Drought
aatcgtttagtatttttgtaaatcgcctctccaccttgcccctggagaaccatcaccaaaaaacagagccaaacaaaaaaaaaaatctaaaagcatcaatggcttctcggcggcgagtgcttctgaaggttataattctcggagacagtggggttgggaagacgtccttgatgaatcagtttgtgaatcgaaaattcagtaatcagtataaagctaccattggagctgatttcttgaccaaagaggtccaaattgatgacagaatcttcactttgcagatttgggatactgcagggcaagagaggttccaaagtttgggtgttgctttctaccgaggagcggactgttgtgttcttgtgaatgatgtcaatgttatgaaatcctttgaaaatcttaacaactggagggaagagttcctgatccaggctagtccttcagatcctgaaaacttccccttcgttgtcttggggaacaagacagatgttgacggtggaaagagtcgagtggttactgagaagaaagcaaaatcttggtgtgcatccaagggaaacattccttacttcgagacttcggccaaagatggagtcaatgttgatgcagctttcgaatgcattgccaaaaatgctctcaagaatgaacctgaagaagaagtgtaccttccggacaccattgatgtagctggggctcggcaacaaagatcaactgggtgcgaatgctaaccaactttgttgcatggtttattagaaagaacatgtgttttaaggagagacctttttagtttctttggcattattgtgatgtgtatcaattagcatacgcacctttgttttggattacagaatcaaaaacgaattttggtcacctgttcattcttaatctcttcagcttgtcg

SEQ ID NO: 104198 - protein, 238 aa, Arabidopsis thaliana
  peptide (1)..(238): Ceres Seq. ID no. 13614497
  misc_feature (42)..(210): Pfam Name: Ras family Pfam Description: Ras family
  misc_feature (33)..(238): Homolog of NCBI NO: 15233284 NR Description: Ras family GTP-binding protein [Arabidopsis
  misc_feature (33)..(238): Homolog of NCBI NO: 15218194 NR Description: GTP-binding protein, putative [Arabidopsis
  misc_feature (33)..(238): Homolog of NCBI NO: 7388049 NR Description: Ras-related protein Rab7
  misc_feature (33)..(238): Homolog of NCBI NO: 3914550 NR Description: RAS-RELATED PROTEIN RAB7
  misc_feature (33)..(238): Homolog of NCBI NO: 1370188 NR Description: RAB7D [Lotus japonicus]
  misc_feature (33)..(237): Homolog of NCBI NO: 7438407 NR Description: GTP-binding protein Rab7a - common tobacco
  misc_feature (33)..(238): Homolog of NCBI NO: 1370186 NR Description: RAB7C [Lotus japonicus]
  misc_feature (33)..(236): Homolog of NCBI NO: 3914557 NR Description: RAS-RELATED PROTEIN RAB7 (POSSIBLE
  misc_feature (33)..(238): Homolog of NCBI NO: 34484308 NR Description: putative GTP-binding protein [Cucumis sativus]
  misc_feature (33)..(238): Homolog of NCBI NO: 15230211 NR Description: GTP-binding protein, putative [Arabidopsis
SFSIFVNRLSTLPLENHHQKTEPNKKKNLKASMASRRRVLLKVIILGDSGVGKTSLMNQFVNRKFSNQYKATIGADFLTKEVQIDDRIFTLQIWDTAGQERFQSLGVAFYRGADCCVLVNDVNVMKSFENLNNWREEFLIQASPSDPENFPFVVLGNKTDVDGGKSRVVTEKKAKSWCASKGNIPYFETSAKDGVNVDAAFECIAKNALKNEPEEEVYLPDTIDVAGARQQRSTGCEC

SEQ ID NO: 104199 - protein, 206 aa, Arabidopsis thaliana; identical to SEQ ID NO: 40608
  peptide (1)..(206): Ceres Seq. ID no. 13614498
  misc_feature (10)..(178): Pfam Name: Ras family Pfam Description: Ras family
  misc_feature (1)..(206): Homolog of NCBI NO: 15233284 NR Description: Ras family GTP-binding protein [Arabidopsis
  misc_feature (1)..(206): Homolog of NCBI NO: 15218194 NR Description: GTP-binding protein, putative [Arabidopsis
  misc_feature (1)..(206): Homolog of NCBI NO: 7388049 NR Description: Ras-related protein Rab7
  misc_feature (1)..(206): Homolog of NCBI NO: 3914550 NR Description: RAS-RELATED PROTEIN RAB7
  misc_feature (1)..(206): Homolog of NCBI NO: 1370188 NR Description: RAB7D [Lotus japonicus]
  misc_feature (1)..(205): Homolog of NCBI NO: 7438407 NR Description: GTP-binding protein Rab7a - common tobacco
  misc_feature (1)..(206): Homolog of NCBI NO: 1370186 NR Description: RAB7C [Lotus japonicus]
  misc_feature (1)..(204): Homolog of NCBI NO: 3914557 NR Description: RAS-RELATED PROTEIN RAB7 (POSSIBLE
  misc_feature (1)..(206): Homolog of NCBI NO: 34484308 NR Description: putative GTP-binding protein [Cucumis sativus]
  misc_feature (1)..(206): Homolog of NCBI NO: 15230211 NR Description: GTP-binding protein, putative [Arabidopsis

SEQ ID NO: 104200 - protein, 182 aa, Arabidopsis thaliana; identical to SEQ ID NO: 40609
  peptide (1)..(182): Ceres Seq. ID no. 13614499
  misc_feature (1)..(154): Pfam Name: Ras family Pfam Description: Ras family
  misc_feature (1)..(182): Homolog of NCBI NO: 15233284 NR Description: Ras family GTP-binding protein [Arabidopsis
  misc_feature (1)..(182): Homolog of NCBI NO: 15218194 NR Description: GTP-binding protein, putative [Arabidopsis
  misc_feature (1)..(182): Homolog of NCBI NO: 7388049 NR Description: Ras-related protein Rab7
  misc_feature (1)..(182): Homolog of NCBI NO: 3914550 NR Description: RAS-RELATED PROTEIN RAB7
  misc_feature (1)..(182): Homolog of NCBI NO: 1370188 NR Description: RAB7D [Lotus japonicus]
  misc_feature (1)..(181): Homolog of NCBI NO: 7438407 NR Description: GTP-binding protein Rab7a - common tobacco
  misc_feature (1)..(182): Homolog of NCBI NO: 1370186 NR Description: RAB7C [Lotus japonicus]
  misc_feature (1)..(180): Homolog of NCBI NO: 3914557 NR Description: RAS-RELATED PROTEIN RAB7 (POSSIBLE
  misc_feature (1)..(182): Homolog of NCBI NO: 34484308 NR Description: putative GTP-binding protein [Cucumis sativus]
  misc_feature (1)..(182): Homolog of NCBI NO: 15230211 NR Description: GTP-binding protein, putative [Arabidopsis

SEQ ID NO: 104201 - DNA, 1927 bp, Arabidopsis thaliana
  misc_feature (1)..(1927): Ceres Seq. ID no. 13614504
  misc_feature: MA Experiment ID: 108434 Result: Down-regulated in Transcription
  misc_feature: MA Experiment 108434 PARAMETER Experiment Name: At_Root_Tips_cDNA_P Parameter: Tissue Value: Root Tips
  misc_feature: MA Experiment ID: 108488 Result: Down-regulated in Transcription
  misc_feature: MA Experiment ID: 108489 Result: Up-regulated in Transcription
  misc_feature: MA Experiment ID: 108573 Result: Up-regulated in Transcription
  misc_feature: MA Experiment 108573 PARAMETER Experiment Name: At_Drought_cDNA_P Parameter: Timepoint (hr) Value: 6
  misc_feature: MA Experiment 108573 PARAMETER Experiment Name: At_Drought_cDNA_P Parameter: Tissue Value: Aerial
  misc_feature: MA Experiment 108573 PARAMETER Experiment Name: At_Drought_cDNA_P Parameter: Treatment Value: Drought vs. No Drought
  misc_feature: MA Experiment ID: 108605 Result: Up-regulated in Transcription
  misc_feature: MA Experiment 108605 PARAMETER Experiment Name: At_100uM_ABA_cDNA_P Parameter: Timepoint (hr) Value: 6
  misc_feature: MA Experiment 108605 PARAMETER Experiment Name: At_100uM_ABA_cDNA_P Parameter: Tissue Value: Aerial
  misc_feature: MA Experiment 108605 PARAMETER Experiment Name: At_100uM_ABA_cDNA_P Parameter: Treatment Value: 100uM ABA vs. No Treatment
  misc_feature: MA Experiment ID: 108607 Result: Up-regulated in Transcription
  misc_feature: MA Experiment 108607 PARAMETER Experiment Name: At_100uM_ABA_cDNA_P Parameter: Timepoint (hr) Value: 4
  misc_feature: MA Experiment 108607 PARAMETER Experiment Name: At_100uM_ABA_cDNA_P Parameter: Tissue Value: Aerial
  misc_feature: MA Experiment 108607 PARAMETER Experiment Name: At_100uM_ABA_cDNA_P Parameter: Treatment Value: 100uM ABA vs. No Treatment
  misc_feature: MA Experiment ID: 20000070 Result: Up-regulated in Transcription
  misc_feature: MA Experiment 20000070 PARAMETER Experiment Name: At_100uM_ABA_Mutants_cDNA_P Parameter: Plant Line Value: CS24
  misc_feature: MA Experiment 20000070 PARAMETER Experiment Name: At_100uM_ABA_Mutants_cDNA_P Parameter: Timepoint (hr) Value: 6
  misc_feature: MA Experiment 20000070 PARAMETER Experiment Name: At_100uM_ABA_Mutants_cDNA_P Parameter: Tissue Value: Aerial
  misc_feature: MA Experiment 20000070 PARAMETER Experiment Name: At_100uM_ABA_Mutants_cDNA_P Parameter: Treatment Value: 100uM ABA vs. No Treatment
  misc_feature: MA Experiment ID: 20000072 Result: Up-regulated in Transcription
  misc_feature: MA Experiment 20000072 PARAMETER Experiment Name: At_100uM_ABA_Mutants_cDNA_P Parameter: Plant Line Value: CS8105
  misc_feature: MA Experiment 20000072 PARAMETER Experiment Name: At_100uM_ABA_Mutants_cDNA_P Parameter: Timepoint (hr) Value: 6
  misc_feature: MA Experiment 20000072 PARAMETER Experiment Name: At_100uM_ABA_Mutants_cDNA_P Parameter: Tissue Value: Aerial
  misc_feature: MA Experiment 20000072 PARAMETER Experiment Name: At_100uM_ABA_Mutants_cDNA_P Parameter: Treatment Value: 100uM ABA vs. No Treatment
  misc_feature: MA Experiment ID: 20000087 Result: Up-regulated in Transcription
  misc_feature: MA Experiment 20000087 PARAMETER Experiment Name: At_100uM_ABA_Mutants_cDNA_P Parameter: Plant Line Value: WS
  misc_feature: MA Experiment 20000087 PARAMETER Experiment Name: At_100uM_ABA_Mutants_cDNA_P Parameter: Timepoint (hr) Value: 6
  misc_feature: MA Experiment 20000087 PARAMETER Experiment Name: At_100uM_ABA_Mutants_cDNA_P Parameter: Tissue Value: Aerial
  misc_feature: MA Experiment 20000087 PARAMETER Experiment Name: At_100uM_ABA_Mutants_cDNA_P Parameter: Treatment Value: 100uM ABA vs. No Treatment
  misc_feature: MA Experiment ID: 20000088 Result: Up-regulated in Transcription
  misc_feature: MA Experiment 20000088 PARAMETER Experiment Name: At_100uM_ABA_Mutants_cDNA_P Parameter: Plant Line Value: Landsberg
  misc_feature: MA Experiment 20000088 PARAMETER Experiment Name: At_100uM_ABA_Mutants_cDNA_P Parameter: Timepoint (hr) Value: 6
  misc_feature: MA Experiment 20000088 PARAMETER Experiment Name: At_100uM_ABA_Mutants_cDNA_P Parameter: Tissue Value: Aerial
  misc_feature: MA Experiment 20000088 PARAMETER Experiment Name: At_100uM_ABA_Mutants_cDNA_P Parameter: Treatment Value: 100uM ABA vs. No Treatment
  misc_feature: MA Experiment ID: 20000117 Result: Up-regulated in Transcription
  misc_feature: MA Experiment 20000117 PARAMETER Experiment Name: At_100uM_ABA_Mutants_cDNA_P Parameter: Plant Line Value: Columbia
  misc_feature: MA Experiment 20000117 PARAMETER Experiment Name: At_100uM_ABA_Mutants_cDNA_P Parameter: Timepoint (hr) Value: 6
  misc_feature: MA Experiment 20000117 PARAMETER Experiment Name: At_100uM_ABA_Mutants_cDNA_P Parameter: Tissue Value: Aerial
  misc_feature: MA Experiment 20000117 PARAMETER Experiment Name: At_100uM_ABA_Mutants_cDNA_P Parameter: Treatment Value: 100uM ABA vs. No Treatment
  misc_feature: MA Experiment ID: 20000173 Result: Down-regulated in Transcription
  misc_feature: MA Experiment 20000173 PARAMETER Experiment Name: At_42deg_Heat_P Parameter: Age (day) Value: 14
  misc_feature: MA Experiment 20000173 PARAMETER Experiment Name: At_42deg_Heat_P Parameter: Organism Value: A. thaliana
  misc_feature: MA Experiment 20000173 PARAMETER Experiment Name: At_42deg_Heat_P Parameter: Plant Line Value: WS
  misc_feature: MA Experiment 20000173 PARAMETER Experiment Name: At_42deg_Heat_P Parameter: Temperature (deg C) Value: 42 vs. 22
  misc_feature: MA Experiment 20000173 PARAMETER Experiment Name: At_42deg_Heat_P Parameter: Timepoint (hr) Value: 6
  misc_feature: MA Experiment 20000173 PARAMETER Experiment Name: At_42deg_Heat_P Parameter: Tissue Value: Aerial
  misc_feature: MA Experiment ID: 20000184 Result: Down-regulated in Transcription
  misc_feature: MA Experiment 20000184 PARAMETER Experiment Name: At_Shoots__P Parameter: Age (day) Value: 7
  misc_feature: MA Experiment 20000184 PARAMETER Experiment Name: At_Shoots__P Parameter: Tissue Value: Shoots vs. Whole Plant
  misc_feature: MA Experiment ID: 20000185 Result: Down-regulated in Transcription
  misc_feature: MA Experiment 20000185 PARAMETER Experiment Name: At_Roots__P Parameter: Age (day) Value: 7 vs. 21
  misc_feature: MA Experiment 20000185 PARAMETER Experiment Name: At_Roots__P Parameter: Organism Value: A. thaliana
  misc_feature: MA Experiment 20000185 PARAMETER Experiment Name: At_Roots__P Parameter: Tissue Value: Roots vs. Whole Plant
  misc_feature: MA Experiment ID: 20000227 Result: Up-regulated in Transcription
  misc_feature: MA Experiment 20000227 PARAMETER Experiment Name: At_Root-Tips-vs-Tops_P Parameter: Tissue Value: Root Tips vs. Root Tops
  misc_feature: MA Experiment ID: 20000234 Result: Up-regulated in Transcription
  misc_feature: MA Experiment 20000234 PARAMETER Experiment Name: At_Siliques_P Parameter: Age (day) Value: 21
  misc_feature: MA Experiment 20000234 PARAMETER Experiment Name: At_Siliques_P Parameter: Organism Value: A. thaliana
  misc_feature: MA Experiment 20000234 PARAMETER Experiment Name: At_Siliques_P Parameter: Plant Line Value: WS
  misc_feature: MA Experiment 20000234 PARAMETER Experiment Name: At_Siliques_P Parameter: Tissue Value: Less Than 5mm Siliques vs. Whole Plant
  misc_feature: MA Experiment ID: 20000235 Result: Up-regulated in Transcription
  misc_feature: MA Experiment 20000235 PARAMETER Experiment Name: At_Siliques_P Parameter: Age (day) Value: 21
  misc_feature: MA Experiment 20000235 PARAMETER Experiment Name: At_Siliques_P Parameter: Organism Value: A. thaliana
  misc_feature: MA Experiment 20000235 PARAMETER Experiment Name: At_Siliques_P Parameter: Plant Line Value: WS
  misc_feature: MA Experiment 20000235 PARAMETER Experiment Name: At_Siliques_P Parameter: Tissue Value: 5-10mm Siliques vs. Whole Plant
  misc_feature: MA Experiment ID: 20000438 Result: Down-regulated in Transcription
  misc_feature: MA Experiment 20000438 PARAMETER Experiment Name: At_Shoots__P Parameter: Age (day) Value: 14
  misc_feature: MA Experiment 20000438 PARAMETER Experiment Name: At_Shoots__P Parameter: Tissue Value: Shoots vs. Whole Plant
  misc_feature: MA Experiment ID: 20000439 Result: Down-regulated in Transcription
  misc_feature: MA Experiment 20000439 PARAMETER Experiment Name: At_Roots__P Parameter: Age (day) Value: 14 vs. 21
  misc_feature: MA Experiment 20000439 PARAMETER Experiment Name: At_Roots__P Parameter: Organism Value: A. thaliana
  misc_feature: MA Experiment 20000439 PARAMETER Experiment Name: At_Roots__P Parameter: Tissue Value: Roots vs. Whole Plant
  misc_feature: MA Experiment ID: 20001248 Result: Up-regulated in Transcription
  misc_feature: MA Experiment 20001248 PARAMETER Experiment Name: At_Far-red-induction_P Parameter: Age (day) Value: 7
  misc_feature: MA Experiment 20001248 PARAMETER Experiment Name: At_Far-red-induction_P Parameter: Light Value: Far-red vs. White
  misc_feature: MA Experiment 20001248 PARAMETER Experiment Name: At_Far-red-induction_P Parameter: Organism Value: A. thaliana
  misc_feature: MA Experiment 20001248 PARAMETER Experiment Name: At_Far-red-induction_P Parameter: Plant Line Value: Columbia
  misc_feature: MA Experiment 20001248 PARAMETER Experiment Name: At_Far-red-induction_P Parameter: Timepoint (hr) Value: 4
  misc_feature: MA Experiment 20001248 PARAMETER Experiment Name: At_Far-red-induction_P Parameter: Tissue Value: Whole Plant
  misc_feature: MA Experiment ID: 20001557 Result: Up-regulated in Transcription
  misc_feature: MA Experiment 20001557 PARAMETER Experiment Name: At_Drought_Soil_Dry_P Parameter: Age (day) Value: 27
  misc_feature: MA Experiment 20001557 PARAMETER Experiment Name: At_Drought_Soil_Dry_P Parameter: Organism Value: A. thaliana
  misc_feature: MA Experiment 20001557 PARAMETER Experiment Name: At_Drought_Soil_Dry_P Parameter: Plant Line Value: WS
  misc_feature: MA Experiment 20001557 PARAMETER Experiment Name: At_Drought_Soil_Dry_P Parameter: Post Timepoint (hr) Value: 3
  misc_feature: MA Experiment 20001557 PARAMETER Experiment Name: At_Drought_Soil_Dry_P Parameter: Post-Treatment Value: Re-Water vs. No Drought
  misc_feature: MA Experiment 20001557 PARAMETER Experiment Name: At_Drought_Soil_Dry_P Parameter: Timepoint (day) Value: 13
  misc_feature: MA Experiment 20001557 PARAMETER Experiment Name: At_Drought_Soil_Dry_P Parameter: Treatment Value: Drought vs. No Drought
  misc_feature: MA Experiment ID: 20001905 Result: Down-regulated in Transcription
  misc_feature: MA Experiment 20001905 PARAMETER Experiment Name: At_Drought_Reproduction_P Parameter: Age (day) Value: 40
  misc_feature: MA Experiment 20001905 PARAMETER Experiment Name: At_Drought_Reproduction_P Parameter: Organism Value: A. thaliana
  misc_feature: MA Experiment 20001905 PARAMETER Experiment Name: At_Drought_Reproduction_P Parameter: Plant Line Value: WS
  misc_feature: MA Experiment 20001905 PARAMETER Experiment Name: At_Drought_Reproduction_P Parameter: Timepoint (day) Value: 10
  misc_feature: MA Experiment 20001905 PARAMETER Experiment Name: At_Drought_Reproduction_P Parameter: Tissue Value: Rosettes
  misc_feature: MA Experiment 20001905 PARAMETER Experiment Name: At_Drought_Reproduction_P Parameter: Treatment Value: Drought vs. No Drought
  misc_feature: MA Experiment ID: 20001906 Result: Down-regulated in Transcription
  misc_feature: MA Experiment 20001906 PARAMETER Experiment Name: At_Drought_Reproduction_P Parameter: Age (day) Value: 35
  misc_feature: MA Experiment 20001906 PARAMETER Experiment Name: At_Drought_Reproduction_P Parameter: Organism Value: A. thaliana
  misc_feature: MA Experiment 20001906 PARAMETER Experiment Name: At_Drought_Reproduction_P Parameter: Plant Line Value: WS
  misc_feature: MA Experiment 20001906 PARAMETER Experiment Name: At_Drought_Reproduction_P Parameter: Timepoint (day) Value: 5
  misc_feature: MA Experiment 20001906 PARAMETER Experiment Name: At_Drought_Reproduction_P Parameter: Tissue Value: Siliques
  misc_feature: MA Experiment 20001906 PARAMETER Experiment Name: At_Drought_Reproduction_P Parameter: Treatment Value: Drought vs. No Drought
  misc_feature: MA Experiment ID: 20001908 Result: Down-regulated in Transcription
  misc_feature: MA Experiment 20001908 PARAMETER Experiment Name: At_Drought_Reproduction_P Parameter: Age (day) Value: 40
  misc_feature: MA Experiment 20001908 PARAMETER Experiment Name: At_Drought_Reproduction_P Parameter: Organism Value: A. thaliana
  misc_feature: MA Experiment 20001908 PARAMETER Experiment Name: At_Drought_Reproduction_P Parameter: Plant Line Value: WS
  misc_feature: MA Experiment 20001908 PARAMETER Experiment Name: At_Drought_Reproduction_P Parameter: Timepoint (day) Value: 10
  misc_feature: MA Experiment 20001908 PARAMETER Experiment Name: At_Drought_Reproduction_P Parameter: Tissue Value: Siliques
  misc_feature: MA Experiment 20001908 PARAMETER Experiment Name: At_Drought_Reproduction_P Parameter: Treatment Value: Drought vs. No Drought
gtcgcagaaaacagagattcctcgctgtctgaactgaaaaataagatcgcattaactcaaaactctcacaaagacaaagatcttctcctccttctcttctctttttcacttttctctcttcccctctctcgaagcttgaaaggtaacaacaatggagaaccctccggatcaaacagagtcaaaggagactcttcaacaacccattacaagaagaagaacaaagggtggtcttctcactatgcccttcatcattgcaaacgaggggttcgagaaagtggcgagctatggattattacagaacatgattctttatctgatgagtgattacagattgggacttgttaaaggacaaactgtcttgttcatgtgggttgctgctactaatttcatgcctctcgttggagcttttctctcagattcatatttgggtcgctttctcaccattgtcattgcttctctctccagtctcctggggatggtggttctatggctaacggcgatgttgccgcaagtaaaaccatcaccgtgtgtagcaacagccggaaccaactgcagttccgcgacatcttctcaattggctctcttgtataccgcattcgcattaatatcgattggatcaggaggaatcaggccatgttctttagcctttggtgctgatcaattggacaacaaagagaatcctaagaacgagagagttcttgagagtttctttggttggtactacgcttcttcatcagttgctgtcttgatcgctttcaccgtcattgtttacattcaagatcatctaggatggaaaatcgggtttggaatacccgcgattctcatgctgctcgcgggtttcttgtttgttttcgcgtctcctctctacgttaagcgcgatgtgagcaagagtctgttcactggtttagctcaagtggttgctgcagcttacgtgaagagaaacttaactttgccggatcatcatgactccagagattgttattaccgtttgaaagattctgaactcaaagctccaagtgacaaattgaggtttttaaacaaagcttgtgccataagtaaccgcgatgaagaccttggttctgatggtttggccttaaaccagtggaggctatgcacaacggaccaagttgagaaactcaaggcgttggtcaaggtgataccggtatggtccacggggataatgatgtcgataaacgttagccagaactcttttcagttgcttcaagctaaatcaatggacagacgtttaagcagcaattcgaccttccaaatcccagctggatcgtttggtatgttcacaatcatagccttaatctcatgggttgttctgtacgaccgcgcaattctccctttagcttcaaagatccgaggcagaccagttagagtcaatgtcaagattcgaatgggattagggctattcatatcattcttagcaatggcggtttccgcaactgttgaacattacagaaggaaaaccgcgataagccaaggactcgcaaacgatgccaactcaacagtgagcatctcagcaatgtggcttgtaccacagtatgtactacacggtttagcagaggccttgaccgggataggacagaccgagtttttctataccgagtttcctaaaagcatgtcgagtatcgcagcttcgttgttcggtctaggaatggcagtggctaatatcttggctagtgtgatcctaaatgcggtaaagaatagctcaaagcagggcaatgtgagctggattgaagataacatcaacaagggtcactatgactattactattgggttttagcgatcttgagcttcgttaatgtcatctactacgttgtgtgtagctggtcctatggtcctacggtggatcaggtgaggaatgataaggttaatggtatgagaaaagaagaagaggaagttattaaattaaactaa

SEQ ID NO: 104202 - protein, 591 aa, Arabidopsis thaliana; identical to SEQ ID NO: 23568
  peptide (1)..(591): Ceres Seq. ID no. 13614505
  misc_feature (95)..(505): Pfam Name: POT family Pfam Description: POT family
  misc_feature (1)..(591): Homolog of NCBI NO: 15233307 NR Description: transport protein -related [Arabidopsis thaliana]
  misc_feature (1)..(579): Homolog of NCBI NO: 20466248 NR Description: putative transport protein [Arabidopsis thaliana]
  misc_feature (51)..(591): Homolog of NCBI NO: 9294465 NR Description: peptide/amino acid transporter-like protein
  misc_feature (1)..(590): Homolog of NCBI NO: 15218183 NR Description: peptide transporter -related [Arabidopsis
  misc_feature (14)..(590): Homolog of NCBI NO: 34909754 NR Description: putative peptide transporter [Oryza sativa
  misc_feature (12)..(566): Homolog of NCBI NO: 34909752 NR Description: putative peptide transporter [Oryza sativa
  misc_feature (1)..(293): Homolog of NCBI NO: 21536862 NR Description: unknown [Arabidopsis thaliana]
  misc_feature (6)..(586): Homolog of NCBI NO: 15391731 NR Description: nitrite transporter [Cucumis sativus]
  misc_feature (1)..(585): Homolog of NCBI NO: 15221439 NR Description: peptide transporter -related [Arabidopsis
  misc_feature (316)..(566): Homolog of NCBI NO: 15239084 NR Description: oligopeptide transporter protein -related

SEQ ID NO: 104203 - protein, 562 aa, Arabidopsis thaliana; identical to SEQ ID NO: 23569
  peptide (1)..(562): Ceres Seq. ID no. 13614506
  misc_feature (66)..(476): Pfam Name: POT family Pfam Description: POT family
  misc_feature (1)..(562): Homolog of NCBI NO: 15233307 NR Description: transport protein -related [Arabidopsis thaliana]
  misc_feature (1)..(550): Homolog of NCBI NO: 20466248 NR Description: putative transport protein [Arabidopsis thaliana]
  misc_feature (22)..(562): Homolog of NCBI NO: 9294465 NR Description: peptide/amino acid transporter-like protein
  misc_feature (1)..(561): Homolog of NCBI NO: 15218183 NR Description: peptide transporter -related [Arabidopsis
  misc_feature (1)..(561): Homolog of NCBI NO: 34909754 NR Description: putative peptide transporter [Oryza sativa
  misc_feature (1)..(537): Homolog of NCBI NO: 34909752 NR Description: putative peptide transporter [Oryza sativa
  misc_feature (1)..(264): Homolog of NCBI NO: 21536862 NR Description: unknown [Arabidopsis thaliana]
  misc_feature (1)..(557): Homolog of NCBI NO: 15391731 NR Description: nitrite transporter [Cucumis sativus]
  misc_feature (1)..(556): Homolog of NCBI NO: 15221439 NR Description: peptide transporter -related [Arabidopsis
  misc_feature (287)..(537): Homolog of NCBI NO: 15239084 NR Description: oligopeptide transporter protein -related

SEQ ID NO: 104204 - protein, 541 aa, Arabidopsis thaliana; identical to SEQ ID NO: 23570
  peptide (1)..(541): Ceres Seq. ID no. 13614507
  misc_feature (45)..(455): Pfam Name: POT family Pfam Description: POT family
  misc_feature (1)..(541): Homolog of NCBI NO: 15233307 NR Description: transport protein -related [Arabidopsis thaliana]
  misc_feature (1)..(529): Homolog of NCBI NO: 20466248 NR Description: putative transport protein [Arabidopsis thaliana]
  misc_feature (1)..(541): Homolog of NCBI NO: 9294465 NR Description: peptide/amino acid transporter-like protein
  misc_feature (1)..(540): Homolog of NCBI NO: 15218183 NR Description: peptide transporter -related [Arabidopsis
  misc_feature (1)..(540): Homolog of NCBI NO: 34909754 NR Description: putative peptide transporter [Oryza sativa
  misc_feature (1)..(516): Homolog of NCBI NO: 34909752 NR Description: putative peptide transporter [Oryza sativa
  misc_feature (1)..(243): Homolog of NCBI NO: 21536862 NR Description: unknown [Arabidopsis thaliana]
  misc_feature (1)..(536): Homolog of NCBI NO: 15391731 NR Description: nitrite transporter [Cucumis sativus]
  misc_feature (1)..(535): Homolog of NCBI NO: 15221439 NR Description: peptide transporter -related [Arabidopsis
  misc_feature (266)..(516): Homolog of NCBI NO: 15239084 NR Description: oligopeptide transporter protein -related

SEQ ID NO: 104205 - DNA, 1536 bp, Arabidopsis thaliana
  misc_feature (1)..(1536): Ceres Seq. ID no. 13614515
  misc_feature: MA Experiment ID: 108462 Result: Up-regulated in Transcription
  misc_feature: MA Experiment 108462 PARAMETER Experiment Name: At_Germinating_Seeds_cDNA_P Parameter: Age (day) Value: 2 vs. 0
  misc_feature: MA Experiment 108462 PARAMETER Experiment Name: At_Germinating_Seeds_cDNA_P Parameter: Tissue Value: Germinating Seeds
  misc_feature: MA Experiment ID: 108463 Result: Up-regulated in Transcription
  misc_feature: MA Experiment 108463 PARAMETER Experiment Name: At_Germinating_Seeds_cDNA_P Parameter: Age (day) Value: 3 vs. 0
  misc_feature: MA Experiment 108463 PARAMETER Experiment Name: At_Germinating_Seeds_cDNA_P Parameter: Tissue Value: Germinating Seeds
  misc_feature: MA Experiment ID: 108464 Result: Up-regulated in Transcription
  misc_feature: MA Experiment 108464 PARAMETER Experiment Name: At_Germinating_Seeds_cDNA_P Parameter: Age (day) Value: 4 vs. 0
  misc_feature: MA Experiment 108464 PARAMETER Experiment Name: At_Germinating_Seeds_cDNA_P Parameter: Tissue Value: Germinating Seeds
  misc_feature: MA Experiment ID: 108577 Result: Down-regulated in Transcription
  misc_feature: MA Experiment 108577 PARAMETER Experiment Name: At_42deg_Heat_cDNA_P Parameter: Temperature (deg C) Value: 42 vs. 22
  misc_feature: MA Experiment 108577 PARAMETER Experiment Name: At_42deg_Heat_cDNA_P Parameter: Timepoint (hr) Value: 6
  misc_feature: MA Experiment 108577 PARAMETER Experiment Name: At_42deg_Heat_cDNA_P Parameter: Tissue Value: Aerial
  misc_feature: MA Experiment ID: 108595 Result: Down-regulated in Transcription
  misc_feature: MA Experiment 108595 PARAMETER Experiment Name: At_Ler-pi_Ovule_cDNA_P Parameter: Plant Line Value: null
  misc_feature: MA Experiment ID: 20000113 Result: Down-regulated in Transcription
  misc_feature: MA Experiment 20000113 PARAMETER Experiment Name: At_42deg_Heat_cDNA_P Parameter: Temperature (deg C) Value: 42 vs. 22
  misc_feature: MA Experiment 20000113 PARAMETER Experiment Name: At_42deg_Heat_cDNA_P Parameter: Timepoint (hr) Value: 8
  misc_feature: MA Experiment 20000113 PARAMETER Experiment Name: At_42deg_Heat_cDNA_P Parameter: Tissue Value: Aerial
  misc_feature: MA Experiment ID: 20000179 Result: Down-regulated in Transcription
  misc_feature: MA Experiment 20000179 PARAMETER Experiment Name: At_Germinating_Seeds_P Parameter: Age (hr) Value: 6 vs. 0
  misc_feature: MA Experiment 20000179 PARAMETER Experiment Name: At_Germinating_Seeds_P Parameter: Tissue Value: Germinating Seeds
  misc_feature: MA Experiment ID: 20000184 Result: Up-regulated in Transcription
  misc_feature: MA Experiment 20000184 PARAMETER Experiment Name: At_Shoots__P Parameter: Age (day) Value: 7
  misc_feature: MA Experiment 20000184 PARAMETER Experiment Name: At_Shoots__P Parameter: Tissue Value: Shoots vs. Whole Plant
  misc_feature: MA Experiment ID: 20000185 Result: Down-regulated in Transcription
  misc_feature: MA Experiment 20000185 PARAMETER Experiment Name: At_Roots__P Parameter: Age (day) Value: 7 vs. 21
  misc_feature: MA Experiment 20000185 PARAMETER Experiment Name: At_Roots__P Parameter: Organism Value: A. thaliana
  misc_feature: MA Experiment 20000185 PARAMETER Experiment Name: At_Roots__P Parameter: Tissue Value: Roots vs. Whole Plant
  misc_feature: MA Experiment ID: 20000438 Result: Up-regulated in Transcription
  misc_feature: MA Experiment 20000438 PARAMETER Experiment Name: At_Shoots__P Parameter: Age (day) Value: 14
  misc_feature: MA Experiment 20000438 PARAMETER Experiment Name: At_Shoots__P Parameter: Tissue Value: Shoots vs. Whole Plant
  misc_feature: MA Experiment ID: 20000439 Result: Down-regulated in Transcription
  misc_feature: MA Experiment 20000439 PARAMETER Experiment Name: At_Roots__P Parameter: Age (day) Value: 14 vs. 21
  misc_feature: MA Experiment 20000439 PARAMETER Experiment Name: At_Roots__P Parameter: Organism Value: A. thaliana
  misc_feature: MA Experiment 20000439 PARAMETER Experiment Name: At_Roots__P Parameter: Tissue Value: Roots vs. Whole Plant
  misc_feature: MA Experiment ID: 20000573 Result: Down-regulated in Transcription
  misc_feature: MA Experiment 20000573 PARAMETER Experiment Name: At_100uM_ABA_Mutants__P Parameter: Organism Value: A. thaliana
  misc_feature: MA Experiment 20000573 PARAMETER Experiment Name: At_100uM_ABA_Mutants__P Parameter: Plant Line Value: CS22 vs. Ler wt
  misc_feature: MA Experiment 20000573 PARAMETER Experiment Name: At_100uM_ABA_Mutants__P Parameter: Timepoint (hr) Value: N/A
  misc_feature: MA Experiment 20000573 PARAMETER Experiment Name: At_100uM_ABA_Mutants__P Parameter: Tissue Value: Whole Plant
  misc_feature: MA Experiment 20000573 PARAMETER Experiment Name: At_100uM_ABA_Mutants__P Parameter: Treatment Value: None
  misc_feature: MA Experiment ID: 20000574 Result: Down-regulated in Transcription
  misc_feature: MA Experiment 20000574 PARAMETER Experiment Name: At_100uM_ABA_Mutants__P Parameter: Organism Value: A. thaliana
  misc_feature: MA Experiment 20000574 PARAMETER Experiment Name: At_100uM_ABA_Mutants__P Parameter: Plant Line Value: CS23 vs. Ler wt
  misc_feature: MA Experiment 20000574 PARAMETER Experiment Name: At_100uM_ABA_Mutants__P Parameter: Timepoint (hr) Value: N/A
  misc_feature: MA Experiment 20000574 PARAMETER Experiment Name: At_100uM_ABA_Mutants__P Parameter: Tissue Value: Whole Plant
  misc_feature: MA Experiment 20000574 PARAMETER Experiment Name: At_100uM_ABA_Mutants__P Parameter: Treatment Value: None
  misc_feature: MA Experiment ID: 20001248 Result: Down-regulated in Transcription
  misc_feature: MA Experiment 20001248 PARAMETER Experiment Name: At_Far-red-induction_P Parameter: Age (day) Value: 7
  misc_feature: MA Experiment 20001248 PARAMETER Experiment Name: At_Far-red-induction_P Parameter: Light Value: Far-red vs. White
  misc_feature: MA Experiment 20001248 PARAMETER Experiment Name: At_Far-red-induction_P Parameter: Organism Value: A. thaliana
  misc_feature: MA Experiment 20001248 PARAMETER Experiment Name: At_Far-red-induction_P Parameter: Plant Line Value: Columbia
  misc_feature: MA Experiment 20001248 PARAMETER Experiment Name: At_Far-red-induction_P Parameter: Timepoint (hr) Value: 4
  misc_feature: MA Experiment 20001248 PARAMETER Experiment Name: At_Far-red-induction_P Parameter: Tissue Value: Whole Plant
  misc_feature: MA Experiment ID: 20001559 Result: Down-regulated in Transcription
  misc_feature: MA Experiment 20001559 PARAMETER Experiment Name: At_Drought_Soil_Dry_P Parameter: Age (day) Value: 28
  misc_feature: MA Experiment 20001559 PARAMETER Experiment Name: At_Drought_Soil_Dry_P Parameter: Organism Value: A. thaliana
  misc_feature: MA Experiment 20001559 PARAMETER Experiment Name: At_Drought_Soil_Dry_P Parameter: Plant Line Value: WS
  misc_feature: MA Experiment 20001559 PARAMETER Experiment Name: At_Drought_Soil_Dry_P Parameter: Post Timepoint (hr) Value: 29
  misc_feature: MA Experiment 20001559 PARAMETER Experiment Name: At_Drought_Soil_Dry_P Parameter: Post-Treatment Value: Re-Water vs. No Drought
  misc_feature: MA Experiment 20001559 PARAMETER Experiment Name: At_Drought_Soil_Dry_P Parameter: Timepoint (day) Value: 14
  misc_feature: MA Experiment 20001559 PARAMETER Experiment Name: At_Drought_Soil_Dry_P Parameter: Treatment Value: Drought vs. No Drought
  misc_feature: MA Experiment ID: 20001905 Result: Down-regulated in Transcription
  misc_feature: MA Experiment 20001905 PARAMETER Experiment Name: At_Drought_Reproduction_P Parameter: Age (day) Value: 40
  misc_feature: MA Experiment 20001905 PARAMETER Experiment Name: At_Drought_Reproduction_P Parameter: Organism Value: A. thaliana
  misc_feature: MA Experiment 20001905 PARAMETER Experiment Name: At_Drought_Reproduction_P Parameter: Plant Line Value: WS
  misc_feature: MA Experiment 20001905 PARAMETER Experiment Name: At_Drought_Reproduction_P Parameter: Timepoint (day) Value: 10
  misc_feature: MA Experiment 20001905 PARAMETER Experiment Name: At_Drought_Reproduction_P Parameter: Tissue Value: Rosettes
  misc_feature: MA Experiment 20001905 PARAMETER Experiment Name: At_Drought_Reproduction_P Parameter: Treatment Value: Drought vs. No Drought
  misc_feature: MA Experiment ID: 20001906 Result: Down-regulated in Transcription
  misc_feature: MA Experiment 20001906 PARAMETER Experiment Name: At_Drought_Reproduction_P Parameter: Age (day) Value: 35
  misc_feature: MA Experiment 20001906 PARAMETER Experiment Name: At_Drought_Reproduction_P Parameter: Organism Value: A. thaliana
  misc_feature: MA Experiment 20001906 PARAMETER Experiment Name: At_Drought_Reproduction_P Parameter: Plant Line Value: WS
  misc_feature: MA Experiment 20001906 PARAMETER Experiment Name: At_Drought_Reproduction_P Parameter: Timepoint (day) Value: 5
  misc_feature: MA Experiment 20001906 PARAMETER Experiment Name: At_Drought_Reproduction_P Parameter: Tissue Value: Siliques
  misc_feature: MA Experiment 20001906 PARAMETER Experiment Name: At_Drought_Reproduction_P Parameter: Treatment Value: Drought vs. No Drought
  misc_feature: MA Experiment ID: 20001908 Result: Down-regulated in Transcription
  misc_feature: MA Experiment 20001908 PARAMETER Experiment Name: At_Drought_Reproduction_P Parameter: Age (day) Value: 40
  misc_feature: MA Experiment 20001908 PARAMETER Experiment Name: At_Drought_Reproduction_P Parameter: Organism Value: A. thaliana
  misc_feature: MA Experiment 20001908 PARAMETER Experiment Name: At_Drought_Reproduction_P Parameter: Plant Line Value: WS
  misc_feature: MA Experiment 20001908 PARAMETER Experiment Name: At_Drought_Reproduction_P Parameter: Timepoint (day) Value: 10
  misc_feature: MA Experiment 20001908 PARAMETER Experiment Name: At_Drought_Reproduction_P Parameter: Tissue Value: Siliques
  misc_feature: MA Experiment 20001908 PARAMETER Experiment Name: At_Drought_Reproduction_P Parameter: Treatment Value: Drought vs. No Drought
caaaccttaggaagagccatgggtgaagaagctatagttctgtatcctgcaccaccaataggtcacttagtgtccatggttgagttaggtaaaaccatcctctccaaaaacccatctctctccatccacattatcttagttccaccgccttatcagccggaatcaaccgccacttacatctcctccgtctcctcctccttcccttcaataaccttccaccatcttcccgccgtcacaccgtactcctcctcctccacctctcgccaccaccacgaatctctcctcctagagatcctctgttttagcaacccaagtgtccaccgaactcttttctcactctctcggaatttcaatgtccgagcaatgatcatcgatttcttctgcaccgccgttttagacatcaccgctgacttcacgttcccggtttacttcttctacacctctggagccgcatgtctcgccttttccttctatctcccgaccatcgacgaaacaacccccggaaaaaacctcaaagacattcctacagttcatatccccggcgttcctccgatgaagggctccgatatgcctaaggcggtgctcgaacgagacgatgaggtctacgatgtttttataatgttcggtaaacagctctcgaagtcgtcagggattattatcaatacgtttgatgctttagaaaacagagccatcaaggccataacagaggagctctgttttcgcaatatttatccaattggaccgctcattgtaaacggaagaatcgaagatagaaacgacaacaaggcagtttcttgtctcaattggctggattcgcagccggaaaagagtgttgtgtttctctgttttggaagcttaggtttgttctcaaaagaacaggtgatagagattgctgttggtttagagaaaagtgggcagagattcttgtgggtggtccgtaatccacccgagttagaaaagacagaactggatttgaaatcactcttaccagaaggattcttaagccgaaccgaagacaaagggatggtcgtgaaatcatgggctccgcaagttccggttctgaatcataaagcagtcgggggattcgtcactcattgcggttggaattcaattcttgaagctgtttgtgctggtgtgccgatggtggcttggccgttgtacgctgagcagaggtttaatagagtgatgattgtggatgagatcaagattgcgatttcgatgaatgaatcagagacgggtttcgtgagctctacagaggtggagaaacgagtccaagagataattggggagtgtccggttagggagcgaaccatggctatgaagaacgcagccgaattagccttgacagaaactggttcgtctcataccgcattaactactttactccagtcgtggagcccaaagtgatctttgaaattaagtcttgcatcaattaataactttgtagtctctcagaatcatgtctttgggggttattcgttttactagttcaaagttatgtctctgagaccgcagatggaaagaacaatttatatc

SEQ ID NO: 104206 - protein, 468 aa, Arabidopsis thaliana
  peptide (1)..(468): Ceres Seq. ID no. 13614516
  misc_feature (11)..(468): Pfam Name: UDP-glucoronosyl and UDP-glucosyl transferase Pfam Description: UDP-glucoronosyl and UDP-glucosyl transferase
  misc_feature (7)..(468): Homolog of NCBI NO: 18401158 NR Description: glycosyltransferase family [Arabidopsis thaliana]
  misc_feature (7)..(468): Homolog of NCBI NO: 21593785 NR Description: putative glucosyltransferase [Arabidopsis
  misc_feature (7)..(451): Homolog of NCBI NO: 18401155 NR Description: glycosyltransferase family [Arabidopsis thaliana]
  misc_feature (7)..(451): Homolog of NCBI NO: 30684106 NR Description: glycosyltransferase family [Arabidopsis thaliana]
  misc_feature (12)..(465): Homolog of NCBI NO: 22535568 NR Description: putative glucosyltransferase [Oryza sativa
  misc_feature (7)..(465): Homolog of NCBI NO: 19911189 NR Description: glucosyltransferase-3 [Vigna angularis]
  misc_feature (9)..(465): Homolog of NCBI NO: 19911193 NR Description: glucosyltransferase-5 [Vigna angularis]
  misc_feature (9)..(463): Homolog of NCBI NO: 34910204 NR Description: putative flavonol glucosyltransferase [Oryza
  misc_feature (13)..(465): Homolog of NCBI NO: 34910208 NR Description: putative flavonol glucosyltransferase [Oryza
  misc_feature (97)..(416): Homolog of NCBI NO: 17484017 NR Description: UDP-glycosyltransfersase [Jatropha curcas]
QTLGRAMGEEAIVLYPAPPIGHLVSMVELGKTILSKNPSLSIHIILVPPPYQPESTATYISSVSSSFPSITFHHLPAVTPYSSSSTSRHHHESLLLEILCFSNPSVHRTLFSLSRNFNVRAMIIDFFCTAVLDITADFTFPVYFFYTSGAACLAFSFYLPTIDETTPGKNLKDIPTVHIPGVPPMKGSDMPKAVLERDDEVYDVFIMFGKQLSKSSGIIINTFDALENRAIKAITEELCFRNIYPIGPLIVNGRIEDRNDNKAVSCLNWLDSQPEKSVVFLCFGSLGLFSKEQVIEIAVGLEKSGQRFLWVVRNPPELEKTELDLKSLLPEGFLSRTEDKGMVVKSWAPQVPVLNHKAVGGFVTHCGWNSILEAVCAGVPMVAWPLYAEQRFNRVMIVDEIKIAISMNESETGFVSSTEVEKRVQEIIGECPVRERTMAMKNAAELALTETGSSHTALTTLLQSWSPK

SEQ ID NO: 104207 - protein, 462 aa, Arabidopsis thaliana; identical to SEQ ID NO: 37909
  peptide (1)..(462): Ceres Seq. ID no. 13614517
  misc_feature (5)..(462): Pfam Name: UDP-glucoronosyl and UDP-glucosyl transferase Pfam Description: UDP-glucoronosyl and UDP-glucosyl transferase
  misc_feature (1)..(462): Homolog of NCBI NO: 18401158 NR Description: glycosyltransferase family [Arabidopsis thaliana]
  misc_feature (1)..(462): Homolog of NCBI NO: 21593785 NR Description: putative glucosyltransferase [Arabidopsis
  misc_feature (1)..(445): Homolog of NCBI NO: 18401155 NR Description: glycosyltransferase family [Arabidopsis thaliana]
  misc_feature (1)..(445): Homolog of NCBI NO: 30684106 NR Description: glycosyltransferase family [Arabidopsis thaliana]
  misc_feature (6)..(459): Homolog of NCBI NO: 22535568 NR Description: putative glucosyltransferase [Oryza sativa
  misc_feature (1)..(459): Homolog of NCBI NO: 19911189 NR Description: glucosyltransferase-3 [Vigna angularis]
  misc_feature (3)..(459): Homolog of NCBI NO: 19911193 NR Description: glucosyltransferase-5 [Vigna angularis]
  misc_feature (3)..(457): Homolog of NCBI NO: 34910204 NR Description: putative flavonol glucosyltransferase [Oryza
  misc_feature (7)..(459): Homolog of NCBI NO: 34910208 NR Description: putative flavonol glucosyltransferase [Oryza
  misc_feature (91)..(410): Homolog of NCBI NO: 17484017 NR Description: UDP-glycosyltransfersase [Jatropha curcas]

SEQ ID NO: 104208 - protein, 443 aa, Arabidopsis thaliana; identical to SEQ ID NO: 37910
  peptide (1)..(443): Ceres Seq. ID no. 13614518
  misc_feature (1)..(443): Pfam Name: UDP-glucoronosyl and UDP-glucosyl transferase Pfam Description: UDP-glucoronosyl and UDP-glucosyl transferase
  misc_feature (1)..(443): Homolog of NCBI NO: 18401158 NR Description: glycosyltransferase family [Arabidopsis thaliana]
  misc_feature (1)..(443): Homolog of NCBI NO: 21593785 NR Description: putative glucosyltransferase [Arabidopsis
  misc_feature (1)..(426): Homolog of NCBI NO: 18401155 NR Description: glycosyltransferase family [Arabidopsis thaliana]
  misc_feature (1)..(426): Homolog of NCBI NO: 30684106 NR Description: glycosyltransferase family [Arabidopsis thaliana]
  misc_feature (1)..(440): Homolog of NCBI NO: 22535568 NR Description: putative glucosyltransferase [Oryza sativa
  misc_feature (1)..(440): Homolog of NCBI NO: 19911189 NR Description: glucosyltransferase-3 [Vigna angularis]
  misc_feature (1)..(440): Homolog of NCBI NO: 19911193 NR Description: glucosyltransferase-5 [Vigna angularis]
  misc_feature (1)..(438): Homolog of NCBI NO: 34910204 NR Description: putative flavonol glucosyltransferase [Oryza
  misc_feature (1)..(440): Homolog of NCBI NO: 34910208 NR Description: putative flavonol glucosyltransferase [Oryza
  misc_feature (72)..(391): Homolog of NCBI NO: 17484017 NR Description: UDP-glycosyltransfersase [Jatropha curcas]

SEQ ID NO: 104209 - DNA, 1390 bp, Arabidopsis thaliana
  misc_feature (1)..(1390): Ceres Seq. ID no. 13614527
  misc_feature: MA Experiment ID: 108434 Result: Down-regulated in Transcription
  misc_feature: MA Experiment 108434 PARAMETER Experiment Name: At_Root_Tips_cDNA_P Parameter: Tissue Value: Root Tips
  misc_feature: MA Experiment ID: 108463 Result: Up-regulated in Transcription
  misc_feature: MA Experiment 108463 PARAMETER Experiment Name: At_Germinating_Seeds_cDNA_P Parameter: Age (day) Value: 3 vs. 0
  misc_feature: MA Experiment 108463 PARAMETER Experiment Name: At_Germinating_Seeds_cDNA_P Parameter: Tissue Value: Germinating Seeds
  misc_feature: MA Experiment ID: 108577 Result: Down-regulated in Transcription
  misc_feature: MA Experiment 108577 PARAMETER Experiment Name: At_42deg_Heat_cDNA_P Parameter: Temperature (deg C) Value: 42 vs. 22
  misc_feature: MA Experiment 108577 PARAMETER Experiment Name: At_42deg_Heat_cDNA_P Parameter: Timepoint (hr) Value: 6
  misc_feature: MA Experiment 108577 PARAMETER Experiment Name: At_42deg_Heat_cDNA_P Parameter: Tissue Value: Aerial
  misc_feature: MA Experiment ID: 108585 Result: Up-regulated in Transcription
  misc_feature: MA Experiment 108585 PARAMETER Experiment Name: At_5mM_NaNP_cDNA_P Parameter: Timepoint (hr) Value: 6
  misc_feature: MA Experiment 108585 PARAMETER Experiment Name: At_5mM_NaNP_cDNA_P Parameter: Tissue Value: Aerial
  misc_feature: MA Experiment 108585 PARAMETER Experiment Name: At_5mM_NaNP_cDNA_P Parameter: Treatment Value: null
  misc_feature: MA Experiment ID: 20000111 Result: Down-regulated in Transcription
  misc_feature: MA Experiment 20000111 PARAMETER Experiment Name: At_42deg_Heat_cDNA_P Parameter: Temperature (deg C) Value: 42 vs. 22
  misc_feature: MA Experiment 20000111 PARAMETER Experiment Name: At_42deg_Heat_cDNA_P Parameter: Timepoint (hr) Value: 6
  misc_feature: MA Experiment 20000111 PARAMETER Experiment Name: At_42deg_Heat_cDNA_P Parameter: Tissue Value: Aerial
  misc_feature: MA Experiment ID: 20000113 Result: Down-regulated in Transcription
  misc_feature: MA Experiment 20000113 PARAMETER Experiment Name: At_42deg_Heat_cDNA_P Parameter: Temperature (deg C) Value: 42 vs. 22
  misc_feature: MA Experiment 20000113 PARAMETER Experiment Name: At_42deg_Heat_cDNA_P Parameter: Timepoint (hr) Value: 8
  misc_feature: MA Experiment 20000113 PARAMETER Experiment Name: At_42deg_Heat_cDNA_P Parameter: Tissue Value: Aerial
  misc_feature: MA Experiment ID: 20000144 Result: Down-regulated in Transcription
  misc_feature: MA Experiment 20000144 PARAMETER Experiment Name: At_42deg_Heat_cDNA_P Parameter: Temperature (deg C) Value: 42 vs. 22
  misc_feature: MA Experiment 20000144 PARAMETER Experiment Name: At_42deg_Heat_cDNA_P Parameter: Timepoint (hr) Value: 1
  misc_feature: MA Experiment 20000144 PARAMETER Experiment Name: At_42deg_Heat_cDNA_P Parameter: Tissue Value: Aerial
  misc_feature: MA Experiment ID: 20000171 Result: Down-regulated in Transcription
  misc_feature: MA Experiment 20000171 PARAMETER Experiment Name: At_42deg_Heat_P Parameter: Age (day) Value: 14
  misc_feature: MA Experiment 20000171 PARAMETER Experiment Name: At_42deg_Heat_P Parameter: Organism Value: A. thaliana
  misc_feature: MA Experiment 20000171 PARAMETER Experiment Name: At_42deg_Heat_P Parameter: Plant Line Value: WS
  misc_feature: MA Experiment 20000171 PARAMETER Experiment Name: At_42deg_Heat_P Parameter: Temperature (deg C) Value: 42 vs. 22
  misc_feature: MA Experiment 20000171 PARAMETER Experiment Name: At_42deg_Heat_P Parameter: Timepoint (hr) Value: 1
  misc_feature: MA Experiment 20000171 PARAMETER Experiment Name: At_42deg_Heat_P Parameter: Tissue Value: Aerial
  misc_feature: MA Experiment ID: 20000173 Result: Down-regulated in Transcription
  misc_feature: MA Experiment 20000173 PARAMETER Experiment Name: At_42deg_Heat_P Parameter: Age (day) Value: 14
  misc_feature: MA Experiment 20000173 PARAMETER Experiment Name: At_42deg_Heat_P Parameter: Organism Value: A. thaliana
  misc_feature: MA Experiment 20000173 PARAMETER Experiment Name: At_42deg_Heat_P Parameter: Plant Line Value: WS
  misc_feature: MA Experiment 20000173 PARAMETER Experiment Name: At_42deg_Heat_P Parameter: Temperature (deg C) Value: 42 vs. 22
  misc_feature: MA Experiment 20000173 PARAMETER Experiment Name: At_42deg_Heat_P Parameter: Timepoint (hr) Value: 6
  misc_feature: MA Experiment 20000173 PARAMETER Experiment Name: At_42deg_Heat_P Parameter: Tissue Value: Aerial
  misc_feature: MA Experiment ID: 20000185 Result: Down-regulated in Transcription
  misc_feature: MA Experiment 20000185 PARAMETER Experiment Name: At_Roots__P Parameter: Age (day) Value: 7 vs. 21
  misc_feature: MA Experiment 20000185 PARAMETER Experiment Name: At_Roots__P Parameter: Organism Value: A. thaliana
  misc_feature: MA Experiment 20000185 PARAMETER Experiment Name: At_Roots__P Parameter: Tissue Value: Roots vs. Whole Plant
  misc_feature: MA Experiment ID: 20000234 Result: Down-regulated in Transcription
  misc_feature: MA Experiment 20000234 PARAMETER Experiment Name: At_Siliques_P Parameter: Age (day) Value: 21
  misc_feature: MA Experiment 20000234 PARAMETER Experiment Name: At_Siliques_P Parameter: Organism Value: A. thaliana
  misc_feature: MA Experiment 20000234 PARAMETER Experiment Name: At_Siliques_P Parameter: Plant Line Value: WS
  misc_feature: MA Experiment 20000234 PARAMETER Experiment Name: At_Siliques_P Parameter: Tissue Value: Less Than 5mm Siliques vs. Whole Plant
  misc_feature: MA Experiment ID: 20000235 Result: Down-regulated in Transcription
  misc_feature: MA Experiment 20000235 PARAMETER Experiment Name: At_Siliques_P Parameter: Age (day) Value: 21
  misc_feature: MA Experiment 20000235 PARAMETER Experiment Name: At_Siliques_P Parameter: Organism Value: A. thaliana
  misc_feature: MA Experiment 20000235 PARAMETER Experiment Name: At_Siliques_P Parameter: Plant Line Value: WS
  misc_feature: MA Experiment 20000235 PARAMETER Experiment Name: At_Siliques_P Parameter: Tissue Value: 5-10mm Siliques vs. Whole Plant
  misc_feature: MA Experiment ID: 20000264 Result: Down-regulated in Transcription
  misc_feature: MA Experiment 20000264 PARAMETER Experiment Name: At_Open_Flower_P Parameter: Age (day) Value: 21
  misc_feature: MA Experiment 20000264 PARAMETER Experiment Name: At_Open_Flower_P Parameter: Plant Line Value: WS
  misc_feature: MA Experiment 20000264 PARAMETER Experiment Name: At_Open_Flower_P Parameter: Tissue Value: Open Flower vs. Whole Plant
  misc_feature: MA Experiment ID: 20000265 Result: Down-regulated in Transcription
  misc_feature: MA Experiment 20000265 PARAMETER Experiment Name: At_Open_Flower_P Parameter: Age (day) Value: 21
  misc_feature: MA Experiment 20000265 PARAMETER Experiment Name: At_Open_Flower_P Parameter: Plant Line Value: WS
  misc_feature: MA Experiment 20000265 PARAMETER Experiment Name: At_Open_Flower_P Parameter: Tissue Value: Closed Flower vs. Whole Plant
  misc_feature: MA Experiment ID: 20000268 Result: Down-regulated in Transcription
  misc_feature: MA Experiment 20000268 PARAMETER Experiment Name: At_100mM_NaCl__P Parameter: Age (day) Value: 14
  misc_feature: MA Experiment 20000268 PARAMETER Experiment Name: At_100mM_NaCl__P Parameter: Organism Value: A. thaliana
  misc_feature: MA Experiment 20000268 PARAMETER Experiment Name: At_100mM_NaCl__P Parameter: Plant Line Value: WS
  misc_feature: MA Experiment 20000268 PARAMETER Experiment Name: At_100mM_NaCl__P Parameter: Timepoint (hr) Value: 6
  misc_feature: MA Experiment 20000268 PARAMETER Experiment Name: At_100mM_NaCl__P Parameter: Tissue Value: Whole Plant
  misc_feature: MA Experiment 20000268 PARAMETER Experiment Name: At_100mM_NaCl__P Parameter: Treatment Value: 100mM NaCl vs. No Treatment
  misc_feature: MA Experiment ID: 20000286 Result: Down-regulated in Transcription
  misc_feature: MA Experiment 20000286 PARAMETER Experiment Name: At_Open_Flower_P Parameter: Age (day) Value: 21
  misc_feature: MA Experiment 20000286 PARAMETER Experiment Name: At_Open_Flower_P Parameter: Plant Line Value: WS
  misc_feature: MA Experiment 20000286 PARAMETER Experiment Name: At_Open_Flower_P Parameter: Tissue Value: Half Open vs. Whole Plant
  misc_feature: MA Experiment ID: 20000437 Result: Down-regulated in Transcription
  misc_feature: MA Experiment 20000437 PARAMETER Experiment Name: At_Drought_P Parameter: Age (day) Value: 8
  misc_feature: MA Experiment 20000437 PARAMETER Experiment Name: At_Drought_P Parameter: Organism Value: A. thaliana
  misc_feature: MA Experiment 20000437 PARAMETER Experiment Name: At_Drought_P Parameter: Plant Line Value: WS
  misc_feature: MA Experiment 20000437 PARAMETER Experiment Name: At_Drought_P Parameter: Timepoint (hr) Value: 24
  misc_feature: MA Experiment 20000437 PARAMETER Experiment Name: At_Drought_P Parameter: Tissue Value: Whole Plant
  misc_feature: MA Experiment 20000437 PARAMETER Experiment Name: At_Drought_P Parameter: Treatment Value: Drought vs. No Drought
  misc_feature: MA Experiment ID: 20000438 Result: Down-regulated in Transcription
  misc_feature: MA Experiment 20000438 PARAMETER Experiment Name: At_Shoots__P Parameter: Age (day) Value: 14
  misc_feature: MA Experiment 20000438 PARAMETER Experiment Name: At_Shoots__P Parameter: Tissue Value: Shoots vs. Whole Plant
  misc_feature: MA Experiment ID: 20000439 Result: Down-regulated in Transcription
  misc_feature: MA Experiment 20000439 PARAMETER Experiment Name: At_Roots__P Parameter: Age (day) Value: 14 vs. 21
  misc_feature: MA Experiment 20000439 PARAMETER Experiment Name: At_Roots__P Parameter: Organism Value: A. thaliana
  misc_feature: MA Experiment 20000439 PARAMETER Experiment Name: At_Roots__P Parameter: Tissue Value: Roots vs. Whole Plant
  misc_feature: MA Experiment ID: 20000441 Result: Up-regulated in Transcription
  misc_feature: MA Experiment 20000441 PARAMETER Experiment Name: At_1uM_BR-BRZ__P Parameter: Tissue Value: Shoot Apices
  misc_feature: MA Experiment 20000441 PARAMETER Experiment Name: At_1uM_BR-BRZ__P Parameter: Treatment Value: 1uM BR vs. No Treatment
  misc_feature: MA Experiment ID: 20000452 Result: Up-regulated in Transcription
  misc_feature: MA Experiment 20000452 PARAMETER Experiment Name: At_CS6879_Shoots-Roots_P Parameter: Age (day) Value: 14
  misc_feature: MA Experiment 20000452 PARAMETER Experiment Name: At_CS6879_Shoots-Roots_P Parameter: Organism Value: A. thaliana
  misc_feature: MA Experiment 20000452 PARAMETER Experiment Name: At_CS6879_Shoots-Roots_P Parameter: Plant Line Value: CS6879 vs. WS
  misc_feature: MA Experiment 20000452 PARAMETER Experiment Name: At_CS6879_Shoots-Roots_P Parameter: Tissue Value: Shoots
  misc_feature: MA Experiment ID: 20000460 Result: Up-regulated in Transcription
  misc_feature: MA Experiment 20000460 PARAMETER Experiment Name: At_10percent_PEG_P Parameter: Age (day) Value: 12
  misc_feature: MA Experiment 20000460 PARAMETER Experiment Name: At_10percent_PEG_P Parameter: Organism Value: A. thaliana
  misc_feature: MA Experiment 20000460 PARAMETER Experiment Name: At_10percent_PEG_P Parameter: Plant Line Value: WS
  misc_feature: MA Experiment 20000460 PARAMETER Experiment Name: At_10percent_PEG_P Parameter: Timepoint (day) Value: 12
  misc_feature: MA Experiment 20000460 PARAMETER Experiment Name: At_10percent_PEG_P Parameter: Tissue Value: Whole Plant
  misc_feature: MA Experiment 20000460 PARAMETER Experiment Name: At_10percent_PEG_P Parameter: Treatment Value: 10percent PEG vs. No Treatment
  misc_feature: MA Experiment ID: 20000573 Result: Down-regulated in Transcription
  misc_feature: MA Experiment 20000573 PARAMETER Experiment Name: At_100uM_ABA_Mutants__P Parameter: Organism Value: A. thaliana
  misc_feature: MA Experiment 20000573 PARAMETER Experiment Name: At_100uM_ABA_Mutants__P Parameter: Plant Line Value: CS22 vs. Ler wt
  misc_feature: MA Experiment 20000573 PARAMETER Experiment Name: At_100uM_ABA_Mutants__P Parameter: Timepoint (hr) Value: N/A
  misc_feature: MA Experiment 20000573 PARAMETER Experiment Name: At_100uM_ABA_Mutants__P Parameter: Tissue Value: Whole Plant
  misc_feature: MA Experiment 20000573 PARAMETER Experiment Name: At_100uM_ABA_Mutants__P Parameter: Treatment Value: None
  misc_feature: MA Experiment ID: 20000574 Result: Down-regulated in Transcription
  misc_feature: MA Experiment 20000574 PARAMETER Experiment Name: At_100uM_ABA_Mutants__P Parameter: Organism Value: A. thaliana
  misc_feature: MA Experiment 20000574 PARAMETER Experiment Name: At_100uM_ABA_Mutants__P Parameter: Plant Line Value: CS23 vs. Ler wt
  misc_feature: MA Experiment 20000574 PARAMETER Experiment Name: At_100uM_ABA_Mutants__P Parameter: Timepoint (hr) Value: N/A
  misc_feature: MA Experiment 20000574 PARAMETER Experiment Name: At_100uM_ABA_Mutants__P Parameter: Tissue Value: Whole Plant
  misc_feature: MA Experiment 20000574 PARAMETER Experiment Name: At_100uM_ABA_Mutants__P Parameter: Treatment Value: None
aataataattagacttctgcactttctcacgaacctctctgtctcgtccattacttaaaaaccaaatctttcatcatcttccttcaccagttgactctctttcaatctatctctgaatctctcactctcctacccgaaaaccatgaactccaacgaccaggatccgattccgttcagacccgaagacaacaacttctccggttccaaaacctacgccatgagcggcaaaatcatgctaagtgcaatagtaatcctcttcttcgtcgtcattttaatggtcttcctccatctttacgctcgttggtatctcctccgtgctcgtagacgtcatctccgtcgtcgtagccgtaaccgtcgcgctacgatggttttcttcaccgctgatccttccaccgccgcaacttccgtcgtcgcttcacgtggacttgatccaaacgttattaaatctcttcctgttttcactttctccgacgagactcataaagatccgatcgaatgcgccgtttgtttatcggaattcgaagagagcgagacgggtcgggttttgcccaattgtcaacatacttttcatgttgattgtattgatatgtggtttcattctcattccacttgtcctctttgtcgatctctcgttgagtctctcgccgggattgaatcaacggcggcggcgagggagagggaagttgtgattgcggttgattctgatccggttttggtaattgaaccgagttctagctctggattgacggatgaaccacatggatctggatcttctcagatgctgagggaagattccgggagaaaaccggcggcgattgaggttccgaggaggacttttagcgagtttgaagatgagttgactcggagagactcgccggcgagtcagtcgtttaggtctccgatgagtcggatgttatctttcactcggatgttgagtagagatagaagaagcgcttcgtctcctatcgccggagctccgccgctatcgccgacgttaagctgccggatacagatgaccgagtcagatatcgaacggggaggagaagagagtaggtgacttgtcacgtgttggtgtctgattggtttaatgttaaccgggagtaaaaaaaggaattactacaagtcaacaggcttttgtctaggtgttgatttcggcgcccaaggacacgtggcgtaaactgagcttccaggaatcaatattcaccgtctattatgattagataggttagatagatttgtgtaacgatgtacaaagtcatctacaatattgaatctatttccatttattttaccatattctttttttttttataattttcgaagttctacaaactcttttatgtaaaacacaatccaatggtcataattgtgataaagactttgcataatt

SEQ ID NO: 104210 - protein, 304 aa, Arabidopsis thaliana; identical to SEQ ID NO: 26941
  peptide (1)..(304): Ceres Seq. ID no. 13614528
  misc_feature (119)..(160): Pfam Name: Zinc finger, C3HC4 type (RING finger) Pfam Description: Zinc finger, C3HC4 type (RING finger)
  misc_feature (1)..(304): Homolog of NCBI NO: 15228302 NR Description: RING zinc finger protein -related [Arabidopsis
  misc_feature (1)..(304): Homolog of NCBI NO: 21593806 NR Description: putative RING zinc finger protein [Arabidopsis
  misc_feature (1)..(304): Homolog of NCBI NO: 25456278 NR Description: probable zinc finger protein [imported] - thaliana >gi|3873408|gb|AAC77829.1| putative zinc finger protein
  misc_feature (31)..(253): Homolog of NCBI NO: 21537244 NR Description: unknown [Arabidopsis thaliana]
  misc_feature (29)..(253): Homolog of NCBI NO: 7485154 NR Description: hypothetical protein - Arabidopsis thaliana regulatory protein [Arabidopsis thaliana]
  misc_feature (31)..(253): Homolog of NCBI NO: 18414561 NR Description: expressed protein [Arabidopsis thaliana]
  misc_feature (20)..(257): Homolog of NCBI NO: 15228830 NR Description: RING-H2 zinc finger protein ATL5 [Arabidopsis
  misc_feature (20)..(257): Homolog of NCBI NO: 4928401 NR Description: RING-H2 zinc finger protein ATL5 [Arabidopsis
  misc_feature (26)..(259): Homolog of NCBI NO: 12003386 NR Description: Avr9/Cf-9 rapidly elicited protein 132 [Nicotiana
  misc_feature (21)..(165): Homolog of NCBI NO: 15226628 NR Description: hypothetical protein [Arabidopsis thaliana]

SEQ ID NO: 104211 - protein, 279 aa, Arabidopsis thaliana; identical to SEQ ID NO: 26942
  peptide (1)..(279): Ceres Seq. ID no. 13614529
  misc_feature (94)..(135): Pfam Name: Zinc finger, C3HC4 type (RING finger) Pfam Description: Zinc finger, C3HC4 type (RING finger)
  misc_feature (1)..(279): Homolog of NCBI NO: 15228302 NR Description: RING zinc finger protein -related [Arabidopsis
  misc_feature (1)..(279): Homolog of NCBI NO: 21593806 NR Description: putative RING zinc finger protein [Arabidopsis
  misc_feature (1)..(279): Homolog of NCBI NO: 25456278 NR Description: probable zinc finger protein [imported] - thaliana >gi|3873408|gb|AAC77829.1| putative zinc finger protein
  misc_feature (6)..(228): Homolog of NCBI NO: 21537244 NR Description: unknown [Arabidopsis thaliana]
  misc_feature (4)..(228): Homolog of NCBI NO: 7485154 NR Description: hypothetical protein - Arabidopsis thaliana regulatory protein [Arabidopsis thaliana]
  misc_feature (6)..(228): Homolog of NCBI NO: 18414561 NR Description: expressed protein [Arabidopsis thaliana]
  misc_feature (1)..(232): Homolog of NCBI NO: 15228830 NR Description: RING-H2 zinc finger protein ATL5 [Arabidopsis
  misc_feature (1)..(232): Homolog of NCBI NO: 4928401 NR Description: RING-H2 zinc finger protein ATL5 [Arabidopsis
  misc_feature (1)..(234): Homolog of NCBI NO: 12003386 NR Description: Avr9/Cf-9 rapidly elicited protein 132 [Nicotiana
  misc_feature (1)..(140): Homolog of NCBI NO: 15226628 NR Description: hypothetical protein [Arabidopsis thaliana]

SEQ ID NO: 104212 - protein, 274 aa, Arabidopsis thaliana; identical to SEQ ID NO: 26943
  peptide (1)..(274): Ceres Seq. ID no. 13614530
  misc_feature (89)..(130): Pfam Name: Zinc finger, C3HC4 type (RING finger) Pfam Description: Zinc finger, C3HC4 type (RING finger)
  misc_feature (1)..(274): Homolog of NCBI NO: 15228302 NR Description: RING zinc finger protein -related [Arabidopsis
  misc_feature (1)..(274): Homolog of NCBI NO: 21593806 NR Description: putative RING zinc finger protein [Arabidopsis
  misc_feature (1)..(274): Homolog of NCBI NO: 25456278 NR Description: probable zinc finger protein [imported] - thaliana >gi|3873408|gb|AAC77829.1| putative zinc finger protein
  misc_feature (1)..(223): Homolog of NCBI NO: 21537244 NR Description: unknown [Arabidopsis thaliana]
  misc_feature (1)..(223): Homolog of NCBI NO: 7485154 NR Description: hypothetical protein - Arabidopsis thaliana regulatory protein [Arabidopsis thaliana]
  misc_feature (1)..(223): Homolog of NCBI NO: 18414561 NR Description: expressed protein [Arabidopsis thaliana]
  misc_feature (1)..(227): Homolog of NCBI NO: 15228830 NR Description: RING-H2 zinc finger protein ATL5 [Arabidopsis
  misc_feature (1)..(227): Homolog of NCBI NO: 4928401 NR Description: RING-H2 zinc finger protein ATL5 [Arabidopsis
  misc_feature (1)..(229): Homolog of NCBI NO: 12003386 NR Description: Avr9/Cf-9 rapidly elicited protein 132 [Nicotiana
  misc_feature (1)..(135): Homolog of NCBI NO: 15226628 NR Description: hypothetical protein [Arabidopsis thaliana]

SEQ ID NO: 104213 - DNA, 828 bp, Arabidopsis thaliana
  misc_feature (1)..(828): Ceres Seq. ID no. 13614535
  misc_feature: MA Experiment ID: 108434 Result: Up-regulated in Transcription
  misc_feature: MA Experiment 108434 PARAMETER Experiment Name: At_Root_Tips_cDNA_P Parameter: Tissue Value: Root Tips
  misc_feature: MA Experiment ID: 108435 Result: Up-regulated in Transcription
  misc_feature: MA Experiment 108435 PARAMETER Experiment Name: At_stm_Mutants_cDNA_P Parameter: Plant Line Value: wt Landsburg vs stm
  misc_feature: MA Experiment 108435 PARAMETER Experiment Name: At_stm_Mutants_cDNA_P Parameter: Tissue Value: Shoot Apical Meristem Region
  misc_feature: MA Experiment ID: 108462 Result: Down-regulated in Transcription
  misc_feature: MA Experiment 108462 PARAMETER Experiment Name: At_Germinating_Seeds_cDNA_P Parameter: Age (day) Value: 2 vs. 0
  misc_feature: MA Experiment 108462 PARAMETER Experiment Name: At_Germinating_Seeds_cDNA_P Parameter: Tissue Value: Germinating Seeds
  misc_feature: MA Experiment ID: 108463 Result: Down-regulated in Transcription
  misc_feature: MA Experiment 108463 PARAMETER Experiment Name: At_Germinating_Seeds_cDNA_P Parameter: Age (day) Value: 3 vs. 0
  misc_feature: MA Experiment 108463 PARAMETER Experiment Name: At_Germinating_Seeds_cDNA_P Parameter: Tissue Value: Germinating Seeds
  misc_feature: MA Experiment ID: 108464 Result: Down-regulated in Transcription
  misc_feature: MA Experiment 108464 PARAMETER Experiment Name: At_Germinating_Seeds_cDNA_P Parameter: Age (day) Value: 4 vs. 0
  misc_feature: MA Experiment 108464 PARAMETER Experiment Name: At_Germinating_Seeds_cDNA_P Parameter: Tissue Value: Germinating Seeds
  misc_feature: MA Experiment ID: 108489 Result: Up-regulated in Transcription
  misc_feature: MA Experiment ID: 108569 Result: Down-regulated in Transcription
  misc_feature: MA Experiment 108569 PARAMETER Experiment Name: At_0.001%_MeJA__cDNA_P Parameter: Timepoint (hr) Value: 6
  misc_feature: MA Experiment 108569 PARAMETER Experiment Name: At_0.001%_MeJA__cDNA_P Parameter: Tissue Value: Aerial
  misc_feature: MA Experiment 108569 PARAMETER Experiment Name: At_0.001%_MeJA__cDNA_P Parameter: Treatment Value: 0.001% MeJA vs. No Treatment
  misc_feature: MA Experiment ID: 108573 Result: Down-regulated in Transcription
  misc_feature: MA Experiment 108573 PARAMETER Experiment Name: At_Drought_cDNA_P Parameter: Timepoint (hr) Value: 6
  misc_feature: MA Experiment 108573 PARAMETER Experiment Name: At_Drought_cDNA_P Parameter: Tissue Value: Aerial
  misc_feature: MA Experiment 108573 PARAMETER Experiment Name: At_Drought_cDNA_P Parameter: Treatment Value: Drought vs. No Drought
  misc_feature: MA Experiment ID: 108579 Result: Up-regulated in Transcription
  misc_feature: MA Experiment 108579 PARAMETER Experiment Name: At_4deg_Cold_cDNA_P Parameter: Temperature (deg C) Value: 4 vs. 22
  misc_feature: MA Experiment 108579 PARAMETER Experiment Name: At_4deg_Cold_cDNA_P Parameter: Timepoint (hr) Value: 6
  misc_feature: MA Experiment 108579 PARAMETER Experiment Name: At_4deg_Cold_cDNA_P Parameter: Tissue Value: Aerial
  misc_feature: MA Experiment ID: 108585 Result: Down-regulated in Transcription
  misc_feature: MA Experiment 108585 PARAMETER Experiment Name: At_5mM_NaNP_cDNA_P Parameter: Timepoint (hr) Value: 6
  misc_feature: MA Experiment 108585 PARAMETER Experiment Name: At_5mM_NaNP_cDNA_P Parameter: Tissue Value: Aerial
  misc_feature: MA Experiment 108585 PARAMETER Experiment Name: At_5mM_NaNP_cDNA_P Parameter: Treatment Value: null
  misc_feature: MA Experiment ID: 108595 Result: Down-regulated in Transcription
  misc_feature: MA Experiment 108595 PARAMETER Experiment Name: At_Ler-pi_Ovule_cDNA_P Parameter: Plant Line Value: null
  misc_feature: MA Experiment ID: 108607 Result: Down-regulated in Transcription
  misc_feature: MA Experiment 108607 PARAMETER Experiment Name: At_100uM_ABA_cDNA_P Parameter: Timepoint (hr) Value: 4
  misc_feature: MA Experiment 108607 PARAMETER Experiment Name: At_100uM_ABA_cDNA_P Parameter: Tissue Value: Aerial
  misc_feature: MA Experiment 108607 PARAMETER Experiment Name: At_100uM_ABA_cDNA_P Parameter: Treatment Value: 100uM ABA vs. No Treatment
  misc_feature: MA Experiment ID: 108609 Result: Down-regulated in Transcription
  misc_feature: MA Experiment 108609 PARAMETER Experiment Name: At_100uM_ABA_cDNA_P Parameter: Timepoint (hr) Value: 24
  misc_feature: MA Experiment 108609 PARAMETER Experiment Name: At_100uM_ABA_cDNA_P Parameter: Tissue Value: Aerial
  misc_feature: MA Experiment 108609 PARAMETER Experiment Name: At_100uM_ABA_cDNA_P Parameter: Treatment Value: 100uM ABA vs. No Treatment
  misc_feature: MA Experiment ID: 20000087 Result: Down-regulated in Transcription
  misc_feature: MA Experiment 20000087 PARAMETER Experiment Name: At_100uM_ABA_Mutants_cDNA_P Parameter: Plant Line Value: WS
  misc_feature: MA Experiment 20000087 PARAMETER Experiment Name: At_100uM_ABA_Mutants_cDNA_P Parameter: Timepoint (hr) Value: 6
  misc_feature: MA Experiment 20000087 PARAMETER Experiment Name: At_100uM_ABA_Mutants_cDNA_P Parameter: Tissue Value: Aerial
  misc_feature: MA Experiment 20000087 PARAMETER Experiment Name: At_100uM_ABA_Mutants_cDNA_P Parameter: Treatment Value: 100uM ABA vs. No Treatment
  misc_feature: MA Experiment ID: 20001807 Result: Up-regulated in Transcription
  misc_feature: MA Experiment 20001807 PARAMETER Experiment Name: At_50mM_NH4NO3_L-to-H_Sub_P Parameter: Timepoint (hr) Value: 6
  misc_feature: MA Experiment 20001807 PARAMETER Experiment Name: At_50mM_NH4NO3_L-to-H_Sub_P Parameter: Tissue Value: Leaf
  misc_feature: MA Experiment 20001807 PARAMETER Experiment Name: At_50mM_NH4NO3_L-to-H_Sub_P Parameter: Treatment Value: 50mM NH4NO3 vs 100mM Mannitol
aacaaaaaagccctaaacggagagaggcggagaggagaaggaagacggcgtgaagcaatggtgtcgctgaagatccagaagcggctcgccgcatccgtaatgaaatgcgggaaaggaaaagtttggctcgaccccaatgaatcgggcgatatctctatggccaattccaggcagaacattaggaagcttgtgaaggatggtttcattatcaggaagcctactaagatccactcacgttctcgggctagggctttgaacgaggccaagcgaaagggtcgtcactctggatacggtaagagaaagggtacaagagaggcaaggctaccaaccaagattctttggatgaggagaatgagggtgttgaggcgtttcttgagcaagtaccgtgagtcaaagaagattgataggcacatgtaccatgacatgtacatgaaagtgaagggtaatgttttcaagaacaagcgtgtgcttatggagagcatccacaagatgaaggctgagaaggctagagagaagactctcgctgaccagtttgaggccaagcgtattaagaacaaggctagcagggagagaaagtttgccagaagagaggagagattagctcagggacctggaggtggagagacaacgactcctgctggcgcacctcaacaaccagaggtaaccaagaagaagtcgaagaagtgatttggtgttgaacttttttgcaattgaatctttgagtttacctgtagaagaagcgtcttttttttatcttttatatgattttgtcggagattcttttcttcaaaaatatttcttatgttatggatctcattgcttattatg

SEQ ID NO: 104214 - protein, 228 aa, Arabidopsis thaliana; identical to SEQ ID NO: 20979
  peptide (1)..(228): Ceres Seq. ID no. 13614536
  misc_feature (21)..(168): Pfam Name: Ribosomal protein L19e Pfam Description: Ribosomal protein L19e
  misc_feature (20)..(228): Homolog of NCBI NO: 15228314 NR Description: 60S ribosomal protein L19 (RPL19B) [Arabidopsis
  misc_feature (20)..(228): Homolog of NCBI NO: 15235290 NR Description: 60S ribosomal protein L19 (RPL19C) [Arabidopsis
  misc_feature (20)..(219): Homolog of NCBI NO: 40287526 NR Description: 60S ribosomal protein L19 [Capsicum annuum]
  misc_feature (20)..(228): Homolog of NCBI NO: 15218602 NR Description: 60S ribosomal protein L19 (RPL19A) [Arabidopsis
  misc_feature (20)..(216): Homolog of NCBI NO: 7440943 NR Description: ribosomal protein L19.T2H3.3 - Arabidopsis >gi|3377797|gb|AAC28170.1| Similar to 60S ribosome protein L19; for by A. thaliana cDNA T04719; coded for by A. thaliana cDNA
  misc_feature (20)..(228): Homolog of NCBI NO: 18087585 NR Description: At1g02780/T14P4_3 [Arabidopsis thaliana]
  misc_feature (20)..(228): Homolog of NCBI NO: 29837764 NR Description: putative ribosomal protein L19 [Oryza sativa
  misc_feature (20)..(211): Homolog of NCBI NO: 32401377 NR Description: ribosomal protein L19 [Triticum aestivum]
  misc_feature (20)..(201): Homolog of NCBI NO: 28200276 NR Description: ribosomal protein L19 [Branchiostoma belcheri
  misc_feature (20)..(201): Homolog of NCBI NO: 28630352 NR Description: ribosomal protein L19 [Branchiostoma lanceolatum]

SEQ ID NO: 104215 - protein, 209 aa, Arabidopsis thaliana; identical to SEQ ID NO: 20980
  peptide (1)..(209): Ceres Seq. ID no. 13614537
  misc_feature (2)..(149): Pfam Name: Ribosomal protein L19e Pfam Description: Ribosomal protein L19e
  misc_feature (1)..(209): Homolog of NCBI NO: 15228314 NR Description: 60S ribosomal protein L19 (RPL19B) [Arabidopsis
  misc_feature (1)..(209): Homolog of NCBI NO: 15235290 NR Description: 60S ribosomal protein L19 (RPL19C) [Arabidopsis
  misc_feature (1)..(200): Homolog of NCBI NO: 40287526 NR Description: 60S ribosomal protein L19 [Capsicum annuum]
  misc_feature (1)..(209): Homolog of NCBI NO: 15218602 NR Description: 60S ribosomal protein L19 (RPL19A) [Arabidopsis
  misc_feature (1)..(197): Homolog of NCBI NO: 7440943 NR Description: ribosomal protein L19.T2H3.3 - Arabidopsis >gi|3377797|gb|AAC28170.1| Similar to 60S ribosome protein L19; for by A. thaliana cDNA T04719; coded for by A. thaliana cDNA
  misc_feature (1)..(209): Homolog of NCBI NO: 18087585 NR Description: At1g02780/T14P4_3 [Arabidopsis thaliana]
  misc_feature (1)..(209): Homolog of NCBI NO: 29837764 NR Description: putative ribosomal protein L19 [Oryza sativa
  misc_feature (1)..(192): Homolog of NCBI NO: 32401377 NR Description: ribosomal protein L19 [Triticum aestivum]
  misc_feature (1)..(182): Homolog of NCBI NO: 28200276 NR Description: ribosomal protein L19 [Branchiostoma belcheri
  misc_feature (1)..(182): Homolog of NCBI NO: 28630352 NR Description: ribosomal protein L19 [Branchiostoma lanceolatum]

SEQ ID NO: 104216 - protein, 195 aa, Arabidopsis thaliana; identical to SEQ ID NO: 20981
  peptide (1)..(195): Ceres Seq. ID no. 13614538
  misc_feature (1)..(135): Pfam Name: Ribosomal protein L19e Pfam Description: Ribosomal protein L19e
  misc_feature (1)..(195): Homolog of NCBI NO: 15228314 NR Description: 60S ribosomal protein L19 (RPL19B) [Arabidopsis
  misc_feature (1)..(195): Homolog of NCBI NO: 15235290 NR Description: 60S ribosomal protein L19 (RPL19C) [Arabidopsis
  misc_feature (1)..(186): Homolog of NCBI NO: 40287526 NR Description: 60S ribosomal protein L19 [Capsicum annuum]
  misc_feature (1)..(195): Homolog of NCBI NO: 15218602 NR Description: 60S ribosomal protein L19 (RPL19A) [Arabidopsis
  misc_feature (1)..(183): Homolog of NCBI NO: 7440943 NR Description: ribosomal protein L19.T2H3.3 - Arabidopsis >gi|3377797|gb|AAC28170.1| Similar to 60S ribosome protein L19; for by A. thaliana cDNA T04719; coded for by A. thaliana cDNA
  misc_feature (1)..(195): Homolog of NCBI NO: 18087585 NR Description: At1g02780/T14P4_3 [Arabidopsis thaliana]
  misc_feature (1)..(195): Homolog of NCBI NO: 29837764 NR Description: putative ribosomal protein L19 [Oryza sativa
  misc_feature (1)..(178): Homolog of NCBI NO: 32401377 NR Description: ribosomal protein L19 [Triticum aestivum]
  misc_feature (1)..(168): Homolog of NCBI NO: 28200276 NR Description: ribosomal protein L19 [Branchiostoma belcheri
  misc_feature (1)..(168): Homolog of NCBI NO: 28630352 NR Description: ribosomal protein L19 [Branchiostoma lanceolatum]

SEQ ID NO: 104217 - DNA, 1222 bp, Arabidopsis thaliana
  misc_feature (1)..(1222): Ceres Seq. ID no. 13614547
  misc_feature: MA Experiment ID: 108434 Result: Down-regulated in Transcription
  misc_feature: MA Experiment 108434 PARAMETER Experiment Name: At_Root_Tips_cDNA_P Parameter: Tissue Value: Root Tips
  misc_feature: MA Experiment ID: 108461 Result: Up-regulated in Transcription
  misc_feature: MA Experiment 108461 PARAMETER Experiment Name: At_Germinating_Seeds_cDNA_P Parameter: Age (day) Value: 1 vs. 0
  misc_feature: MA Experiment 108461 PARAMETER Experiment Name: At_Germinating_Seeds_cDNA_P Parameter: Tissue Value: Germinating Seeds
  misc_feature: MA Experiment ID: 108462 Result: Up-regulated in Transcription
  misc_feature: MA Experiment 108462 PARAMETER Experiment Name: At_Germinating_Seeds_cDNA_P Parameter: Age (day) Value: 2 vs. 0
  misc_feature: MA Experiment 108462 PARAMETER Experiment Name: At_Germinating_Seeds_cDNA_P Parameter: Tissue Value: Germinating Seeds
  misc_feature: MA Experiment ID: 108463 Result: Up-regulated in Transcription
  misc_feature: MA Experiment 108463 PARAMETER Experiment Name: At_Germinating_Seeds_cDNA_P Parameter: Age (day) Value: 3 vs. 0
  misc_feature: MA Experiment 108463 PARAMETER Experiment Name: At_Germinating_Seeds_cDNA_P Parameter: Tissue Value: Germinating Seeds
  misc_feature: MA Experiment ID: 108464 Result: Up-regulated in Transcription
  misc_feature: MA Experiment 108464 PARAMETER Experiment Name: At_Germinating_Seeds_cDNA_P Parameter: Age (day) Value: 4 vs. 0
  misc_feature: MA Experiment 108464 PARAMETER Experiment Name: At_Germinating_Seeds_cDNA_P Parameter: Tissue Value: Germinating Seeds
  misc_feature: MA Experiment ID: 108474 Result: Down-regulated in Transcription
  misc_feature: MA Experiment 108474 PARAMETER Experiment Name: At_Drought_Flowers_cDNA_P Parameter: Timepoint (hr) Value: null
  misc_feature: MA Experiment 108474 PARAMETER Experiment Name: At_Drought_Flowers_cDNA_P Parameter: Treatment Value: Drought vs. No Drought
  misc_feature: MA Experiment ID: 108573 Result: Up-regulated in Transcription
  misc_feature: MA Experiment 108573 PARAMETER Experiment Name: At_Drought_cDNA_P Parameter: Timepoint (hr) Value: 6
  misc_feature: MA Experiment 108573 PARAMETER Experiment Name: At_Drought_cDNA_P Parameter: Tissue Value: Aerial
  misc_feature: MA Experiment 108573 PARAMETER Experiment Name: At_Drought_cDNA_P Parameter: Treatment Value: Drought vs. No Drought
  misc_feature: MA Experiment ID: 108594 Result: Down-regulated in Transcription
  misc_feature: MA Experiment 108594 PARAMETER Experiment Name: At_Ler-rhl_Root_cDNA_P Parameter: Plant Line Value: null
  misc_feature: MA Experiment ID: 108595 Result: Up-regulated in Transcription
  misc_feature: MA Experiment 108595 PARAMETER Experiment Name: At_Ler-pi_Ovule_cDNA_P Parameter: Plant Line Value: null
  misc_feature: MA Experiment ID: 20000071 Result: Up-regulated in Transcription
  misc_feature: MA Experiment 20000071 PARAMETER Experiment Name: At_100uM_ABA_Mutants_cDNA_P Parameter: Plant Line Value: CS8104
  misc_feature: MA Experiment 20000071 PARAMETER Experiment Name: At_100uM_ABA_Mutants_cDNA_P Parameter: Timepoint (hr) Value: 6
  misc_feature: MA Experiment 20000071 PARAMETER Experiment Name: At_100uM_ABA_Mutants_cDNA_P Parameter: Tissue Value: Aerial
  misc_feature: MA Experiment 20000071 PARAMETER Experiment Name: At_100uM_ABA_Mutants_cDNA_P Parameter: Treatment Value: 100uM ABA vs. No Treatment
  misc_feature: MA Experiment ID: 20000171 Result: Up-regulated in Transcription
  misc_feature: MA Experiment 20000171 PARAMETER Experiment Name: At_42deg_Heat_P Parameter: Age (day) Value: 14
  misc_feature: MA Experiment 20000171 PARAMETER Experiment Name: At_42deg_Heat_P Parameter: Organism Value: A. thaliana
  misc_feature: MA Experiment 20000171 PARAMETER Experiment Name: At_42deg_Heat_P Parameter: Plant Line Value: WS
  misc_feature: MA Experiment 20000171 PARAMETER Experiment Name: At_42deg_Heat_P Parameter: Temperature (deg C) Value: 42 vs. 22
  misc_feature: MA Experiment 20000171 PARAMETER Experiment Name: At_42deg_Heat_P Parameter: Timepoint (hr) Value: 1
  misc_feature: MA Experiment 20000171 PARAMETER Experiment Name: At_42deg_Heat_P Parameter: Tissue Value: Aerial
  misc_feature: MA Experiment ID: 20000180 Result: Up-regulated in Transcription
  misc_feature: MA Experiment 20000180 PARAMETER Experiment Name: At_Germinating_Seeds_P Parameter: Age (hr) Value: 24 vs. 0
  misc_feature: MA Experiment 20000180 PARAMETER Experiment Name: At_Germinating_Seeds_P Parameter: Tissue Value: Germinating Seeds
  misc_feature: MA Experiment ID: 20000184 Result: Down-regulated in Transcription
  misc_feature: MA Experiment 20000184 PARAMETER Experiment Name: At_Shoots__P Parameter: Age (day) Value: 7
  misc_feature: MA Experiment 20000184 PARAMETER Experiment Name: At_Shoots__P Parameter: Tissue Value: Shoots vs. Whole Plant
  misc_feature: MA Experiment ID: 20000185 Result: Down-regulated in Transcription
  misc_feature: MA Experiment 20000185 PARAMETER Experiment Name: At_Roots__P Parameter: Age (day) Value: 7 vs. 21
  misc_feature: MA Experiment 20000185 PARAMETER Experiment Name: At_Roots__P Parameter: Organism Value: A. thaliana
  misc_feature: MA Experiment 20000185 PARAMETER Experiment Name: At_Roots__P Parameter: Tissue Value: Roots vs. Whole Plant
  misc_feature: MA Experiment ID: 20000234 Result: Down-regulated in Transcription
  misc_feature: MA Experiment 20000234 PARAMETER Experiment Name: At_Siliques_P Parameter: Age (day) Value: 21
  misc_feature: MA Experiment 20000234 PARAMETER Experiment Name: At_Siliques_P Parameter: Organism Value: A. thaliana
  misc_feature: MA Experiment 20000234 PARAMETER Experiment Name: At_Siliques_P Parameter: Plant Line Value: WS
  misc_feature: MA Experiment 20000234 PARAMETER Experiment Name: At_Siliques_P Parameter: Tissue Value: Less Than 5mm Siliques vs. Whole Plant
  misc_feature: MA Experiment ID: 20000264 Result: Down-regulated in Transcription
  misc_feature: MA Experiment 20000264 PARAMETER Experiment Name: At_Open_Flower_P Parameter: Age (day) Value: 21
  misc_feature: MA Experiment 20000264 PARAMETER Experiment Name: At_Open_Flower_P Parameter: Plant Line Value: WS
  misc_feature: MA Experiment 20000264 PARAMETER Experiment Name: At_Open_Flower_P Parameter: Tissue Value: Open Flower vs. Whole Plant
  misc_feature: MA Experiment ID: 20000265 Result: Down-regulated in Transcription
  misc_feature: MA Experiment 20000265 PARAMETER Experiment Name: At_Open_Flower_P Parameter: Age (day) Value: 21
  misc_feature: MA Experiment 20000265 PARAMETER Experiment Name: At_Open_Flower_P Parameter: Plant Line Value: WS
  misc_feature: MA Experiment 20000265 PARAMETER Experiment Name: At_Open_Flower_P Parameter: Tissue Value: Closed Flower vs. Whole Plant
  misc_feature: MA Experiment ID: 20000286 Result: Down-regulated in Transcription
  misc_feature: MA Experiment 20000286 PARAMETER Experiment Name: At_Open_Flower_P Parameter: Age (day) Value: 21
  misc_feature: MA Experiment 20000286 PARAMETER Experiment Name: At_Open_Flower_P Parameter: Plant Line Value: WS
  misc_feature: MA Experiment 20000286 PARAMETER Experiment Name: At_Open_Flower_P Parameter: Tissue Value: Half Open vs. Whole Plant
  misc_feature: MA Experiment ID: 20000438 Result: Down-regulated in Transcription
  misc_feature: MA Experiment 20000438 PARAMETER Experiment Name: At_Shoots__P Parameter: Age (day) Value: 14
  misc_feature: MA Experiment 20000438 PARAMETER Experiment Name: At_Shoots__P Parameter: Tissue Value: Shoots vs. Whole Plant
  misc_feature: MA Experiment ID: 20000439 Result: Down-regulated in Transcription
  misc_feature: MA Experiment 20000439 PARAMETER Experiment Name: At_Roots__P Parameter: Age (day) Value: 14 vs. 21
  misc_feature: MA Experiment 20000439 PARAMETER Experiment Name: At_Roots__P Parameter: Organism Value: A. thaliana
  misc_feature: MA Experiment 20000439 PARAMETER Experiment Name: At_Roots__P Parameter: Tissue Value: Roots vs. Whole Plant
  misc_feature: MA Experiment ID: 20000794 Result: Down-regulated in Transcription
  misc_feature: MA Experiment 20000794 PARAMETER Experiment Name: At_Petals_P Parameter: Age (day) Value: 23-25 days
  misc_feature: MA Experiment 20000794 PARAMETER Experiment Name: At_Petals_P Parameter: Plant Line Value: WS
  misc_feature: MA Experiment 20000794 PARAMETER Experiment Name: At_Petals_P Parameter: Tissue Value: Petals vs. Whole plant
  misc_feature: MA Experiment ID: 20001556 Result: Down-regulated in Transcription
  misc_feature: MA Experiment 20001556 PARAMETER Experiment Name: At_Drought_Soil_Dry_P Parameter: Age (day) Value: 26
  misc_feature: MA Experiment 20001556 PARAMETER Experiment Name: At_Drought_Soil_Dry_P Parameter: Organism Value: A. thaliana
  misc_feature: MA Experiment 20001556 PARAMETER Experiment Name: At_Drought_Soil_Dry_P Parameter: Plant Line Value: WS
  misc_feature: MA Experiment 20001556 PARAMETER Experiment Name: At_Drought_Soil_Dry_P Parameter: Post Timepoint (hr) Value: None
  misc_feature: MA Experiment 20001556 PARAMETER Experiment Name: At_Drought_Soil_Dry_P Parameter: Post-Treatment Value: None
  misc_feature: MA Experiment 20001556 PARAMETER Experiment Name: At_Drought_Soil_Dry_P Parameter: Timepoint (day) Value: 12
  misc_feature: MA Experiment 20001556 PARAMETER Experiment Name: At_Drought_Soil_Dry_P Parameter: Treatment Value: Drought vs. No Drought
  misc_feature: MA Experiment ID: 20001557 Result: Down-regulated in Transcription
  misc_feature: MA Experiment 20001557 PARAMETER Experiment Name: At_Drought_Soil_Dry_P Parameter: Age (day) Value: 27
  misc_feature: MA Experiment 20001557 PARAMETER Experiment Name: At_Drought_Soil_Dry_P Parameter: Organism Value: A. thaliana
  misc_feature: MA Experiment 20001557 PARAMETER Experiment Name: At_Drought_Soil_Dry_P Parameter: Plant Line Value: WS
  misc_feature: MA Experiment 20001557 PARAMETER Experiment Name: At_Drought_Soil_Dry_P Parameter: Post Timepoint (hr) Value: 3
  misc_feature: MA Experiment 20001557 PARAMETER Experiment Name: At_Drought_Soil_Dry_P Parameter: Post-Treatment Value: Re-Water vs. No Drought
  misc_feature: MA Experiment 20001557 PARAMETER Experiment Name: At_Drought_Soil_Dry_P Parameter: Timepoint (day) Value: 13
  misc_feature: MA Experiment 20001557 PARAMETER Experiment Name: At_Drought_Soil_Dry_P Parameter: Treatment Value: Drought vs. No Drought
  misc_feature: MA Experiment ID: 20001558 Result: Down-regulated in Transcription
  misc_feature: MA Experiment 20001558 PARAMETER Experiment Name: At_Drought_Soil_Dry_P Parameter: Age (day) Value: 27
  misc_feature: MA Experiment 20001558 PARAMETER Experiment Name: At_Drought_Soil_Dry_P Parameter: Organism Value: A. thaliana
  misc_feature: MA Experiment 20001558 PARAMETER Experiment Name: At_Drought_Soil_Dry_P Parameter: Plant Line Value: WS
  misc_feature: MA Experiment 20001558 PARAMETER Experiment Name: At_Drought_Soil_Dry_P Parameter: Post Timepoint (hr) Value: 6
  misc_feature: MA Experiment 20001558 PARAMETER Experiment Name: At_Drought_Soil_Dry_P Parameter: Post-Treatment Value: Re-Water vs. No Drought
  misc_feature: MA Experiment 20001558 PARAMETER Experiment Name: At_Drought_Soil_Dry_P Parameter: Timepoint (day) Value: 13
  misc_feature: MA Experiment 20001558 PARAMETER Experiment Name: At_Drought_Soil_Dry_P Parameter: Treatment Value: Drought vs. No Drought
  misc_feature: MA Experiment ID: 20001559 Result: Down-regulated in Transcription
  misc_feature: MA Experiment 20001559 PARAMETER Experiment Name: At_Drought_Soil_Dry_P Parameter: Age (day) Value: 28
  misc_feature: MA Experiment 20001559 PARAMETER Experiment Name: At_Drought_Soil_Dry_P Parameter: Organism Value: A. thaliana
  misc_feature: MA Experiment 20001559 PARAMETER Experiment Name: At_Drought_Soil_Dry_P Parameter: Plant Line Value: WS
  misc_feature: MA Experiment 20001559 PARAMETER Experiment Name: At_Drought_Soil_Dry_P Parameter: Post Timepoint (hr) Value: 29
  misc_feature: MA Experiment 20001559 PARAMETER Experiment Name: At_Drought_Soil_Dry_P Parameter: Post-Treatment Value: Re-Water vs. No Drought
  misc_feature: MA Experiment 20001559 PARAMETER Experiment Name: At_Drought_Soil_Dry_P Parameter: Timepoint (day) Value: 14
  misc_feature: MA Experiment 20001559 PARAMETER Experiment Name: At_Drought_Soil_Dry_P Parameter: Treatment Value: Drought vs. No Drought
  misc_feature: MA Experiment ID: 20001560 Result: Down-regulated in Transcription
  misc_feature: MA Experiment 20001560 PARAMETER Experiment Name: At_Drought_Soil_Dry_P Parameter: Age (day) Value: 28
  misc_feature: MA Experiment 20001560 PARAMETER Experiment Name: At_Drought_Soil_Dry_P Parameter: Organism Value: A. thaliana
  misc_feature: MA Experiment 20001560 PARAMETER Experiment Name: At_Drought_Soil_Dry_P Parameter: Plant Line Value: WS
  misc_feature: MA Experiment 20001560 PARAMETER Experiment Name: At_Drought_Soil_Dry_P Parameter: Post Timepoint (hr) Value: None
  misc_feature: MA Experiment 20001560 PARAMETER Experiment Name: At_Drought_Soil_Dry_P Parameter: Post-Treatment Value: None
  misc_feature: MA Experiment 20001560 PARAMETER Experiment Name: At_Drought_Soil_Dry_P Parameter: Timepoint (day) Value: 14
  misc_feature: MA Experiment 20001560 PARAMETER Experiment Name: At_Drought_Soil_Dry_P Parameter: Treatment Value: Drought vs. No Drought
  misc_feature: MA Experiment ID: 20001768 Result: Up-regulated in Transcription
  misc_feature: MA Experiment 20001768 PARAMETER Experiment Name: At_Far-red-enriched-adult_P Parameter: Age (day) Value: 28
  misc_feature: MA Experiment 20001768 PARAMETER Experiment Name: At_Far-red-enriched-adult_P Parameter: Light Value: Far-red enriched vs. White
  misc_feature: MA Experiment 20001768 PARAMETER Experiment Name: At_Far-red-enriched-adult_P Parameter: Organism Value: A. thaliana
  misc_feature: MA Experiment 20001768 PARAMETER Experiment Name: At_Far-red-enriched-adult_P Parameter: Plant Line Value: Columbia
  misc_feature: MA Experiment 20001768 PARAMETER Experiment Name: At_Far-red-enriched-adult_P Parameter: Timepoint (hr) Value: 1
  misc_feature: MA Experiment 20001768 PARAMETER Experiment Name: At_Far-red-enriched-adult_P Parameter: Tissue Value: Aerial
  misc_feature: MA Experiment ID: 20001773 Result: Up-regulated in Transcription
  misc_feature: MA Experiment 20001773 PARAMETER Experiment Name: At_Far-red-enriched-adult_P Parameter: Age (day) Value: 30
  misc_feature: MA Experiment 20001773 PARAMETER Experiment Name: At_Far-red-enriched-adult_P Parameter: Light Value: Far-red enriched vs. White
  misc_feature: MA Experiment 20001773 PARAMETER Experiment Name: At_Far-red-enriched-adult_P Parameter: Organism Value: A. thaliana
  misc_feature: MA Experiment 20001773 PARAMETER Experiment Name: At_Far-red-enriched-adult_P Parameter: Plant Line Value: Columbia
  misc_feature: MA Experiment 20001773 PARAMETER Experiment Name: At_Far-red-enriched-adult_P Parameter: Timepoint (hr) Value: 48
  misc_feature: MA Experiment 20001773 PARAMETER Experiment Name: At_Far-red-enriched-adult_P Parameter: Tissue Value: Aerial
  misc_feature: MA Experiment ID: 20001906 Result: Down-regulated in Transcription
  misc_feature: MA Experiment 20001906 PARAMETER Experiment Name: At_Drought_Reproduction_P Parameter: Age (day) Value: 35
  misc_feature: MA Experiment 20001906 PARAMETER Experiment Name: At_Drought_Reproduction_P Parameter: Organism Value: A. thaliana
  misc_feature: MA Experiment 20001906 PARAMETER Experiment Name: At_Drought_Reproduction_P Parameter: Plant Line Value: WS
  misc_feature: MA Experiment 20001906 PARAMETER Experiment Name: At_Drought_Reproduction_P Parameter: Timepoint (day) Value: 5
  misc_feature: MA Experiment 20001906 PARAMETER Experiment Name: At_Drought_Reproduction_P Parameter: Tissue Value: Siliques
  misc_feature: MA Experiment 20001906 PARAMETER Experiment Name: At_Drought_Reproduction_P Parameter: Treatment Value: Drought vs. No Drought
acaatggtcacattgatagacgaagaaaaagacaaaaaaaaatcaaccatggtttcgaaaccgctattctccctattgcttctcacggttgcattggttgtgtttcaaaccggaacccttgtcaacgctgaagattccgagccttcgagttcaacgagaaagcctctggtgaagattgtgaaaggtaaaaaattatgcgacaaaggatgggaatgcaaaggatggtccgagtattgttgcaaccatacaatctccgatttttttgagacatatcaattcgagaatctattctctaagcgtaacagtccagtggctcacgccgtcggcttttgggattaccgatcattcattactgcggctgccgagtaccagcctcttggtttcggtactgctggtgagaaacttcaagggatgaaggaagtcgctgcgtttcttggccacgttgggagcaaaacctcatgcgggtacggggttgcaacaggcggaccattagcttggggattgtgttacaacaaggagatgagtcctgatcagctttattgcgatgattactacaaattgacatatccttgtactcctggtgtctcgtaccacggtcgaggagctttaccggtttactggaattacaattatggtcaaaccggggaggctttgaaagtggatctactgagtcatccagagtatctcgagaacaatgctacgttagcgtttcaagcggcgatttggcggtggatgacgccaccgaagaagcatttaccgtcggcgcacgatgttttcgtcggaaaatggaagccaacaaagaatgacactgctgcaaaacgaactccggggtttggagccaccataaacgttctttacggcgatcaaatctgcaacagcggattcgataacgatgagatgaacaacattgtttctcattatttgtattatcttgatctgataggtgttggacgagaagaagctggtcctcacgagaagctgtcatgcgcagatcaagaacctttttcttcttcctcctctgctcctccgagttctggttcctcttcttgagtgaaagttttataacctctggttcggtgacttttgaaaaagaaagttgactttggtgtatatgtgttttgcatgggcttggttttaatattttgtaaaaatatacgtacgaacgattgcaatattttccacaccattttcttttcaaaaaatataaatatatattgcatgc

SEQ ID NO: 104218 - protein, 349 aa, Arabidopsis thaliana; identical to SEQ ID NO: 42183
  peptide (1)..(349): Ceres Seq. ID no. 13614548
  misc_feature (17)..(349): Homolog of NCBI NO: 15228911 NR Description: glycosyl hydrolase family 19 (chitinase) thaliana] >gi|7670022|dbj|BAA94976.1| basic chitinase thaliana] >gi|15724262|gb|AAL06524.1|AF412071_1
  misc_feature (24)..(348): Homolog of NCBI NO: 15221283 NR Description: glycosyl hydrolase family 19 (chitinase)
  misc_feature (26)..(348): Homolog of NCBI NO: 32401253 NR Description: class VII chitinase precursor [Gossypium >gi|32401255|gb|AAP80801.1| class VII chitinase precursor
  misc_feature (64)..(339): Homolog of NCBI NO: 27817867 NR Description: OJ1081_B12.16 [Oryza sativa (japonica
  misc_feature (84)..(337): Homolog of NCBI NO: 7798670 NR Description: class I chitinase [Arabis microphylla]
  misc_feature (84)..(337): Homolog of NCBI NO: 7798632 NR Description: class I chitinase [Arabis holboellii]
  misc_feature (84)..(337): Homolog of NCBI NO: 7798664 NR Description: class I chitinase [Arabis lignifera]
  misc_feature (72)..(337): Homolog of NCBI NO: 7798640 NR Description: class I chitinase [Arabis blepharophylla]
  misc_feature (84)..(335): Homolog of NCBI NO: 7798656 NR Description: class I chitinase [Halimolobos perplexa var.
  misc_feature (84)..(337): Homolog of NCBI NO: 7798666 NR Description: class I chitinase [Arabis lignifera]

SEQ ID NO: 104219 - protein, 348 aa, Arabidopsis thaliana; identical to SEQ ID NO: 42184
  peptide (1)..(348): Ceres Seq. ID no. 13614549
  misc_feature (16)..(348): Homolog of NCBI NO: 15228911 NR Description: glycosyl hydrolase family 19 (chitinase) thaliana] >gi|7670022|dbj|BAA94976.1| basic chitinase thaliana] >gi|15724262|gb|AAL06524.1|AF412071_1
  misc_feature (23)..(347): Homolog of NCBI NO: 15221283 NR Description: glycosyl hydrolase family 19 (chitinase)
  misc_feature (25)..(347): Homolog of NCBI NO: 32401253 NR Description: class VII chitinase precursor [Gossypium >gi|32401255|gb|AAP80801.1| class VII chitinase precursor
  misc_feature (63)..(338): Homolog of NCBI NO: 27817867 NR Description: OJ1081_B12.16 [Oryza sativa (japonica
  misc_feature (83)..(336): Homolog of NCBI NO: 7798670 NR Description: class I chitinase [Arabis microphylla]
  misc_feature (83)..(336): Homolog of NCBI NO: 7798632 NR Description: class I chitinase [Arabis holboellii]
  misc_feature (83)..(336): Homolog of NCBI NO: 7798664 NR Description: class I chitinase [Arabis lignifera]
  misc_feature (71)..(336): Homolog of NCBI NO: 7798640 NR Description: class I chitinase [Arabis blepharophylla]
  misc_feature (83)..(334): Homolog of NCBI NO: 7798656 NR Description: class I chitinase [Halimolobos perplexa var.
  misc_feature (83)..(336): Homolog of NCBI NO: 7798666 NR Description: class I chitinase [Arabis lignifera]

SEQ ID NO: 104220 - protein, 333 aa, Arabidopsis thaliana; identical to SEQ ID NO: 42185
  peptide (1)..(333): Ceres Seq. ID no. 13614550
  misc_feature (1)..(333): Homolog of NCBI NO: 15228911 NR Description: glycosyl hydrolase family 19 (chitinase) thaliana] >gi|7670022|dbj|BAA94976.1| basic chitinase thaliana] >gi|15724262|gb|AAL06524.1|AF412071_1
  misc_feature (8)..(332): Homolog of NCBI NO: 15221283 NR Description: glycosyl hydrolase family 19 (chitinase)
  misc_feature (10)..(332): Homolog of NCBI NO: 32401253 NR Description: class VII chitinase precursor [Gossypium >gi|32401255|gb|AAP80801.1| class VII chitinase precursor
  misc_feature (48)..(323): Homolog of NCBI NO: 27817867 NR Description: OJ1081_B12.16 [Oryza sativa (japonica
  misc_feature (68)..(321): Homolog of NCBI NO: 7798670 NR Description: class I chitinase [Arabis microphylla]
  misc_feature (68)..(321): Homolog of NCBI NO: 7798632 NR Description: class I chitinase [Arabis holboellii]
  misc_feature (68)..(321): Homolog of NCBI NO: 7798664 NR Description: class I chitinase [Arabis lignifera]
  misc_feature (56)..(321): Homolog of NCBI NO: 7798640 NR Description: class I chitinase [Arabis blepharophylla]
  misc_feature (68)..(319): Homolog of NCBI NO: 7798656 NR Description: class I chitinase [Halimolobos perplexa var.
  misc_feature (68)..(321): Homolog of NCBI NO: 7798666 NR Description: class I chitinase [Arabis lignifera]

SEQ ID NO: 104221 - DNA, 1591 bp, Arabidopsis thaliana
  misc_feature (1)..(1591): Ceres Seq. ID no. 13614572
  misc_feature: MA Experiment ID: 108569 Result: Up-regulated in Transcription
  misc_feature: MA Experiment 108569 PARAMETER Experiment Name: At_0.001%_MeJA__cDNA_P Parameter: Timepoint (hr) Value: 6
  misc_feature: MA Experiment 108569 PARAMETER Experiment Name: At_0.001%_MeJA__cDNA_P Parameter: Tissue Value: Aerial
  misc_feature: MA Experiment 108569 PARAMETER Experiment Name: At_0.001%_MeJA__cDNA_P Parameter: Treatment Value: 0.001% MeJA vs. No Treatment
  misc_feature: MA Experiment ID: 20000224 Result: Down-regulated in Transcription
ataacctatcaattagataccatttagattagcagcgaatttcaaacggagatgtcagaatcagtgattcagggatcgaatccggatcgggttttatctccgacgagctcgaaatcagtgacgcagacggtgaacgggtcgcatcaattcgtgattcaaggatacagcttagcgaaagggatgggtatagggaagcacatagcgagtgataatttctccgtcggaggttatcagtgggggatcttcttctacccggacggtaagaatccggaggataattcgtcgtacgtctctgtttttatcgcattggccagtgaaggaaccgaagttagggcgcttttcgagctagctcttgttgaccaaagtggaaaggggaaacataaggttcatagccattttgagcggtcactcgatggtggcccttatacactcaaatacagaggaagcatgtggggatacaagcgtttcttcagacgttccattcttgagacatctgactacctgaaagacgattgcttgataatcaattgtacggttggagttgtggtttcagaaatactctgcccacagttacactctgttcacgtccctgattcagaacttggatcacattttggagttctactggatagcatggaaggttctgatataacttttaacattgctggcgagaagtttctagctcataaactagtactggctgctcgatctccatttttcaagtctaagtttttcagtgagtttgaagcaaacaatacagaggttactattaacgatttggaacctaaggtttttaaggctttgctacaattcatgtacaaagattctcttccggaagatgtggagcctgcaacagctcatacatttgagcgcttaaagctgtcagaaatatacgaaacattgattgtaaaagttttagcagcagccgacaagtacgacctgattaggctcaggttgttgtgtgaatcccacatctgcaaaggcgtatcagtcaaatccgtcgcgaagatcttagcgttggctgacagatataatgctaaggaactaaaaggcgtttgccttaagtttactgccgagaacctagcagctgtcctggagacagacgcttaccaacagatgaaggatgaatgtgtgaccctccagtccgagcttctgaaggcggtggctggtcacgaggaaggtagtaacagtactggaggagcaaagtctcagagcgtgtgggcccaactttctgacggcgggggcgataccaccagccgacatgttagacaacgaaccacctagagcctcaaaatatgcatcatttcctcaggttaatagtagccatagagagggtaaatagctgtttttttctgtattcaaaaaaaaatatatgatcccaagtcctaactctatgataggtaaactctttcacttatcacttcagtaacagctttggattattcttcttttcgtgtttatgtattttaaatcccagaacatgtggttgtttcttttactctaaaacattttgatttttacggatccagaagtataccagtgtacatatcaaacagatgcatatttttccatcgagtgagttgattttatg

SEQ ID NO: 104222 - protein, 410 aa, Arabidopsis thaliana
  peptide (1)..(410): Ceres Seq. ID no. 13614573
  misc_feature (35)..(164): Pfam Name: MATH domain Pfam Description: MATH domain
  misc_feature (1)..(382): Homolog of NCBI NO: 14596183 NR Description: Unknown protein [Arabidopsis thaliana]
  misc_feature (1)..(410): Homolog of NCBI NO: 15242126 NR Description: expressed protein [Arabidopsis thaliana]
  misc_feature (1)..(410): Homolog of NCBI NO: 21536843 NR Description: unknown [Arabidopsis thaliana]
  misc_feature (1)..(410): Homolog of NCBI NO: 30691638 NR Description: expressed protein [Arabidopsis thaliana]
  misc_feature (1)..(410): Homolog of NCBI NO: 11282376 NR Description: hypothetical protein F23N14.80 - Arabidopsis >gi|7362795|emb|CAB83071.1| putative protein [Arabidopsis
  misc_feature (1)..(406): Homolog of NCBI NO: 30678912 NR Description: expressed protein [Arabidopsis thaliana] unknown protein [Arabidopsis thaliana] AT3g03740/F20H23_23 [Arabidopsis thaliana]
  misc_feature (12)..(409): Homolog of NCBI NO: 34900034 NR Description: OJ1641_C04.24 [Oryza sativa (japonica >gi|22202734|dbj|BAC07391.1| putative zinc finger POZ domain
  misc_feature (18)..(406): Homolog of NCBI NO: 21536509 NR Description: unknown [Arabidopsis thaliana]
  misc_feature (8)..(408): Homolog of NCBI NO: 28269444 NR Description: unknown protein [Oryza sativa (japonica
  misc_feature (15)..(409): Homolog of NCBI NO: 21595740 NR Description: unknown [Arabidopsis thaliana]
MSESVIQGSNPDRVLSPTSSKSVTQTVNGSHQFVIQGYSLAKGMGIGKHIASDNFSVGGYQWGIFFYPDGKNPEDNSSYVSVFIALASEGTEVRALFELALVDQSGKGKHKVHSHFERSLDGGPYTLKYRGSMWGYKRFFRRSILETSDYLKDDCLIINCTVGVVVSEILCPQLHSVHVPDSELGSHFGVLLDSMEGSDITFNIAGEKFLAHKLVLAARSPFFKSKFFSEFEANNTEVTINDLEPKVFKALLQFMYKDSLPEDVEPATAHTFERLKLSEIYETLIVKVLAAADKYDLIRLRLLCESHICKGVSVKSVAKILALADRYNAKELKGVCLKFTAENLAAVLETDAYQQMKDECVTLQSELLKAVAGHEEGSNSTGGAKSQSVWAQLSDGGGDTTSRHVRQRTT

SEQ ID NO: 104223 - protein, 367 aa, Arabidopsis thaliana
  peptide (1)..(367): Ceres Seq. ID no. 13614574
  misc_feature (1)..(121): Pfam Name: MATH domain Pfam Description: MATH domain
  misc_feature (1)..(339): Homolog of NCBI NO: 14596183 NR Description: Unknown protein [Arabidopsis thaliana]
  misc_feature (1)..(367): Homolog of NCBI NO: 15242126 NR Description: expressed protein [Arabidopsis thaliana]
  misc_feature (1)..(367): Homolog of NCBI NO: 21536843 NR Description: unknown [Arabidopsis thaliana]
  misc_feature (1)..(367): Homolog of NCBI NO: 30691638 NR Description: expressed protein [Arabidopsis thaliana]
  misc_feature (1)..(367): Homolog of NCBI NO: 11282376 NR Description: hypothetical protein F23N14.80 - Arabidopsis >gi|7362795|emb|CAB83071.1| putative protein [Arabidopsis
  misc_feature (1)..(363): Homolog of NCBI NO: 30678912 NR Description: expressed protein [Arabidopsis thaliana] unknown protein [Arabidopsis thaliana] AT3g03740/F20H23_23 [Arabidopsis thaliana]
  misc_feature (1)..(366): Homolog of NCBI NO: 34900034 NR Description: OJ1641_C04.24 [Oryza sativa (japonica >gi|22202734|dbj|BAC07391.1| putative zinc finger POZ domain
  misc_feature (1)..(363): Homolog of NCBI NO: 21536509 NR Description: unknown [Arabidopsis thaliana]
  misc_feature (1)..(365): Homolog of NCBI NO: 28269444 NR Description: unknown protein [Oryza sativa (japonica
  misc_feature (1)..(366): Homolog of NCBI NO: 21595740 NR Description: unknown [Arabidopsis thaliana]
MGIGKHIASDNFSVGGYQWGIFFYPDGKNPEDNSSYVSVFIALASEGTEVRALFELALVDQSGKGKHKVHSHFERSLDGGPYTLKYRGSMWGYKRFFRRSILETSDYLKDDCLIINCTVGVVVSEILCPQLHSVHVPDSELGSHFGVLLDSMEGSDITFNIAGEKFLAHKLVLAARSPFFKSKFFSEFEANNTEVTINDLEPKVFKALLQFMYKDSLPEDVEPATAHTFERLKLSEIYETLIVKVLAAADKYDLIRLRLLCESHICKGVSVKSVAKILALADRYNAKELKGVCLKFTAENLAAVLETDAYQQMKDECVTLQSELLKAVAGHEEGSNSTGGAKSQSVWAQLSDGGGDTTSRHVRQRTT

SEQ ID NO: 104224 - protein, 278 aa, Arabidopsis thaliana
  peptide (1)..(278): Ceres Seq. ID no. 13614575
  misc_feature (56)..(180): Pfam Name: BTB/POZ domain Pfam Description: BTB/POZ domain
  misc_feature (1)..(250): Homolog of NCBI NO: 14596183 NR Description: Unknown protein [Arabidopsis thaliana]
  misc_feature (1)..(278): Homolog of NCBI NO: 15242126 NR Description: expressed protein [Arabidopsis thaliana]
  misc_feature (1)..(278): Homolog of NCBI NO: 21536843 NR Description: unknown [Arabidopsis thaliana]
  misc_feature (1)..(278): Homolog of NCBI NO: 30691638 NR Description: expressed protein [Arabidopsis thaliana]
  misc_feature (1)..(278): Homolog of NCBI NO: 11282376 NR Description: hypothetical protein F23N14.80 - Arabidopsis >gi|7362795|emb|CAB83071.1| putative protein [Arabidopsis
  misc_feature (1)..(274): Homolog of NCBI NO: 30678912 NR Description: expressed protein [Arabidopsis thaliana] unknown protein [Arabidopsis thaliana] AT3g03740/F20H23_23 [Arabidopsis thaliana]
  misc_feature (1)..(277): Homolog of NCBI NO: 34900034 NR Description: OJ1641_C04.24 [Oryza sativa (japonica >gi|22202734|dbj|BAC07391.1| putative zinc finger POZ domain
  misc_feature (1)..(274): Homolog of NCBI NO: 21536509 NR Description: unknown [Arabidopsis thaliana]
  misc_feature (1)..(276): Homolog of NCBI NO: 28269444 NR Description: unknown protein [Oryza sativa (japonica
  misc_feature (1)..(277): Homolog of NCBI NO: 21595740 NR Description: unknown [Arabidopsis thaliana]
MWGYKRFFRRSILETSDYLKDDCLIINCTVGVVVSEILCPQLHSVHVPDSELGSHFGVLLDSMEGSDITFNIAGEKFLAHKLVLAARSPFFKSKFFSEFEANNTEVTINDLEPKVFKALLQFMYKDSLPEDVEPATAHTFERLKLSEIYETLIVKVLAAADKYDLIRLRLLCESHICKGVSVKSVAKILALADRYNAKELKGVCLKFTAENLAAVLETDAYQQMKDECVTLQSELLKAVAGHEEGSNSTGGAKSQSVWAQLSDGGGDTTSRHVRQRTT

SEQ ID NO: 104225 - DNA, 1154 bp, Arabidopsis thaliana
  misc_feature (1)..(1154): Ceres Seq. ID no. 13614576
  misc_feature: MA Experiment ID: 108434 Result: Down-regulated in Transcription
  misc_feature: MA Experiment 108434 PARAMETER Experiment Name: At_Root_Tips_cDNA_P Parameter: Tissue Value: Root Tips
  misc_feature: MA Experiment ID: 108488 Result: Down-regulated in Transcription
  misc_feature: MA Experiment ID: 108576 Result: Up-regulated in Transcription
  misc_feature: MA Experiment 108576 PARAMETER Experiment Name: At_42deg_Heat_cDNA_P Parameter: Temperature (deg C) Value: 42 vs. 22
  misc_feature: MA Experiment 108576 PARAMETER Experiment Name: At_42deg_Heat_cDNA_P Parameter: Timepoint (hr) Value: 1
  misc_feature: MA Experiment 108576 PARAMETER Experiment Name: At_42deg_Heat_cDNA_P Parameter: Tissue Value: Aerial
  misc_feature: MA Experiment ID: 108605 Result: Up-regulated in Transcription
  misc_feature: MA Experiment 108605 PARAMETER Experiment Name: At_100uM_ABA_cDNA_P Parameter: Timepoint (hr) Value: 6
  misc_feature: MA Experiment 108605 PARAMETER Experiment Name: At_100uM_ABA_cDNA_P Parameter: Tissue Value: Aerial
  misc_feature: MA Experiment 108605 PARAMETER Experiment Name: At_100uM_ABA_cDNA_P Parameter: Treatment Value: 100uM ABA vs. No Treatment
  misc_feature: MA Experiment ID: 108607 Result: Up-regulated in Transcription
  misc_feature: MA Experiment 108607 PARAMETER Experiment Name: At_100uM_ABA_cDNA_P Parameter: Timepoint (hr) Value: 4
  misc_feature: MA Experiment 108607 PARAMETER Experiment Name: At_100uM_ABA_cDNA_P Parameter: Tissue Value: Aerial
  misc_feature: MA Experiment 108607 PARAMETER Experiment Name: At_100uM_ABA_cDNA_P Parameter: Treatment Value: 100uM ABA vs. No Treatment
  misc_feature: MA Experiment ID: 20000111 Result: Up-regulated in Transcription
  misc_feature: MA Experiment 20000111 PARAMETER Experiment Name: At_42deg_Heat_cDNA_P Parameter: Temperature (deg C) Value: 42 vs. 22
  misc_feature: MA Experiment 20000111 PARAMETER Experiment Name: At_42deg_Heat_cDNA_P Parameter: Timepoint (hr) Value: 6
  misc_feature: MA Experiment 20000111 PARAMETER Experiment Name: At_42deg_Heat_cDNA_P Parameter: Tissue Value: Aerial
  misc_feature: MA Experiment ID: 20000112 Result: Up-regulated in Transcription
  misc_feature: MA Experiment 20000112 PARAMETER Experiment Name: At_42deg_Heat_cDNA_P Parameter: Temperature (deg C) Value: 42 vs. 22
  misc_feature: MA Experiment 20000112 PARAMETER Experiment Name: At_42deg_Heat_cDNA_P Parameter: Timepoint (hr) Value: 2
  misc_feature: MA Experiment 20000112 PARAMETER Experiment Name: At_42deg_Heat_cDNA_P Parameter: Tissue Value: Aerial
  misc_feature: MA Experiment ID: 20000113 Result: Up-regulated in Transcription
  misc_feature: MA Experiment 20000113 PARAMETER Experiment Name: At_42deg_Heat_cDNA_P Parameter: Temperature (deg C) Value: 42 vs. 22
  misc_feature: MA Experiment 20000113 PARAMETER Experiment Name: At_42deg_Heat_cDNA_P Parameter: Timepoint (hr) Value: 8
  misc_feature: MA Experiment 20000113 PARAMETER Experiment Name: At_42deg_Heat_cDNA_P Parameter: Tissue Value: Aerial
  misc_feature: MA Experiment ID: 20000173 Result: Up-regulated in Transcription
  misc_feature: MA Experiment 20000173 PARAMETER Experiment Name: At_42deg_Heat_P Parameter: Age (day) Value: 14
  misc_feature: MA Experiment 20000173 PARAMETER Experiment Name: At_42deg_Heat_P Parameter: Organism Value: A. thaliana
  misc_feature: MA Experiment 20000173 PARAMETER Experiment Name: At_42deg_Heat_P Parameter: Plant Line Value: WS
  misc_feature: MA Experiment 20000173 PARAMETER Experiment Name: At_42deg_Heat_P Parameter: Temperature (deg C) Value: 42 vs. 22
  misc_feature: MA Experiment 20000173 PARAMETER Experiment Name: At_42deg_Heat_P Parameter: Timepoint (hr) Value: 6
  misc_feature: MA Experiment 20000173 PARAMETER Experiment Name: At_42deg_Heat_P Parameter: Tissue Value: Aerial
  misc_feature: MA Experiment ID: 20000224 Result: Up-regulated in Transcription
  misc_feature: MA Experiment ID: 20000437 Result: Up-regulated in Transcription
  misc_feature: MA Experiment 20000437 PARAMETER Experiment Name: At_Drought_P Parameter: Age (day) Value: 8
  misc_feature: MA Experiment 20000437 PARAMETER Experiment Name: At_Drought_P Parameter: Organism Value: A. thaliana
  misc_feature: MA Experiment 20000437 PARAMETER Experiment Name: At_Drought_P Parameter: Plant Line Value: WS
  misc_feature: MA Experiment 20000437 PARAMETER Experiment Name: At_Drought_P Parameter: Timepoint (hr) Value: 24
  misc_feature: MA Experiment 20000437 PARAMETER Experiment Name: At_Drought_P Parameter: Tissue Value: Whole Plant
  misc_feature: MA Experiment 20000437 PARAMETER Experiment Name: At_Drought_P Parameter: Treatment Value: Drought vs. No Drought
  misc_feature: MA Experiment ID: 20000495 Result: Down-regulated in Transcription
  misc_feature: MA Experiment 20000495 PARAMETER Experiment Name: At_Guard_Cells_P Parameter: Harvest Date Value: 8/2/2002
  misc_feature: MA Experiment 20000495 PARAMETER Experiment Name: At_Guard_Cells_P Parameter: Organism Value: A. thaliana
  misc_feature: MA Experiment 20000495 PARAMETER Experiment Name: At_Guard_Cells_P Parameter: Tissue Value: Guard Cells vs. Leaves
  misc_feature: MA Experiment ID: 20001905 Result: Up-regulated in Transcription
  misc_feature: MA Experiment 20001905 PARAMETER Experiment Name: At_Drought_Reproduction_P Parameter: Age (day) Value: 40
  misc_feature: MA Experiment 20001905 PARAMETER Experiment Name: At_Drought_Reproduction_P Parameter: Organism Value: A. thaliana
  misc_feature: MA Experiment 20001905 PARAMETER Experiment Name: At_Drought_Reproduction_P Parameter: Plant Line Value: WS
  misc_feature: MA Experiment 20001905 PARAMETER Experiment Name: At_Drought_Reproduction_P Parameter: Timepoint (day) Value: 10
  misc_feature: MA Experiment 20001905 PARAMETER Experiment Name: At_Drought_Reproduction_P Parameter: Tissue Value: Rosettes
  misc_feature: MA Experiment 20001905 PARAMETER Experiment Name: At_Drought_Reproduction_P Parameter: Treatment Value: Drought vs. No Drought
acctaactcatttccatcatcttcgtcttcgtttgttcccctgagatagagataagagaatttcgagagattcgagagaagagacgatgagtttccaagatctcgaagctggtactcgatctccggcgccgaatcgttttaccggtgggagacaacagagaccttcgtctcgtggggatccatctcaggaggtcgccgccgggattttcaggatcagcacggctgtcaattccttcttccgcctcgttaattcgatcggaacacctaaagatactcttgaattacgagataagctgcaaaagacaaggttacagatatccgaattggtgaagaatacttcagctaaacttaaggaagctagcgaagccgaccttcatggatcagctagtcaaattaagaagatagctgatgctaaactggcaaaagatttccaatcagttctcaaagagtttcagaaagctcagagacttgcagctgaaagagaaataacatatactcctgtggtcacaaaagaaatacctaccagttataatgcacctgaactggatactgaatctttaaggatctcccagcagcaagctcttcttctacaatcaagaaggcaagaagtggtgtttttagataacgagataacattcaatgaagcaattattgaggaaagagagcaagggattcgagaaattgaagaccagattcgtgatgtgaatggcatgttcaaagatctagctcttatggtgaaccatcaaggaaatattgtcgatgacatcagctctaaccttgacaactcacatgctgcaactacacaagccactgttcaactcagaaaagcagctaaaactcaaagatcaaactcctctttgacatgcctacttattctcatttttgggattgttctactcattgtcatcatcgttgtcttggtctaagcatcaaacatataactccaagcttcaatcttcaagcatcaagcgaatctatggaaactatacaaagacccattaaagatatatatctaatgtacagattctttatactccatcttccccattcaaccaaattgatcttaacttctcatcgtgtgaatgtttaatcaatgtattactccatcataaggatcttcatgatcaaaagaaataaacataagaaaataatct

SEQ ID NO: 104226 - protein, 279 aa, Arabidopsis thaliana; identical to SEQ ID NO: 28018
  peptide (1)..(279): Ceres Seq. ID no. 13614577
  misc_feature (191)..(253): Pfam Name: SNARE domain Pfam Description: SNARE domain
  misc_feature (1)..(279): Homolog of NCBI NO: 15237418 NR Description: syntaxin of plants SYP21 (PEP12) [Arabidopsis >gi|2501101|sp|Q39233|SY21_ARATH Syntaxin 21 (AtSYP21) (PEP12
  misc_feature (1)..(279): Homolog of NCBI NO: 21595750 NR Description: syntaxin homologue [Arabidopsis thaliana]

SEQ ID NO: 104227 - DNA, 729 bp, Arabidopsis thaliana
  misc_feature (1)..(729): Ceres Seq. ID no. 13614582
  misc_feature: MA Experiment ID: 108463 Result: Down-regulated in Transcription
  misc_feature: MA Experiment 108463 PARAMETER Experiment Name: At_Germinating_Seeds_cDNA_P Parameter: Age (day) Value: 3 vs. 0
  misc_feature: MA Experiment 108463 PARAMETER Experiment Name: At_Germinating_Seeds_cDNA_P Parameter: Tissue Value: Germinating Seeds
  misc_feature: MA Experiment ID: 108579 Result: Down-regulated in Transcription
  misc_feature: MA Experiment 108579 PARAMETER Experiment Name: At_4deg_Cold_cDNA_P Parameter: Temperature (deg C) Value: 4 vs. 22
  misc_feature: MA Experiment 108579 PARAMETER Experiment Name: At_4deg_Cold_cDNA_P Parameter: Timepoint (hr) Value: 6
  misc_feature: MA Experiment 108579 PARAMETER Experiment Name: At_4deg_Cold_cDNA_P Parameter: Tissue Value: Aerial
atcatcggagccgtttctctctctcgaactcgatttaagtatttgaatcttgccaatggatttgacgtggttaagtgccctaattgttggagctgcacttggatactgcattggcactcgccgttccaaacctgttgttgctgctgttgataaggatatcaaaactcaatcctccaaaagtccactcgagattgagaaactcgctgatattctcgatgatttcaagatggttttggtggtgagaaatgatcttaaaatgggtaaaggaaagattgcagctcaatgcagtcatgcaactttaggattatacaagaagcttgttcgtcgagcgccaaaagcattggactgctgggaggaatgtgcacagccaaaagttgttgtgaaaatcgaggacgaggacgagatgctagaattgcaagaaagagctaaatcccttaaactgcctacccatatcaccattgatgctggaagaacacagattgccccaaattcaaggacggttatggctattcttggaccagtcgaagttgttgatgaagtaacaggtggactaaagcttctttagcagattcgaatttcgatatgacatttcttcaacctgatctctcagatggaccaagcagaaaggagagacatgaactccaccttctctgttcgcccgaggttacctgtgagaaatctgtagttgttacgtatactcgttcctgatgatgacgaaatattcatttt

SEQ ID NO: 104228 - protein, 169 aa, Arabidopsis thaliana
  peptide (1)..(169): Ceres Seq. ID no. 13614583
  misc_feature (65)..(155): Pfam Name: Domain of unknown function UPF0099 Pfam Description: Domain of unknown function UPF0099
  misc_feature (1)..(169): Homolog of NCBI NO: 18418110 NR Description: expressed protein [Arabidopsis thaliana]
  misc_feature (1)..(169): Homolog of NCBI NO: 21592675 NR Description: unknown [Arabidopsis thaliana]
  misc_feature (1)..(169): Homolog of NCBI NO: 11357729 NR Description: hypothetical protein F2K13_20 - Arabidopsis >gi|9755688|emb|CAC01700.1| putative protein [Arabidopsis
  misc_feature (1)..(169): Homolog of NCBI NO: 15228442 NR Description: expressed protein [Arabidopsis thaliana]
  misc_feature (36)..(169): Homolog of NCBI NO: 38345901 NR Description: OSJNBa0060D06.11 [Oryza sativa (japonica
  misc_feature (9)..(168): Homolog of NCBI NO: 7706351 NR Description: CGI-147 protein [Homo sapiens]
  misc_feature (9)..(168): Homolog of NCBI NO: 11359891 NR Description: hypothetical protein DKFZp434A1535.1 - human
  misc_feature (8)..(168): Homolog of NCBI NO: 27674393 NR Description: similar to Protein CGI-147 [Rattus norvegicus]
  misc_feature (8)..(168): Homolog of NCBI NO: 29428218 NR Description: Protein CGI-147 >gi|20070894|gb|AAH26947.1| protein [Mus musculus] >gi|26327477|dbj|BAC27482.1| unnamed
  misc_feature (8)..(168): Homolog of NCBI NO: 33239415 NR Description: RIKEN cDNA A230072I16 gene [Mus musculus]
MDLTWLSALIVGAALGYCIGTRRSKPVVAAVDKDIKTQSSKSPLEIEKLADILDDFKMVLVVRNDLKMGKGKIAAQCSHATLGLYKKLVRRAPKALDCWEECAQPKVVVKIEDEDEMLELQERAKSLKLPTHITIDAGRTQIAPNSRTVMAILGPVEVVDEVTGGLKLL

SEQ ID NO: 104229 - protein, 112 aa, Arabidopsis thaliana; identical to SEQ ID NO: 25693
  peptide (1)..(112): Ceres Seq. ID no. 13614584
  misc_feature (8)..(98): Pfam Name: Domain of unknown function UPF0099 Pfam Description: Domain of unknown function UPF0099
  misc_feature (1)..(112): Homolog of NCBI NO: 18418110 NR Description: expressed protein [Arabidopsis thaliana]
  misc_feature (1)..(112): Homolog of NCBI NO: 21592675 NR Description: unknown [Arabidopsis thaliana]
  misc_feature (1)..(112): Homolog of NCBI NO: 11357729 NR Description: hypothetical protein F2K13_20 - Arabidopsis >gi|9755688|emb|CAC01700.1| putative protein [Arabidopsis
  misc_feature (1)..(112): Homolog of NCBI NO: 15228442 NR Description: expressed protein [Arabidopsis thaliana]
  misc_feature (1)..(112): Homolog of NCBI NO: 38345901 NR Description: OSJNBa0060D06.11 [Oryza sativa (japonica
  misc_feature (1)..(111): Homolog of NCBI NO: 7706351 NR Description: CGI-147 protein [Homo sapiens]
  misc_feature (1)..(111): Homolog of NCBI NO: 11359891 NR Description: hypothetical protein DKFZp434A1535.1 - human
  misc_feature (1)..(111): Homolog of NCBI NO: 27674393 NR Description: similar to Protein CGI-147 [Rattus norvegicus]
  misc_feature (1)..(111): Homolog of NCBI NO: 29428218 NR Description: Protein CGI-147 >gi|20070894|gb|AAH26947.1| protein [Mus musculus] >gi|26327477|dbj|BAC27482.1| unnamed
  misc_feature (1)..(111): Homolog of NCBI NO: 33239415 NR Description: RIKEN cDNA A230072I16 gene [Mus musculus]

SEQ ID NO: 104230 - protein, 102 aa, Arabidopsis thaliana; identical to SEQ ID NO: 25694
  peptide (1)..(102): Ceres Seq. ID no. 13614585
  misc_feature (1)..(88): Pfam Name: Domain of unknown function UPF0099 Pfam Description: Domain of unknown function UPF0099
  misc_feature (1)..(102): Homolog of NCBI NO: 18418110 NR Description: expressed protein [Arabidopsis thaliana]
  misc_feature (1)..(102): Homolog of NCBI NO: 21592675 NR Description: unknown [Arabidopsis thaliana]
  misc_feature (1)..(102): Homolog of NCBI NO: 11357729 NR Description: hypothetical protein F2K13_20 - Arabidopsis >gi|9755688|emb|CAC01700.1| putative protein [Arabidopsis
  misc_feature (1)..(102): Homolog of NCBI NO: 15228442 NR Description: expressed protein [Arabidopsis thaliana]
  misc_feature (1)..(102): Homolog of NCBI NO: 38345901 NR Description: OSJNBa0060D06.11 [Oryza sativa (japonica
  misc_feature (1)..(101): Homolog of NCBI NO: 7706351 NR Description: CGI-147 protein [Homo sapiens]
  misc_feature (1)..(101): Homolog of NCBI NO: 11359891 NR Description: hypothetical protein DKFZp434A1535.1 - human
  misc_feature (1)..(101): Homolog of NCBI NO: 27674393 NR Description: similar to Protein CGI-147 [Rattus norvegicus]
  misc_feature (1)..(101): Homolog of NCBI NO: 29428218 NR Description: Protein CGI-147 >gi|20070894|gb|AAH26947.1| protein [Mus musculus] >gi|26327477|dbj|BAC27482.1| unnamed
  misc_feature (1)..(101): Homolog of NCBI NO: 33239415 NR Description: RIKEN cDNA A230072I16 gene [Mus musculus]

SEQ ID NO: 104231 - DNA, 1323 bp, Arabidopsis thaliana
  misc_feature (1)..(1323): Ceres Seq. ID no. 13614590
  misc_feature: MA Experiment ID: 108461 Result: Down-regulated in Transcription
  misc_feature: MA Experiment 108461 PARAMETER Experiment Name: At_Germinating_Seeds_cDNA_P Parameter: Age (day) Value: 1 vs. 0
  misc_feature: MA Experiment 108461 PARAMETER Experiment Name: At_Germinating_Seeds_cDNA_P Parameter: Tissue Value: Germinating Seeds
  misc_feature: MA Experiment ID: 108473 Result: Down-regulated in Transcription
  misc_feature: MA Experiment 108473 PARAMETER Experiment Name: At_Drought_Flowers_cDNA_P Parameter: Timepoint (hr) Value: 7 d
  misc_feature: MA Experiment 108473 PARAMETER Experiment Name: At_Drought_Flowers_cDNA_P Parameter: Tissue Value: Flower
  misc_feature: MA Experiment 108473 PARAMETER Experiment Name: At_Drought_Flowers_cDNA_P Parameter: Treatment Value: Drought vs. No Drought
  misc_feature: MA Experiment ID: 108501 Result: Down-regulated in Transcription
  misc_feature: MA Experiment 108501 PARAMETER Experiment Name: At_ap2_floral_buds_cDNA_P Parameter: Plant Line Value: ap2 (Ler.)
  misc_feature: MA Experiment 108501 PARAMETER Experiment Name: At_ap2_floral_buds_cDNA_P Parameter: Tissue Value: Closed Flower
  misc_feature: MA Experiment ID: 108574 Result: Up-regulated in Transcription
  misc_feature: MA Experiment 108574 PARAMETER Experiment Name: At_Wounding__cDNA_P Parameter: Timepoint (hr) Value: 1
  misc_feature: MA Experiment 108574 PARAMETER Experiment Name: At_Wounding__cDNA_P Parameter: Tissue Value: Aerial
  misc_feature: MA Experiment 108574 PARAMETER Experiment Name: At_Wounding__cDNA_P Parameter: Treatment Value: Wounding vs. No Wounding
  misc_feature: MA Experiment ID: 108667 Result: Up-regulated in Transcription
  misc_feature: MA Experiment 108667 PARAMETER Experiment Name: At_2mM_SA_cDNA_P Parameter: Plant Line Value: WS
  misc_feature: MA Experiment 108667 PARAMETER Experiment Name: At_2mM_SA_cDNA_P Parameter: Timepoint (hr) Value: 1
  misc_feature: MA Experiment 108667 PARAMETER Experiment Name: At_2mM_SA_cDNA_P Parameter: Treatment Value: 2mM SA vs. No Treatment
  misc_feature: MA Experiment ID: 108668 Result: Up-regulated in Transcription
  misc_feature: MA Experiment 108668 PARAMETER Experiment Name: At_2mM_SA_cDNA_P Parameter: Plant Line Value: WS
  misc_feature: MA Experiment 108668 PARAMETER Experiment Name: At_2mM_SA_cDNA_P Parameter: Timepoint (hr) Value: 6
  misc_feature: MA Experiment 108668 PARAMETER Experiment Name: At_2mM_SA_cDNA_P Parameter: Treatment Value: 2mM SA vs. No Treatment
  misc_feature: MA Experiment ID: 20000179 Result: Down-regulated in Transcription
  misc_feature: MA Experiment 20000179 PARAMETER Experiment Name: At_Germinating_Seeds_P Parameter: Age (hr) Value: 6 vs. 0
  misc_feature: MA Experiment 20000179 PARAMETER Experiment Name: At_Germinating_Seeds_P Parameter: Tissue Value: Germinating Seeds
  misc_feature: MA Experiment ID: 20000180 Result: Down-regulated in Transcription
  misc_feature: MA Experiment 20000180 PARAMETER Experiment Name: At_Germinating_Seeds_P Parameter: Age (hr) Value: 24 vs. 0
  misc_feature: MA Experiment 20000180 PARAMETER Experiment Name: At_Germinating_Seeds_P Parameter: Tissue Value: Germinating Seeds
  misc_feature: MA Experiment ID: 20000182 Result: Up-regulated in Transcription
  misc_feature: MA Experiment 20000182 PARAMETER Experiment Name: At_2mM_SA_P Parameter: Age (day) Value: 14
  misc_feature: MA Experiment 20000182 PARAMETER Experiment Name: At_2mM_SA_P Parameter: Organism Value: A. thaliana
  misc_feature: MA Experiment 20000182 PARAMETER Experiment Name: At_2mM_SA_P Parameter: Plant Line Value: WS
  misc_feature: MA Experiment 20000182 PARAMETER Experiment Name: At_2mM_SA_P Parameter: Timepoint (hr) Value: 6
  misc_feature: MA Experiment 20000182 PARAMETER Experiment Name: At_2mM_SA_P Parameter: Tissue Value: Aerial
  misc_feature: MA Experiment 20000182 PARAMETER Experiment Name: At_2mM_SA_P Parameter: Treatment Value: 2mM SA vs. No Treatment
  misc_feature: MA Experiment ID: 20000265 Result: Up-regulated in Transcription
  misc_feature: MA Experiment 20000265 PARAMETER Experiment Name: At_Open_Flower_P Parameter: Age (day) Value: 21
  misc_feature: MA Experiment 20000265 PARAMETER Experiment Name: At_Open_Flower_P Parameter: Plant Line Value: WS
  misc_feature: MA Experiment 20000265 PARAMETER Experiment Name: At_Open_Flower_P Parameter: Tissue Value: Closed Flower vs. Whole Plant
  misc_feature: MA Experiment ID: 20000286 Result: Up-regulated in Transcription
  misc_feature: MA Experiment 20000286 PARAMETER Experiment Name: At_Open_Flower_P Parameter: Age (day) Value: 21
  misc_feature: MA Experiment 20000286 PARAMETER Experiment Name: At_Open_Flower_P Parameter: Plant Line Value: WS
  misc_feature: MA Experiment 20000286 PARAMETER Experiment Name: At_Open_Flower_P Parameter: Tissue Value: Half Open vs. Whole Plant
  misc_feature: MA Experiment ID: 20000437 Result: Up-regulated in Transcription
  misc_feature: MA Experiment 20000437 PARAMETER Experiment Name: At_Drought_P Parameter: Age (day) Value: 8
  misc_feature: MA Experiment 20000437 PARAMETER Experiment Name: At_Drought_P Parameter: Organism Value: A. thaliana
  misc_feature: MA Experiment 20000437 PARAMETER Experiment Name: At_Drought_P Parameter: Plant Line Value: WS
  misc_feature: MA Experiment 20000437 PARAMETER Experiment Name: At_Drought_P Parameter: Timepoint (hr) Value: 24
  misc_feature: MA Experiment 20000437 PARAMETER Experiment Name: At_Drought_P Parameter: Tissue Value: Whole Plant
  misc_feature: MA Experiment 20000437 PARAMETER Experiment Name: At_Drought_P Parameter: Treatment Value: Drought vs. No Drought
  misc_feature: MA Experiment ID: 20000438 Result: Down-regulated in Transcription
  misc_feature: MA Experiment 20000438 PARAMETER Experiment Name: At_Shoots__P Parameter: Age (day) Value: 14
  misc_feature: MA Experiment 20000438 PARAMETER Experiment Name: At_Shoots__P Parameter: Tissue Value: Shoots vs. Whole Plant
  misc_feature: MA Experiment ID: 20000439 Result: Down-regulated in Transcription
  misc_feature: MA Experiment 20000439 PARAMETER Experiment Name: At_Roots__P Parameter: Age (day) Value: 14 vs. 21
  misc_feature: MA Experiment 20000439 PARAMETER Experiment Name: At_Roots__P Parameter: Organism Value: A. thaliana
  misc_feature: MA Experiment 20000439 PARAMETER Experiment Name: At_Roots__P Parameter: Tissue Value: Roots vs. Whole Plant
  misc_feature: MA Experiment ID: 20000453 Result: Up-regulated in Transcription
  misc_feature: MA Experiment 20000453 PARAMETER Experiment Name: At_100uM_ABA_P Parameter: Age (day) Value: 15
  misc_feature: MA Experiment 20000453 PARAMETER Experiment Name: At_100uM_ABA_P Parameter: Organism Value: A. thaliana
  misc_feature: MA Experiment 20000453 PARAMETER Experiment Name: At_100uM_ABA_P Parameter: Plant Line Value: WS
  misc_feature: MA Experiment 20000453 PARAMETER Experiment Name: At_100uM_ABA_P Parameter: Timepoint (hr) Value: 24
  misc_feature: MA Experiment 20000453 PARAMETER Experiment Name: At_100uM_ABA_P Parameter: Tissue Value: Aerial
  misc_feature: MA Experiment 20000453 PARAMETER Experiment Name: At_100uM_ABA_P Parameter: Treatment Value: 100uM ABA vs. No Treatment
  misc_feature: MA Experiment ID: 20000527 Result: Down-regulated in Transcription
  misc_feature: MA Experiment 20000527 PARAMETER Experiment Name: At_10percent_PEG_P Parameter: Age (day) Value: 20
  misc_feature: MA Experiment 20000527 PARAMETER Experiment Name: At_10percent_PEG_P Parameter: Organism Value: A. thaliana
  misc_feature: MA Experiment 20000527 PARAMETER Experiment Name: At_10percent_PEG_P Parameter: Plant Line Value: WS
  misc_feature: MA Experiment 20000527 PARAMETER Experiment Name: At_10percent_PEG_P Parameter: Timepoint (day) Value: 20
  misc_feature: MA Experiment 20000527 PARAMETER Experiment Name: At_10percent_PEG_P Parameter: Tissue Value: Whole Plant
  misc_feature: MA Experiment 20000527 PARAMETER Experiment Name: At_10percent_PEG_P Parameter: Treatment Value: 10percent PEG vs. No Treatment
  misc_feature: MA Experiment ID: 20000709 Result: Up-regulated in Transcription
  misc_feature: MA Experiment 20000709 PARAMETER Experiment Name: At_15mM_NH4NO3_L-to-H_P Parameter: Age (hr) Value: 14
  misc_feature: MA Experiment 20000709 PARAMETER Experiment Name: At_15mM_NH4NO3_L-to-H_P Parameter: Organism Value: A. thaliana
  misc_feature: MA Experiment 20000709 PARAMETER Experiment Name: At_15mM_NH4NO3_L-to-H_P Parameter: Plant Line Value: WS
  misc_feature: MA Experiment 20000709 PARAMETER Experiment Name: At_15mM_NH4NO3_L-to-H_P Parameter: Timepoint (hr) Value: 4
  misc_feature: MA Experiment 20000709 PARAMETER Experiment Name: At_15mM_NH4NO3_L-to-H_P Parameter: Tissue Value: Aerial
  misc_feature: MA Experiment 20000709 PARAMETER Experiment Name: At_15mM_NH4NO3_L-to-H_P Parameter: Treatment Value: 15mM NH4NO3 vs. 30mM Mannitol
  misc_feature: MA Experiment ID: 20001556 Result: Up-regulated in Transcription
  misc_feature: MA Experiment 20001556 PARAMETER Experiment Name: At_Drought_Soil_Dry_P Parameter: Age (day) Value: 26
  misc_feature: MA Experiment 20001556 PARAMETER Experiment Name: At_Drought_Soil_Dry_P Parameter: Organism Value: A. thaliana
  misc_feature: MA Experiment 20001556 PARAMETER Experiment Name: At_Drought_Soil_Dry_P Parameter: Plant Line Value: WS
  misc_feature: MA Experiment 20001556 PARAMETER Experiment Name: At_Drought_Soil_Dry_P Parameter: Post Timepoint (hr) Value: None
  misc_feature: MA Experiment 20001556 PARAMETER Experiment Name: At_Drought_Soil_Dry_P Parameter: Post-Treatment Value: None
  misc_feature: MA Experiment 20001556 PARAMETER Experiment Name: At_Drought_Soil_Dry_P Parameter: Timepoint (day) Value: 12
  misc_feature: MA Experiment 20001556 PARAMETER Experiment Name: At_Drought_Soil_Dry_P Parameter: Treatment Value: Drought vs. No Drought
  misc_feature: MA Experiment ID: 20001557 Result: Up-regulated in Transcription
  misc_feature: MA Experiment 20001557 PARAMETER Experiment Name: At_Drought_Soil_Dry_P Parameter: Age (day) Value: 27
  misc_feature: MA Experiment 20001557 PARAMETER Experiment Name: At_Drought_Soil_Dry_P Parameter: Organism Value: A. thaliana
  misc_feature: MA Experiment 20001557 PARAMETER Experiment Name: At_Drought_Soil_Dry_P Parameter: Plant Line Value: WS
  misc_feature: MA Experiment 20001557 PARAMETER Experiment Name: At_Drought_Soil_Dry_P Parameter: Post Timepoint (hr) Value: 3
  misc_feature: MA Experiment 20001557 PARAMETER Experiment Name: At_Drought_Soil_Dry_P Parameter: Post-Treatment Value: Re-Water vs. No Drought
  misc_feature: MA Experiment 20001557 PARAMETER Experiment Name: At_Drought_Soil_Dry_P Parameter: Timepoint (day) Value: 13
  misc_feature: MA Experiment 20001557 PARAMETER Experiment Name: At_Drought_Soil_Dry_P Parameter: Treatment Value: Drought vs. No Drought
  misc_feature: MA Experiment ID: 20001560 Result: Up-regulated in Transcription
  misc_feature: MA Experiment 20001560 PARAMETER Experiment Name: At_Drought_Soil_Dry_P Parameter: Age (day) Value: 28
  misc_feature: MA Experiment 20001560 PARAMETER Experiment Name: At_Drought_Soil_Dry_P Parameter: Organism Value: A. thaliana
  misc_feature: MA Experiment 20001560 PARAMETER Experiment Name: At_Drought_Soil_Dry_P Parameter: Plant Line Value: WS
  misc_feature: MA Experiment 20001560 PARAMETER Experiment Name: At_Drought_Soil_Dry_P Parameter: Post Timepoint (hr) Value: None
  misc_feature: MA Experiment 20001560 PARAMETER Experiment Name: At_Drought_Soil_Dry_P Parameter: Post-Treatment Value: None
  misc_feature: MA Experiment 20001560 PARAMETER Experiment Name: At_Drought_Soil_Dry_P Parameter: Timepoint (day) Value: 14
  misc_feature: MA Experiment 20001560 PARAMETER Experiment Name: At_Drought_Soil_Dry_P Parameter: Treatment Value: Drought vs. No Drought
  misc_feature: MA Experiment ID: 20001757 Result: Down-regulated in Transcription
  misc_feature: MA Experiment 20001757 PARAMETER Experiment Name: At_50mM_NH4NO3_L-to-H_P Parameter: Timepoint (hr) Value: 6
  misc_feature: MA Experiment 20001757 PARAMETER Experiment Name: At_50mM_NH4NO3_L-to-H_P Parameter: Tissue Value: Leaf
  misc_feature: MA Experiment 20001757 PARAMETER Experiment Name: At_50mM_NH4NO3_L-to-H_P Parameter: Treatment Value: 50mM NH4NO3 vs 100mM Mannitol
  misc_feature: MA Experiment ID: 20001904 Result: Up-regulated in Transcription
  misc_feature: MA Experiment 20001904 PARAMETER Experiment Name: At_Drought_Reproduction_P Parameter: Age (day) Value: 37
  misc_feature: MA Experiment 20001904 PARAMETER Experiment Name: At_Drought_Reproduction_P Parameter: Organism Value: A. thaliana
  misc_feature: MA Experiment 20001904 PARAMETER Experiment Name: At_Drought_Reproduction_P Parameter: Plant Line Value: WS
  misc_feature: MA Experiment 20001904 PARAMETER Experiment Name: At_Drought_Reproduction_P Parameter: Timepoint (day) Value: 7
  misc_feature: MA Experiment 20001904 PARAMETER Experiment Name: At_Drought_Reproduction_P Parameter: Tissue Value: Rosettes
  misc_feature: MA Experiment 20001904 PARAMETER Experiment Name: At_Drought_Reproduction_P Parameter: Treatment Value: Drought vs. No Drought
  misc_feature: MA Experiment ID: 20001905 Result: Up-regulated in Transcription
  misc_feature: MA Experiment 20001905 PARAMETER Experiment Name: At_Drought_Reproduction_P Parameter: Age (day) Value: 40
  misc_feature: MA Experiment 20001905 PARAMETER Experiment Name: At_Drought_Reproduction_P Parameter: Organism Value: A. thaliana
  misc_feature: MA Experiment 20001905 PARAMETER Experiment Name: At_Drought_Reproduction_P Parameter: Plant Line Value: WS
  misc_feature: MA Experiment 20001905 PARAMETER Experiment Name: At_Drought_Reproduction_P Parameter: Timepoint (day) Value: 10
  misc_feature: MA Experiment 20001905 PARAMETER Experiment Name: At_Drought_Reproduction_P Parameter: Tissue Value: Rosettes
  misc_feature: MA Experiment 20001905 PARAMETER Experiment Name: At_Drought_Reproduction_P Parameter: Treatment Value: Drought vs. No Drought
  misc_feature: MA Experiment ID: 20001911 Result: Down-regulated in Transcription
  misc_feature: MA Experiment 20001911 PARAMETER Experiment Name: At_Drought_Reproduction_P Parameter: Age (day) Value: 40
  misc_feature: MA Experiment 20001911 PARAMETER Experiment Name: At_Drought_Reproduction_P Parameter: Organism Value: A. thaliana
  misc_feature: MA Experiment 20001911 PARAMETER Experiment Name: At_Drought_Reproduction_P Parameter: Plant Line Value: WS
  misc_feature: MA Experiment 20001911 PARAMETER Experiment Name: At_Drought_Reproduction_P Parameter: Timepoint (day) Value: 10
  misc_feature: MA Experiment 20001911 PARAMETER Experiment Name: At_Drought_Reproduction_P Parameter: Tissue Value: Flowers
  misc_feature: MA Experiment 20001911 PARAMETER Experiment Name: At_Drought_Reproduction_P Parameter: Treatment Value: Drought vs. No Drought
aaccaaaaacaaacattttctaaaaaatggcgacaacgatcaacaagcaagtcgtgttacttgattacgtaaccggtttcgccaaggaatccgaccttgtaatcacctccaccaccatcgatcttagggtgctaaagggatctatgacggcgttggtgaagaatctctacttgtcttgtgatccttacatgcgaaatcgtatgaggaaacctgatcctctgagccctgctactgctcagtccttcactcccggcaagcctatctcagggtttggagtgtctaaagtgatagattctggacactcagattacgaagaaggtgacttaatttggggagcagtaggatgggaagagtacagtgttattacaccaattcctaatcttcacttcaagatccatcataccaattttcctttatcttactacacaggacttcttggtatgcctggtatgaccgcgtatgttgggttttacgagatatgtactccaaagaaaggagatactgtgtttgtgtcggctgcatctggcgcggttggtcagcttgtaggacaatttgctaagttgatgggttgttatgttgttggaagcgctgggagtaaagaaaaggttgatctcctcaagaacaagtttggattcgatgatgccttcaactacaaggaagaacacaatcttattggtgccctaaaaaggtgtttccctgaaggcattgacatatactttgagaacgtaggaggcaagatgctggatgcagtgatcttaaacatgagaccacacggccgtatcgcggcatgtgggatgatctcacagtacaatctgaagaatccggaaggtatatacggcctctcgctcattacatacaaacgaatccgtattgaagggttcaactgtttcgattacttccacaaatactcggagttcttggagtttgtggttccgtatataaaagaagggaagataaagtatgtggaagatgttgctgatggactcgagagtgctcctgctgctctcgttggactctttcacggtaaaaacgtcgggaaacaacttgtcgtggtttcgccatcataagtgataaaatgagatcagtacgtacttgttcggtaagtgatgtttcggaagttggatatgtctccgtacaagatatgaaattgttgaaaagtatatgtatttggtgaagtttgcagaggacgttagtgttgagtcctttaatttggttcataatgttttagtttcttcagcaacaatacaagagatcagggttcggttttgtcaataatgtaataatttgtctaaattatgaaataaataaatttattattagcct

SEQ ID NO: 104232 - protein, 346 aa, Arabidopsis thaliana
  peptide (1)..(346): Ceres Seq. ID no. 13614591
  misc_feature (106)..(343): Pfam Name: Zinc-binding dehydrogenase Pfam Description: Zinc-binding dehydrogenase
  misc_feature (1)..(346): Homolog of NCBI NO: 15237883 NR Description: NADP-dependent oxidoreductase, putative
  misc_feature (1)..(346): Homolog of NCBI NO: 21595408 NR Description: quinone oxidoreductase-like protein [Arabidopsis
  misc_feature (4)..(344): Homolog of NCBI NO: 15237890 NR Description: allyl alcohol dehydrogenase, putative
  misc_feature (1)..(344): Homolog of NCBI NO: 15240810 NR Description: NADP-dependent oxidoreductase, putative
  misc_feature (3)..(344): Homolog of NCBI NO: 22326861 NR Description: NADP-dependent oxidoreductase, putative thaliana] >gi|16604344|gb|AAL24178.1| AT5g16970/F2K13_120 thaliana] >gi|23297366|gb|AAN12951.1| putative quinone
  misc_feature (4)..(344): Homolog of NCBI NO: 21554121 NR Description: quinone oxidoreductase-like protein [Arabidopsis
  misc_feature (1)..(344): Homolog of NCBI NO: 21536967 NR Description: quinone oxidoreductase-like protein [Arabidopsis
  misc_feature (3)..(344): Homolog of NCBI NO: 17529140 NR Description: putative quinone oxidoreductase [Arabidopsis
  misc_feature (3)..(344): Homolog of NCBI NO: 15237888 NR Description: NADP-dependent oxidoreductase (P1), putative
  misc_feature (4)..(344): Homolog of NCBI NO: 1362014 NR Description: probable NADPH2:quinone reductase (EC 1.6.5.5) P2
MATTINKQVVLLDYVTGFAKESDLVITSTTIDLRVLKGSMTALVKNLYLSCDPYMRNRMRKPDPLSPATAQSFTPGKPISGFGVSKVIDSGHSDYEEGDLIWGAVGWEEYSVITPIPNLHFKIHHTNFPLSYYTGLLGMPGMTAYVGFYEICTPKKGDTVFVSAASGAVGQLVGQFAKLMGCYVVGSAGSKEKVDLLKNKFGFDDAFNYKEEHNLIGALKRCFPEGIDIYFENVGGKMLDAVILNMRPHGRIAACGMISQYNLKNPEGIYGLSLITYKRIRIEGFNCFDYFHKYSEFLEFVVPYIKEGKIKYVEDVADGLESAPAALVGLFHGKNVGKQLVVVSPS

SEQ ID NO: 104233 - protein, 307 aa, Arabidopsis thaliana
  peptide (1)..(307): Ceres Seq. ID no. 13614592
  misc_feature (67)..(304): Pfam Name: Zinc-binding dehydrogenase Pfam Description: Zinc-binding dehydrogenase
  misc_feature (1)..(307): Homolog of NCBI NO: 15237883 NR Description: NADP-dependent oxidoreductase, putative
  misc_feature (1)..(307): Homolog of NCBI NO: 21595408 NR Description: quinone oxidoreductase-like protein [Arabidopsis
  misc_feature (1)..(305): Homolog of NCBI NO: 15237890 NR Description: allyl alcohol dehydrogenase, putative
  misc_feature (1)..(305): Homolog of NCBI NO: 15240810 NR Description: NADP-dependent oxidoreductase, putative
  misc_feature (1)..(305): Homolog of NCBI NO: 22326861 NR Description: NADP-dependent oxidoreductase, putative thaliana] >gi|16604344|gb|AAL24178.1| AT5g16970/F2K13_120 thaliana] >gi|23297366|gb|AAN12951.1| putative quinone
  misc_feature (1)..(305): Homolog of NCBI NO: 21554121 NR Description: quinone oxidoreductase-like protein [Arabidopsis
  misc_feature (1)..(305): Homolog of NCBI NO: 21536967 NR Description: quinone oxidoreductase-like protein [Arabidopsis
  misc_feature (1)..(305): Homolog of NCBI NO: 17529140 NR Description: putative quinone oxidoreductase [Arabidopsis
  misc_feature (1)..(305): Homolog of NCBI NO: 15237888 NR Description: NADP-dependent oxidoreductase (P1), putative
  misc_feature (1)..(305): Homolog of NCBI NO: 1362014 NR Description: probable NADPH2:quinone reductase (EC 1.6.5.5) P2
MTALVKNLYLSCDPYMRNRMRKPDPLSPATAQSFTPGKPISGFGVSKVIDSGHSDYEEGDLIWGAVGWEEYSVITPIPNLHFKIHHTNFPLSYYTGLLGMPGMTAYVGFYEICTPKKGDTVFVSAASGAVGQLVGQFAKLMGCYVVGSAGSKEKVDLLKNKFGFDDAFNYKEEHNLIGALKRCFPEGIDIYFENVGGKMLDAVILNMRPHGRIAACGMISQYNLKNPEGIYGLSLITYKRIRIEGFNCFDYFHKYSEFLEFVVPYIKEGKIKYVEDVADGLESAPAALVGLFHGKNVGKQLVVVSPS

SEQ ID NO: 104234 - protein, 292 aa, Arabidopsis thaliana
  peptide (1)..(292): Ceres Seq. ID no. 13614593
  misc_feature (52)..(289): Pfam Name: Zinc-binding dehydrogenase Pfam Description: Zinc-binding dehydrogenase
  misc_feature (1)..(292): Homolog of NCBI NO: 15237883 NR Description: NADP-dependent oxidoreductase, putative
  misc_feature (1)..(292): Homolog of NCBI NO: 21595408 NR Description: quinone oxidoreductase-like protein [Arabidopsis
  misc_feature (1)..(290): Homolog of NCBI NO: 15237890 NR Description: allyl alcohol dehydrogenase, putative
  misc_feature (1)..(290): Homolog of NCBI NO: 15240810 NR Description: NADP-dependent oxidoreductase, putative
  misc_feature (1)..(290): Homolog of NCBI NO: 22326861 NR Description: NADP-dependent oxidoreductase, putative thaliana] >gi|16604344|gb|AAL24178.1| AT5g16970/F2K13_120 thaliana] >gi|23297366|gb|AAN12951.1| putative quinone
  misc_feature (1)..(290): Homolog of NCBI NO: 21554121 NR Description: quinone oxidoreductase-like protein [Arabidopsis
  misc_feature (1)..(290): Homolog of NCBI NO: 21536967 NR Description: quinone oxidoreductase-like protein [Arabidopsis
  misc_feature (1)..(290): Homolog of NCBI NO: 17529140 NR Description: putative quinone oxidoreductase [Arabidopsis
  misc_feature (1)..(290): Homolog of NCBI NO: 15237888 NR Description: NADP-dependent oxidoreductase (P1), putative
  misc_feature (1)..(290): Homolog of NCBI NO: 1362014 NR Description: probable NADPH2:quinone reductase (EC 1.6.5.5) P2
MRNRMRKPDPLSPATAQSFTPGKPISGFGVSKVIDSGHSDYEEGDLIWGAVGWEEYSVITPIPNLHFKIHHTNFPLSYYTGLLGMPGMTAYVGFYEICTPKKGDTVFVSAASGAVGQLVGQFAKLMGCYVVGSAGSKEKVDLLKNKFGFDDAFNYKEEHNLIGALKRCFPEGIDIYFENVGGKMLDAVILNMRPHGRIAACGMISQYNLKNPEGIYGLSLITYKRIRIEGFNCFDYFHKYSEFLEFVVPYIKEGKIKYVEDVADGLESAPAALVGLFHGKNVGKQLVVVSPS

SEQ ID NO: 104235 - DNA, 1334 bp, Arabidopsis thaliana
  misc_feature (1)..(1334): Ceres Seq. ID no. 13614594
  misc_feature: MA Experiment ID: 20000314 Result: Down-regulated in Transcription
  misc_feature: MA Experiment 20000314 PARAMETER Experiment Name: At_14day_Shoots-Roots_Sub_P Parameter: Age (day) Value: 14
  misc_feature: MA Experiment 20000314 PARAMETER Experiment Name: At_14day_Shoots-Roots_Sub_P Parameter: Organism Value: A. thaliana
  misc_feature: MA Experiment 20000314 PARAMETER Experiment Name: At_14day_Shoots-Roots_Sub_P Parameter: Plant Line Value: WS
  misc_feature: MA Experiment 20000314 PARAMETER Experiment Name: At_14day_Shoots-Roots_Sub_P Parameter: Tissue Value: Roots vs. Whole Plant
  misc_feature: MA Experiment ID: 20000355 Result: Up-regulated in Transcription
  misc_feature: MA Experiment 20000355 PARAMETER Experiment Name: At_Siliques_Sub_P Parameter: Age (day) Value: 21
  misc_feature: MA Experiment 20000355 PARAMETER Experiment Name: At_Siliques_Sub_P Parameter: Organism Value: A. thaliana
  misc_feature: MA Experiment 20000355 PARAMETER Experiment Name: At_Siliques_Sub_P Parameter: Plant Line Value: WS
  misc_feature: MA Experiment 20000355 PARAMETER Experiment Name: At_Siliques_Sub_P Parameter: Tissue Value: Less Than 5mm Siliques vs. Whole Plant
  misc_feature: MA Experiment ID: 20000440 Result: Up-regulated in Transcription
  misc_feature: MA Experiment 20000440 PARAMETER Experiment Name: At_Closed-Flower__Sub_P Parameter: Tissue Value: Closed Flower vs. Whole Plant
attgtgatgaatcatcatgagcagtgacttcatacttgatattacgagtgagaggccactataaaaagcaggcgcgtcctcgaagaagaagaagaagaagtaacaaattggtggaaatcagaagttgaatcggagaataacaacgatgacgacgaacaagcaggtcatattcaaagaccacgtgagtggtttccctaaggaatccgatttcaatttcaccaccaccaccgtcgaacttagggttccggaaggttctaaatcggttcttgtgaagaatctctacctgtcatgcgatccttatatgcggtctcgcatggggaaacctgatccctcctctgctcttgctcaagcttacgctcccggcaagccaatctatgggtatggagtgtctagagtgatagaatctgggcatccagattacaagaaaggtgatttactctggggaatagttggatgggaggagtatagtgttattacaccaatggctcacatgcatttcaagatccaacatacagatgttccattatcctactatactggacttctcggtatgcctggtatgactgcctatgctgggttttatgaagtttgttctccaaagaaaggagagacagtttatgtgtcagctgcatctggtgcggttggtcagcttgtgggacaatttgctaagatgatgggctgttatgttgttggaagcgctggaagtaaagaaaaggttgatctcctgaagaccaagtttgggtttgatgatgcatttaactacaaggaagaatctgaccttagtgctgccctcaaaaggtgttttcccaagggcatcgacatgtactttgagaacgtaggaggcaaaatgctagatgcagtgctcttaaacatgaacccacacgggcgtatcgctgtctgtggaatgatctcacagtacaatcttgaaaatcaagaaggtgtacacaacctatccaatatcatctacaaacgaatacgcattcaaggctttgtagtggctgatttctacgacaaatacccaaagttcttggagttggtgcttccgcgcattaaagaagggaagataacgtatgtggaagatgtagctgatgggctcgagaaagctcctgaagctcttgtggggcttttccatggtaagaacgttgggaaacaagttgttgttattgctcgtgagtgaagaatacttatttgggagtaatgtcttattgcgcgtgagtgaagaatacttatttgggagaaatgttatatttatccaacaagagttggtatgtctgttgaacccaaccgtgagtttttggtttatgaataatactagtaactataatatatagtaa

SEQ ID NO: 104236 - protein, 343 aa, Arabidopsis thaliana; identical to SEQ ID NO: 43475
  peptide (1)..(343): Ceres Seq. ID no. 13614595
  misc_feature (132)..(340): Pfam Name: Zinc-binding dehydrogenase Pfam Description: Zinc-binding dehydrogenase
  misc_feature (1)..(343): Homolog of NCBI NO: 15237890 NR Description: allyl alcohol dehydrogenase, putative
  misc_feature (1)..(343): Homolog of NCBI NO: 21554121 NR Description: quinone oxidoreductase-like protein [Arabidopsis
  misc_feature (1)..(343): Homolog of NCBI NO: 1362014 NR Description: probable NADPH2:quinone reductase (EC 1.6.5.5) P2
  misc_feature (1)..(343): Homolog of NCBI NO: 15237888 NR Description: NADP-dependent oxidoreductase (P1), putative
  misc_feature (1)..(343): Homolog of NCBI NO: 22326861 NR Description: NADP-dependent oxidoreductase, putative thaliana] >gi|16604344|gb|AAL24178.1| AT5g16970/F2K13_120 thaliana] >gi|23297366|gb|AAN12951.1| putative quinone
  misc_feature (1)..(343): Homolog of NCBI NO: 17529140 NR Description: putative quinone oxidoreductase [Arabidopsis
  misc_feature (1)..(343): Homolog of NCBI NO: 21539447 NR Description: quinone oxidoreductase-like protein [Arabidopsis
  misc_feature (1)..(343): Homolog of NCBI NO: 11358742 NR Description: quinone oxidoreductase-like protein - Arabidopsis
  misc_feature (4)..(343): Homolog of NCBI NO: 15228456 NR Description: NADP-dependent oxidoreductase (P2), putative
  misc_feature (1)..(343): Homolog of NCBI NO: 21593645 NR Description: allyl alcohol dehydrogenase, putative

SEQ ID NO: 104237 - protein, 291 aa, Arabidopsis thaliana; identical to SEQ ID NO: 43476
  peptide (1)..(291): Ceres Seq. ID no. 13614596
  misc_feature (80)..(288): Pfam Name: Zinc-binding dehydrogenase Pfam Description: Zinc-binding dehydrogenase
  misc_feature (1)..(291): Homolog of NCBI NO: 15237890 NR Description: allyl alcohol dehydrogenase, putative
  misc_feature (1)..(291): Homolog of NCBI NO: 21554121 NR Description: quinone oxidoreductase-like protein [Arabidopsis
  misc_feature (1)..(291): Homolog of NCBI NO: 1362014 NR Description: probable NADPH2:quinone reductase (EC 1.6.5.5) P2
  misc_feature (1)..(291): Homolog of NCBI NO: 15237888 NR Description: NADP-dependent oxidoreductase (P1), putative
  misc_feature (1)..(291): Homolog of NCBI NO: 22326861 NR Description: NADP-dependent oxidoreductase, putative thaliana] >gi|16604344|gb|AAL24178.1| AT5g16970/F2K13_120 thaliana] >gi|23297366|gb|AAN12951.1| putative quinone
  misc_feature (1)..(291): Homolog of NCBI NO: 17529140 NR Description: putative quinone oxidoreductase [Arabidopsis
  misc_feature (1)..(291): Homolog of NCBI NO: 21539447 NR Description: quinone oxidoreductase-like protein [Arabidopsis
  misc_feature (1)..(291): Homolog of NCBI NO: 11358742 NR Description: quinone oxidoreductase-like protein - Arabidopsis
  misc_feature (1)..(291): Homolog of NCBI NO: 15228456 NR Description: NADP-dependent oxidoreductase (P2), putative
  misc_feature (1)..(291): Homolog of NCBI NO: 21593645 NR Description: allyl alcohol dehydrogenase, putative

SEQ ID NO: 104238 - protein, 287 aa, Arabidopsis thaliana; identical to SEQ ID NO: 43477
  peptide (1)..(287): Ceres Seq. ID no. 13614597
  misc_feature (76)..(284): Pfam Name: Zinc-binding dehydrogenase Pfam Description: Zinc-binding dehydrogenase
  misc_feature (1)..(287): Homolog of NCBI NO: 15237890 NR Description: allyl alcohol dehydrogenase, putative
  misc_feature (1)..(287): Homolog of NCBI NO: 21554121 NR Description: quinone oxidoreductase-like protein [Arabidopsis
  misc_feature (1)..(287): Homolog of NCBI NO: 1362014 NR Description: probable NADPH2:quinone reductase (EC 1.6.5.5) P2
  misc_feature (1)..(287): Homolog of NCBI NO: 15237888 NR Description: NADP-dependent oxidoreductase (P1), putative
  misc_feature (1)..(287): Homolog of NCBI NO: 22326861 NR Description: NADP-dependent oxidoreductase, putative thaliana] >gi|16604344|gb|AAL24178.1| AT5g16970/F2K13_120 thaliana] >gi|23297366|gb|AAN12951.1| putative quinone
  misc_feature (1)..(287): Homolog of NCBI NO: 17529140 NR Description: putative quinone oxidoreductase [Arabidopsis
  misc_feature (1)..(287): Homolog of NCBI NO: 21539447 NR Description: quinone oxidoreductase-like protein [Arabidopsis
  misc_feature (1)..(287): Homolog of NCBI NO: 11358742 NR Description: quinone oxidoreductase-like protein - Arabidopsis
  misc_feature (1)..(287): Homolog of NCBI NO: 15228456 NR Description: NADP-dependent oxidoreductase (P2), putative
  misc_feature (1)..(287): Homolog of NCBI NO: 21593645 NR Description: allyl alcohol dehydrogenase, putative

SEQ ID NO: 104239 - DNA, 1210 bp, Arabidopsis thaliana
  misc_feature (1)..(1210): Ceres Seq. ID no. 13614616
  misc_feature: MA Experiment ID: 108577 Result: Up-regulated in Transcription
  misc_feature: MA Experiment 108577 PARAMETER Experiment Name: At_42deg_Heat_cDNA_P Parameter: Temperature (deg C) Value: 42 vs. 22
  misc_feature: MA Experiment 108577 PARAMETER Experiment Name: At_42deg_Heat_cDNA_P Parameter: Timepoint (hr) Value: 6
  misc_feature: MA Experiment 108577 PARAMETER Experiment Name: At_42deg_Heat_cDNA_P Parameter: Tissue Value: Aerial
ataacgaagcggttggaagaagatgaaactgttcgacgcgcactgtcaccttcaagacccgaggattatcaccaaagctcctcagataatctcctccgccgttgcttccggcgtctctgctttcgccgtcaatggagtctccgagaaagattggagtttggtcaaagagatgggagctaaatacccttctgttgttccttgctttgggatccatccatggtatgtagcagagaggagtcctcaatggtttgagacattaaagagtttctttgagaccactcctactgctgctgttggagaaattggtttggacaaagggtctaagggaagggagattgatttctcagaacaggttaccgtctttcgtcaacagcttgaacttgcaaaggaattgaagaaacctgcgtcagttcattgtgttcgtgcatttggggatctactcgagatattaaaatctgtagggccttttccttctggggtcatgcttcactcgtatttgggttctgctgagatggttcctgaatttgctaagctcggtgcatatttctccttctccggtttccttatgtccatgagtgagaaaaaagccaagaagatgttgaaagcagttccatctgataggatcttattggagacggattcaccagatgcactaccaaaggcagagtcaggttgtctctactttgtagacggagatccttctctacccgaagaaggaaattcagctcaggatcttgattctgcttcatatgataagcctaatgtgtctagtgactcgatgaagttaacaaaggaaacacttaatcacccggctaatattcatatcgtactcggatatgtagcgcagttgttggatatgaagaatgaagaactcgcggaactaagttatcaaaatgctgttcggttattctcttacgaaggttcaaagatacttcttgacagaggtactggtgatgtctctggtcacactcaaaaccagtcaacaacacatgtatcatgagttcttacttcttaagaaatcgtagtgtttctcatcactctattacgagtctttgaatttggactctctcttttttttttctttttttttttgaatgtttgaatttggaattattgtactagtgttatagacaatcacacttttctatgtacaaactacaaaggttctgattttgtgtgaaaattaattcagttaatgatgtgattagag

SEQ ID NO: 104240 - protein, 325 aa, Arabidopsis thaliana
  peptide (1)..(325): Ceres Seq. ID no. 13614617
  misc_feature (1)..(298): Pfam Name: TatD related DNase Pfam Description: TatD related DNase
  misc_feature (1)..(325): Homolog of NCBI NO: 18418353 NR Description: expressed protein [Arabidopsis thaliana]
  misc_feature (1)..(325): Homolog of NCBI NO: 11357936 NR Description: hypothetical protein K10A8_50 - Arabidopsis >gi|9755782|emb|CAC01901.1| putative protein [Arabidopsis
  misc_feature (1)..(303): Homolog of NCBI NO: 38345538 NR Description: OSJNBa0020J04.13 [Oryza sativa (japonica
  misc_feature (1)..(239): Homolog of NCBI NO: 15228573 NR Description: hypothetical protein [Arabidopsis thaliana]
  misc_feature (3)..(238): Homolog of NCBI NO: 39998376 NR Description: hydrolase, TatD family [Geobacter sulfurreducens >gi|39985322|gb|AAR36677.1| hydrolase, TatD family [Geobacter
  misc_feature (1)..(213): Homolog of NCBI NO: 15677535 NR Description: conserved hypothetical protein [Neisseria
  misc_feature (1)..(213): Homolog of NCBI NO: 15794829 NR Description: conserved hypothetical protein [Neisseria Z2491] >gi|11352977|pir||H81822 conserved hypothetical protein
  misc_feature (3)..(209): Homolog of NCBI NO: 23028677 NR Description: hypothetical protein [Microbulbifer degradans
  misc_feature (1)..(217): Homolog of NCBI NO: 23055931 NR Description: hypothetical protein [Geobacter metallireducens]
  misc_feature (1)..(230): Homolog of NCBI NO: 26987527 NR Description: deoxyribonuclease, TatD family [Pseudomonas KT2440] >gi|24982196|gb|AAN66416.1|AE016269_3 deoxyribonuclease,
MKLFDAHCHLQDPRIITKAPQIISSAVASGVSAFAVNGVSEKDWSLVKEMGAKYPSVVPCFGIHPWYVAERSPQWFETLKSFFETTPTAAVGEIGLDKGSKGREIDFSEQVTVFRQQLELAKELKKPASVHCVRAFGDLLEILKSVGPFPSGVMLHSYLGSAEMVPEFAKLGAYFSFSGFLMSMSEKKAKKMLKAVPSDRILLETDSPDALPKAESGCLYFVDGDPSLPEEGNSAQDLDSASYDKPNVSSDSMKLTKETLNHPANIHIVLGYVAQLLDMKNEELAELSYQNAVRLFSYEGSKILLDRGTGDVSGHTQNQSTTHVS

SEQ ID NO: 104241 - protein, 276 aa, Arabidopsis thaliana
  peptide (1)..(276): Ceres Seq. ID no. 13614618
  misc_feature (1)..(249): Pfam Name: TatD related DNase Pfam Description: TatD related DNase
  misc_feature (1)..(276): Homolog of NCBI NO: 18418353 NR Description: expressed protein [Arabidopsis thaliana]
  misc_feature (1)..(276): Homolog of NCBI NO: 11357936 NR Description: hypothetical protein K10A8_50 - Arabidopsis >gi|9755782|emb|CAC01901.1| putative protein [Arabidopsis
  misc_feature (1)..(254): Homolog of NCBI NO: 38345538 NR Description: OSJNBa0020J04.13 [Oryza sativa (japonica
  misc_feature (1)..(190): Homolog of NCBI NO: 15228573 NR Description: hypothetical protein [Arabidopsis thaliana]
  misc_feature (1)..(189): Homolog of NCBI NO: 39998376 NR Description: hydrolase, TatD family [Geobacter sulfurreducens >gi|39985322|gb|AAR36677.1| hydrolase, TatD family [Geobacter
  misc_feature (1)..(164): Homolog of NCBI NO: 15677535 NR Description: conserved hypothetical protein [Neisseria
  misc_feature (1)..(164): Homolog of NCBI NO: 15794829 NR Description: conserved hypothetical protein [Neisseria Z2491] >gi|11352977|pir||H81822 conserved hypothetical protein
  misc_feature (1)..(160): Homolog of NCBI NO: 23028677 NR Description: hypothetical protein [Microbulbifer degradans
  misc_feature (1)..(168): Homolog of NCBI NO: 23055931 NR Description: hypothetical protein [Geobacter metallireducens]
  misc_feature (1)..(181): Homolog of NCBI NO: 26987527 NR Description: deoxyribonuclease, TatD family [Pseudomonas KT2440] >gi|24982196|gb|AAN66416.1|AE016269_3 deoxyribonuclease,
MGAKYPSVVPCFGIHPWYVAERSPQWFETLKSFFETTPTAAVGEIGLDKGSKGREIDFSEQVTVFRQQLELAKELKKPASVHCVRAFGDLLEILKSVGPFPSGVMLHSYLGSAEMVPEFAKLGAYFSFSGFLMSMSEKKAKKMLKAVPSDRILLETDSPDALPKAESGCLYFVDGDPSLPEEGNSAQDLDSASYDKPNVSSDSMKLTKETLNHPANIHIVLGYVAQLLDMKNEELAELSYQNAVRLFSYEGSKILLDRGTGDVSGHTQNQSTTHVS

SEQ ID NO: 104242 - protein, 172 aa, Arabidopsis thaliana; identical to SEQ ID NO: 27558
  peptide (1)..(172): Ceres Seq. ID no. 13614619
  misc_feature (1)..(145): Pfam Name: TatD related DNase Pfam Description: TatD related DNase
  misc_feature (1)..(172): Homolog of NCBI NO: 18418353 NR Description: expressed protein [Arabidopsis thaliana]
  misc_feature (1)..(172): Homolog of NCBI NO: 11357936 NR Description: hypothetical protein K10A8_50 - Arabidopsis >gi|9755782|emb|CAC01901.1| putative protein [Arabidopsis
  misc_feature (1)..(150): Homolog of NCBI NO: 38345538 NR Description: OSJNBa0020J04.13 [Oryza sativa (japonica
  misc_feature (1)..(86): Homolog of NCBI NO: 15228573 NR Description: hypothetical protein [Arabidopsis thaliana]
  misc_feature (1)..(85): Homolog of NCBI NO: 39998376 NR Description: hydrolase, TatD family [Geobacter sulfurreducens >gi|39985322|gb|AAR36677.1| hydrolase, TatD family [Geobacter
  misc_feature (1)..(60): Homolog of NCBI NO: 15677535 NR Description: conserved hypothetical protein [Neisseria
  misc_feature (1)..(60): Homolog of NCBI NO: 15794829 NR Description: conserved hypothetical protein [Neisseria Z2491] >gi|11352977|pir||H81822 conserved hypothetical protein
  misc_feature (1)..(56): Homolog of NCBI NO: 23028677 NR Description: hypothetical protein [Microbulbifer degradans
  misc_feature (1)..(64): Homolog of NCBI NO: 23055931 NR Description: hypothetical protein [Geobacter metallireducens]
  misc_feature (1)..(77): Homolog of NCBI NO: 26987527 NR Description: deoxyribonuclease, TatD family [Pseudomonas KT2440] >gi|24982196|gb|AAN66416.1|AE016269_3 deoxyribonuclease,

SEQ ID NO: 104243 - DNA, 1394 bp, Arabidopsis thaliana
  misc_feature (1)..(1394): Ceres Seq. ID no. 13614628
  misc_feature: MA Experiment ID: 108462 Result: Up-regulated in Transcription
  misc_feature: MA Experiment 108462 PARAMETER Experiment Name: At_Germinating_Seeds_cDNA_P Parameter: Age (day) Value: 2 vs. 0
  misc_feature: MA Experiment 108462 PARAMETER Experiment Name: At_Germinating_Seeds_cDNA_P Parameter: Tissue Value: Germinating Seeds
  misc_feature: MA Experiment ID: 108464 Result: Up-regulated in Transcription
  misc_feature: MA Experiment 108464 PARAMETER Experiment Name: At_Germinating_Seeds_cDNA_P Parameter: Age (day) Value: 4 vs. 0
  misc_feature: MA Experiment 108464 PARAMETER Experiment Name: At_Germinating_Seeds_cDNA_P Parameter: Tissue Value: Germinating Seeds
  misc_feature: MA Experiment ID: 108573 Result: Up-regulated in Transcription
  misc_feature: MA Experiment 108573 PARAMETER Experiment Name: At_Drought_cDNA_P Parameter: Timepoint (hr) Value: 6
  misc_feature: MA Experiment 108573 PARAMETER Experiment Name: At_Drought_cDNA_P Parameter: Tissue Value: Aerial
  misc_feature: MA Experiment 108573 PARAMETER Experiment Name: At_Drought_cDNA_P Parameter: Treatment Value: Drought vs. No Drought
  misc_feature: MA Experiment ID: 108585 Result: Up-regulated in Transcription
  misc_feature: MA Experiment 108585 PARAMETER Experiment Name: At_5mM_NaNP_cDNA_P Parameter: Timepoint (hr) Value: 6
  misc_feature: MA Experiment 108585 PARAMETER Experiment Name: At_5mM_NaNP_cDNA_P Parameter: Tissue Value: Aerial
  misc_feature: MA Experiment 108585 PARAMETER Experiment Name: At_5mM_NaNP_cDNA_P Parameter: Treatment Value: null
  misc_feature: MA Experiment ID: 20000180 Result: Up-regulated in Transcription
  misc_feature: MA Experiment 20000180 PARAMETER Experiment Name: At_Germinating_Seeds_P Parameter: Age (hr) Value: 24 vs. 0
  misc_feature: MA Experiment 20000180 PARAMETER Experiment Name: At_Germinating_Seeds_P Parameter: Tissue Value: Germinating Seeds
  misc_feature: MA Experiment ID: 20000224 Result: Down-regulated in Transcription
aaaaactttttcatggatctgagattttctccaaatctatatttgtgattgtttcgtgtagtttttctcttaaagttgtgttctttaagctctctcgtgctcaatcttacgtttccctttggtttgatttcgtgtttttgttattcgatttcacctttaacttttatctaatctcttgtttttgattttgtaaattgtaaaaagtttctggtgattctcttagcgaatttgggaaactttatctgtatttttctgtttcgccgtagatttaggatccttaattaatgaatttgtgggtttcaatattcctcgtctctgcaatagctggatcatgcttaccttctgggtttgcttacgttgacgtttgcaatcacgaattcgaggtgttccgatccgtgatcgagcaaaaatgtcctcgttctttgtatccaagccctcctatcgaggtagatggagacttgctagacaaactcatggatgcaaaccatggaaatgcctatatatccatactattttatacctcacggtgcccgttttcacgtgcagtacgcccaaagtttgatgttctgagttcaatgtttcctcacataacgcacctgattgttgagcaatctcaggctttaccatctgtgttttctaggtatggtatccatagcttgccttcaatcctgatggtgaatcaaacaatgaagatgcgataccatggtccaaaggatcttgcatccctgattcagttttacaaggaaacaacaggtcttaaacctgtccagtatatggatgaaggtgaaccaacaagcttggacactgatggaaacctgatcacatggctacacaacgggtcatctatcagagaaatagcagaaagagagccatatatggtacttgcactaatgtttctgtctttgaaactggcaattttgatcttccccatcatgggatcacggttgaaaacgttatgggcattgtatgttccgcatctgagcttgggaatacttggtgagactagccaactgtttggccgtgccctacacatgatcgatgtgaggagactatggataaaactgagactcaccaaaacaaggaacttccaagaaagagcaaagaacgcacttgcatcagtctcactaggaaaatcttcatcacaatcagcctaaaagggtgatttagaaatccttcactgtcaatgagcttagtttagattactttactttactgtctgtgagagatcctttgactgacatgtttctatacctttggagttccactgtctctgtatgtaaatcctgttttgcttcttttgtgaatattttttcttcttcttttgaatattcatgttcttggtccacttcgttgtgcttacgttttgtctatattgattatggatggtttggttt

SEQ ID NO: 104244 - protein, 289 aa, Arabidopsis thaliana; identical to SEQ ID NO: 39290
  peptide (1)..(289): Ceres Seq. ID no. 13614629
  misc_feature (1)..(289): Homolog of NCBI NO: 18418521 NR Description: expressed protein [Arabidopsis thaliana] unknown protein [Arabidopsis thaliana]
  misc_feature (1)..(289): Homolog of NCBI NO: 21536613 NR Description: contains similarity to protein disulfide
  misc_feature (1)..(289): Homolog of NCBI NO: 9758894 NR Description: contains similarity to protein disulfide
  misc_feature (1)..(289): Homolog of NCBI NO: 18396691 NR Description: expressed protein [Arabidopsis thaliana] unknown protein [Arabidopsis thaliana]
  misc_feature (1)..(156): Homolog of NCBI NO: 6006856 NR Description: unknown protein [Arabidopsis thaliana]
  misc_feature (157)..(289): Homolog of NCBI NO: 6006856 NR Description: unknown protein [Arabidopsis thaliana]
  misc_feature (6)..(286): Homolog of NCBI NO: 30103009 NR Description: unknown protein [Oryza sativa (japonica
  misc_feature (49)..(286): Homolog of NCBI NO: 29367467 NR Description: disulfide isomerase-like protein [Oryza sativa
  misc_feature (54)..(288): Homolog of NCBI NO: 18399435 NR Description: expressed protein [Arabidopsis thaliana]
  misc_feature (53)..(158): Homolog of NCBI NO: 15236643 NR Description: protein disulfide isomerase -related [Arabidopsis

SEQ ID NO: 104245 - protein, 226 aa, Arabidopsis thaliana; identical to SEQ ID NO: 39291
  peptide (1)..(226): Ceres Seq. ID no. 13614630
  misc_feature (1)..(226): Homolog of NCBI NO: 18418521 NR Description: expressed protein [Arabidopsis thaliana] unknown protein [Arabidopsis thaliana]
  misc_feature (1)..(226): Homolog of NCBI NO: 21536613 NR Description: contains similarity to protein disulfide
  misc_feature (1)..(226): Homolog of NCBI NO: 9758894 NR Description: contains similarity to protein disulfide
  misc_feature (1)..(226): Homolog of NCBI NO: 18396691 NR Description: expressed protein [Arabidopsis thaliana] unknown protein [Arabidopsis thaliana]
  misc_feature (1)..(93): Homolog of NCBI NO: 6006856 NR Description: unknown protein [Arabidopsis thaliana]
  misc_feature (94)..(226): Homolog of NCBI NO: 6006856 NR Description: unknown protein [Arabidopsis thaliana]
  misc_feature (1)..(223): Homolog of NCBI NO: 30103009 NR Description: unknown protein [Oryza sativa (japonica
  misc_feature (1)..(223): Homolog of NCBI NO: 29367467 NR Description: disulfide isomerase-like protein [Oryza sativa
  misc_feature (1)..(225): Homolog of NCBI NO: 18399435 NR Description: expressed protein [Arabidopsis thaliana]
  misc_feature (1)..(95): Homolog of NCBI NO: 15236643 NR Description: protein disulfide isomerase -related [Arabidopsis

SEQ ID NO: 104246 - protein, 192 aa, Arabidopsis thaliana; identical to SEQ ID NO: 39292
  peptide (1)..(192): Ceres Seq. ID no. 13614631
  misc_feature (1)..(192): Homolog of NCBI NO: 18418521 NR Description: expressed protein [Arabidopsis thaliana] unknown protein [Arabidopsis thaliana]
  misc_feature (1)..(192): Homolog of NCBI NO: 21536613 NR Description: contains similarity to protein disulfide
  misc_feature (1)..(192): Homolog of NCBI NO: 9758894 NR Description: contains similarity to protein disulfide
  misc_feature (1)..(192): Homolog of NCBI NO: 18396691 NR Description: expressed protein [Arabidopsis thaliana] unknown protein [Arabidopsis thaliana]
  misc_feature (1)..(59): Homolog of NCBI NO: 6006856 NR Description: unknown protein [Arabidopsis thaliana]
  misc_feature (60)..(192): Homolog of NCBI NO: 6006856 NR Description: unknown protein [Arabidopsis thaliana]
  misc_feature (1)..(189): Homolog of NCBI NO: 30103009 NR Description: unknown protein [Oryza sativa (japonica
  misc_feature (1)..(189): Homolog of NCBI NO: 29367467 NR Description: disulfide isomerase-like protein [Oryza sativa
  misc_feature (1)..(191): Homolog of NCBI NO: 18399435 NR Description: expressed protein [Arabidopsis thaliana]
  misc_feature (1)..(61): Homolog of NCBI NO: 15236643 NR Description: protein disulfide isomerase -related [Arabidopsis

SEQ ID NO: 104247 - DNA, 1430 bp, Arabidopsis thaliana
  misc_feature (1)..(1430): Ceres Seq. ID no. 13614640
  misc_feature: MA Experiment ID: 20000169 Result: Up-regulated in Transcription
  misc_feature: MA Experiment 20000169 PARAMETER Experiment Name: At_100uM_ABA_P Parameter: Age (day) Value: 14
  misc_feature: MA Experiment 20000169 PARAMETER Experiment Name: At_100uM_ABA_P Parameter: Organism Value: A. thaliana
  misc_feature: MA Experiment 20000169 PARAMETER Experiment Name: At_100uM_ABA_P Parameter: Plant Line Value: WS
  misc_feature: MA Experiment 20000169 PARAMETER Experiment Name: At_100uM_ABA_P Parameter: Timepoint (hr) Value: 6
  misc_feature: MA Experiment 20000169 PARAMETER Experiment Name: At_100uM_ABA_P Parameter: Tissue Value: Aerial
  misc_feature: MA Experiment 20000169 PARAMETER Experiment Name: At_100uM_ABA_P Parameter: Treatment Value: 100uM ABA vs. No Treatment
  misc_feature: MA Experiment ID: 20000173 Result: Down-regulated in Transcription
  misc_feature: MA Experiment 20000173 PARAMETER Experiment Name: At_42deg_Heat_P Parameter: Age (day) Value: 14
  misc_feature: MA Experiment 20000173 PARAMETER Experiment Name: At_42deg_Heat_P Parameter: Organism Value: A. thaliana
  misc_feature: MA Experiment 20000173 PARAMETER Experiment Name: At_42deg_Heat_P Parameter: Plant Line Value: WS
  misc_feature: MA Experiment 20000173 PARAMETER Experiment Name: At_42deg_Heat_P Parameter: Temperature (deg C) Value: 42 vs. 22
  misc_feature: MA Experiment 20000173 PARAMETER Experiment Name: At_42deg_Heat_P Parameter: Timepoint (hr) Value: 6
  misc_feature: MA Experiment 20000173 PARAMETER Experiment Name: At_42deg_Heat_P Parameter: Tissue Value: Aerial
  misc_feature: MA Experiment ID: 20000184 Result: Down-regulated in Transcription
  misc_feature: MA Experiment 20000184 PARAMETER Experiment Name: At_Shoots__P Parameter: Age (day) Value: 7
  misc_feature: MA Experiment 20000184 PARAMETER Experiment Name: At_Shoots__P Parameter: Tissue Value: Shoots vs. Whole Plant
  misc_feature: MA Experiment ID: 20000185 Result: Down-regulated in Transcription
  misc_feature: MA Experiment 20000185 PARAMETER Experiment Name: At_Roots__P Parameter: Age (day) Value: 7 vs. 21
  misc_feature: MA Experiment 20000185 PARAMETER Experiment Name: At_Roots__P Parameter: Organism Value: A. thaliana
  misc_feature: MA Experiment 20000185 PARAMETER Experiment Name: At_Roots__P Parameter: Tissue Value: Roots vs. Whole Plant
  misc_feature: MA Experiment ID: 20000234 Result: Down-regulated in Transcription
  misc_feature: MA Experiment 20000234 PARAMETER Experiment Name: At_Siliques_P Parameter: Age (day) Value: 21
  misc_feature: MA Experiment 20000234 PARAMETER Experiment Name: At_Siliques_P Parameter: Organism Value: A. thaliana
  misc_feature: MA Experiment 20000234 PARAMETER Experiment Name: At_Siliques_P Parameter: Plant Line Value: WS
  misc_feature: MA Experiment 20000234 PARAMETER Experiment Name: At_Siliques_P Parameter: Tissue Value: Less Than 5mm Siliques vs. Whole Plant
  misc_feature: MA Experiment ID: 20000265 Result: Down-regulated in Transcription
  misc_feature: MA Experiment 20000265 PARAMETER Experiment Name: At_Open_Flower_P Parameter: Age (day) Value: 21
  misc_feature: MA Experiment 20000265 PARAMETER Experiment Name: At_Open_Flower_P Parameter: Plant Line Value: WS
  misc_feature: MA Experiment 20000265 PARAMETER Experiment Name: At_Open_Flower_P Parameter: Tissue Value: Closed Flower vs. Whole Plant
  misc_feature: MA Experiment ID: 20000286 Result: Down-regulated in Transcription
  misc_feature: MA Experiment 20000286 PARAMETER Experiment Name: At_Open_Flower_P Parameter: Age (day) Value: 21
  misc_feature: MA Experiment 20000286 PARAMETER Experiment Name: At_Open_Flower_P Parameter: Plant Line Value: WS
  misc_feature: MA Experiment 20000286 PARAMETER Experiment Name: At_Open_Flower_P Parameter: Tissue Value: Half Open vs. Whole Plant
  misc_feature: MA Experiment ID: 20000436 Result: Up-regulated in Transcription
  misc_feature: MA Experiment 20000436 PARAMETER Experiment Name: At_Drought_P Parameter: Age (day) Value: 7
  misc_feature: MA Experiment 20000436 PARAMETER Experiment Name: At_Drought_P Parameter: Organism Value: A. thaliana
  misc_feature: MA Experiment 20000436 PARAMETER Experiment Name: At_Drought_P Parameter: Plant Line Value: WS
  misc_feature: MA Experiment 20000436 PARAMETER Experiment Name: At_Drought_P Parameter: Timepoint (hr) Value: 12
  misc_feature: MA Experiment 20000436 PARAMETER Experiment Name: At_Drought_P Parameter: Tissue Value: Whole Plant
  misc_feature: MA Experiment 20000436 PARAMETER Experiment Name: At_Drought_P Parameter: Treatment Value: Drought vs. No Drought
  misc_feature: MA Experiment ID: 20000437 Result: Up-regulated in Transcription
  misc_feature: MA Experiment 20000437 PARAMETER Experiment Name: At_Drought_P Parameter: Age (day) Value: 8
  misc_feature: MA Experiment 20000437 PARAMETER Experiment Name: At_Drought_P Parameter: Organism Value: A. thaliana
  misc_feature: MA Experiment 20000437 PARAMETER Experiment Name: At_Drought_P Parameter: Plant Line Value: WS
  misc_feature: MA Experiment 20000437 PARAMETER Experiment Name: At_Drought_P Parameter: Timepoint (hr) Value: 24
  misc_feature: MA Experiment 20000437 PARAMETER Experiment Name: At_Drought_P Parameter: Tissue Value: Whole Plant
  misc_feature: MA Experiment 20000437 PARAMETER Experiment Name: At_Drought_P Parameter: Treatment Value: Drought vs. No Drought
  misc_feature: MA Experiment ID: 20000438 Result: Down-regulated in Transcription
  misc_feature: MA Experiment 20000438 PARAMETER Experiment Name: At_Shoots__P Parameter: Age (day) Value: 14
  misc_feature: MA Experiment 20000438 PARAMETER Experiment Name: At_Shoots__P Parameter: Tissue Value: Shoots vs. Whole Plant
  misc_feature: MA Experiment ID: 20000439 Result: Down-regulated in Transcription
  misc_feature: MA Experiment 20000439 PARAMETER Experiment Name: At_Roots__P Parameter: Age (day) Value: 14 vs. 21
  misc_feature: MA Experiment 20000439 PARAMETER Experiment Name: At_Roots__P Parameter: Organism Value: A. thaliana
  misc_feature: MA Experiment 20000439 PARAMETER Experiment Name: At_Roots__P Parameter: Tissue Value: Roots vs. Whole Plant
  misc_feature: MA Experiment ID: 20000453 Result: Up-regulated in Transcription
  misc_feature: MA Experiment 20000453 PARAMETER Experiment Name: At_100uM_ABA_P Parameter: Age (day) Value: 15
  misc_feature: MA Experiment 20000453 PARAMETER Experiment Name: At_100uM_ABA_P Parameter: Organism Value: A. thaliana
  misc_feature: MA Experiment 20000453 PARAMETER Experiment Name: At_100uM_ABA_P Parameter: Plant Line Value: WS
  misc_feature: MA Experiment 20000453 PARAMETER Experiment Name: At_100uM_ABA_P Parameter: Timepoint (hr) Value: 24
  misc_feature: MA Experiment 20000453 PARAMETER Experiment Name: At_100uM_ABA_P Parameter: Tissue Value: Aerial
  misc_feature: MA Experiment 20000453 PARAMETER Experiment Name: At_100uM_ABA_P Parameter: Treatment Value: 100uM ABA vs. No Treatment
  misc_feature: MA Experiment ID: 20000455 Result: Up-regulated in Transcription
  misc_feature: MA Experiment 20000455 PARAMETER Experiment Name: At_100uM_ABA_P Parameter: Age (day) Value: 16
  misc_feature: MA Experiment 20000455 PARAMETER Experiment Name: At_100uM_ABA_P Parameter: Organism Value: A. thaliana
  misc_feature: MA Experiment 20000455 PARAMETER Experiment Name: At_100uM_ABA_P Parameter: Plant Line Value: WS
  misc_feature: MA Experiment 20000455 PARAMETER Experiment Name: At_100uM_ABA_P Parameter: Timepoint (hr) Value: 48
  misc_feature: MA Experiment 20000455 PARAMETER Experiment Name: At_100uM_ABA_P Parameter: Tissue Value: Aerial
  misc_feature: MA Experiment 20000455 PARAMETER Experiment Name: At_100uM_ABA_P Parameter: Treatment Value: 100uM ABA vs. No Treatment
  misc_feature: MA Experiment ID: 20000574 Result: Up-regulated in Transcription
  misc_feature: MA Experiment 20000574 PARAMETER Experiment Name: At_100uM_ABA_Mutants__P Parameter: Organism Value: A. thaliana
  misc_feature: MA Experiment 20000574 PARAMETER Experiment Name: At_100uM_ABA_Mutants__P Parameter: Plant Line Value: CS23 vs. Ler wt
  misc_feature: MA Experiment 20000574 PARAMETER Experiment Name: At_100uM_ABA_Mutants__P Parameter: Timepoint (hr) Value: N/A
  misc_feature: MA Experiment 20000574 PARAMETER Experiment Name: At_100uM_ABA_Mutants__P Parameter: Tissue Value: Whole Plant
  misc_feature: MA Experiment 20000574 PARAMETER Experiment Name: At_100uM_ABA_Mutants__P Parameter: Treatment Value: None
  misc_feature: MA Experiment ID: 20000794 Result: Up-regulated in Transcription
  misc_feature: MA Experiment 20000794 PARAMETER Experiment Name: At_Petals_P Parameter: Age (day) Value: 23-25 days
  misc_feature: MA Experiment 20000794 PARAMETER Experiment Name: At_Petals_P Parameter: Plant Line Value: WS
  misc_feature: MA Experiment 20000794 PARAMETER Experiment Name: At_Petals_P Parameter: Tissue Value: Petals vs. Whole plant
  misc_feature: MA Experiment ID: 20001554 Result: Up-regulated in Transcription
  misc_feature: MA Experiment 20001554 PARAMETER Experiment Name: At_Drought_Soil_Dry_P Parameter: Age (day) Value: 21
  misc_feature: MA Experiment 20001554 PARAMETER Experiment Name: At_Drought_Soil_Dry_P Parameter: Organism Value: A. thaliana
  misc_feature: MA Experiment 20001554 PARAMETER Experiment Name: At_Drought_Soil_Dry_P Parameter: Plant Line Value: WS
  misc_feature: MA Experiment 20001554 PARAMETER Experiment Name: At_Drought_Soil_Dry_P Parameter: Post Timepoint (hr) Value: None
  misc_feature: MA Experiment 20001554 PARAMETER Experiment Name: At_Drought_Soil_Dry_P Parameter: Post-Treatment Value: None
  misc_feature: MA Experiment 20001554 PARAMETER Experiment Name: At_Drought_Soil_Dry_P Parameter: Timepoint (day) Value: 7
  misc_feature: MA Experiment 20001554 PARAMETER Experiment Name: At_Drought_Soil_Dry_P Parameter: Treatment Value: Drought vs. No Drought
  misc_feature: MA Experiment ID: 20001555 Result: Up-regulated in Transcription
  misc_feature: MA Experiment 20001555 PARAMETER Experiment Name: At_Drought_Soil_Dry_P Parameter: Age (day) Value: 24
  misc_feature: MA Experiment 20001555 PARAMETER Experiment Name: At_Drought_Soil_Dry_P Parameter: Organism Value: A. thaliana
  misc_feature: MA Experiment 20001555 PARAMETER Experiment Name: At_Drought_Soil_Dry_P Parameter: Plant Line Value: WS
  misc_feature: MA Experiment 20001555 PARAMETER Experiment Name: At_Drought_Soil_Dry_P Parameter: Post Timepoint (hr) Value: None
  misc_feature: MA Experiment 20001555 PARAMETER Experiment Name: At_Drought_Soil_Dry_P Parameter: Post-Treatment Value: None
  misc_feature: MA Experiment 20001555 PARAMETER Experiment Name: At_Drought_Soil_Dry_P Parameter: Timepoint (day) Value: 10
  misc_feature: MA Experiment 20001555 PARAMETER Experiment Name: At_Drought_Soil_Dry_P Parameter: Treatment Value: Drought vs. No Drought
  misc_feature: MA Experiment ID: 20001556 Result: Up-regulated in Transcription
  misc_feature: MA Experiment 20001556 PARAMETER Experiment Name: At_Drought_Soil_Dry_P Parameter: Age (day) Value: 26
  misc_feature: MA Experiment 20001556 PARAMETER Experiment Name: At_Drought_Soil_Dry_P Parameter: Organism Value: A. thaliana
  misc_feature: MA Experiment 20001556 PARAMETER Experiment Name: At_Drought_Soil_Dry_P Parameter: Plant Line Value: WS
  misc_feature: MA Experiment 20001556 PARAMETER Experiment Name: At_Drought_Soil_Dry_P Parameter: Post Timepoint (hr) Value: None
  misc_feature: MA Experiment 20001556 PARAMETER Experiment Name: At_Drought_Soil_Dry_P Parameter: Post-Treatment Value: None
  misc_feature: MA Experiment 20001556 PARAMETER Experiment Name: At_Drought_Soil_Dry_P Parameter: Timepoint (day) Value: 12
  misc_feature: MA Experiment 20001556 PARAMETER Experiment Name: At_Drought_Soil_Dry_P Parameter: Treatment Value: Drought vs. No Drought
  misc_feature: MA Experiment ID: 20001559 Result: Up-regulated in Transcription
  misc_feature: MA Experiment 20001559 PARAMETER Experiment Name: At_Drought_Soil_Dry_P Parameter: Age (day) Value: 28
  misc_feature: MA Experiment 20001559 PARAMETER Experiment Name: At_Drought_Soil_Dry_P Parameter: Organism Value: A. thaliana
  misc_feature: MA Experiment 20001559 PARAMETER Experiment Name: At_Drought_Soil_Dry_P Parameter: Plant Line Value: WS
  misc_feature: MA Experiment 20001559 PARAMETER Experiment Name: At_Drought_Soil_Dry_P Parameter: Post Timepoint (hr) Value: 29
  misc_feature: MA Experiment 20001559 PARAMETER Experiment Name: At_Drought_Soil_Dry_P Parameter: Post-Treatment Value: Re-Water vs. No Drought
  misc_feature: MA Experiment 20001559 PARAMETER Experiment Name: At_Drought_Soil_Dry_P Parameter: Timepoint (day) Value: 14
  misc_feature: MA Experiment 20001559 PARAMETER Experiment Name: At_Drought_Soil_Dry_P Parameter: Treatment Value: Drought vs. No Drought
  misc_feature: MA Experiment ID: 20001560 Result: Down-regulated in Transcription
  misc_feature: MA Experiment 20001560 PARAMETER Experiment Name: At_Drought_Soil_Dry_P Parameter: Age (day) Value: 28
  misc_feature: MA Experiment 20001560 PARAMETER Experiment Name: At_Drought_Soil_Dry_P Parameter: Organism Value: A. thaliana
  misc_feature: MA Experiment 20001560 PARAMETER Experiment Name: At_Drought_Soil_Dry_P Parameter: Plant Line Value: WS
  misc_feature: MA Experiment 20001560 PARAMETER Experiment Name: At_Drought_Soil_Dry_P Parameter: Post Timepoint (hr) Value: None
  misc_feature: MA Experiment 20001560 PARAMETER Experiment Name: At_Drought_Soil_Dry_P Parameter: Post-Treatment Value: None
  misc_feature: MA Experiment 20001560 PARAMETER Experiment Name: At_Drought_Soil_Dry_P Parameter: Timepoint (day) Value: 14
  misc_feature: MA Experiment 20001560 PARAMETER Experiment Name: At_Drought_Soil_Dry_P Parameter: Treatment Value: Drought vs. No Drought
  misc_feature: MA Experiment ID: 20001757 Result: Down-regulated in Transcription
  misc_feature: MA Experiment 20001757 PARAMETER Experiment Name: At_50mM_NH4NO3_L-to-H_P Parameter: Timepoint (hr) Value: 6
  misc_feature: MA Experiment 20001757 PARAMETER Experiment Name: At_50mM_NH4NO3_L-to-H_P Parameter: Tissue Value: Leaf
  misc_feature: MA Experiment 20001757 PARAMETER Experiment Name: At_50mM_NH4NO3_L-to-H_P Parameter: Treatment Value: 50mM NH4NO3 vs 100mM Mannitol
  misc_feature: MA Experiment ID: 20001904 Result: Up-regulated in Transcription
  misc_feature: MA Experiment 20001904 PARAMETER Experiment Name: At_Drought_Reproduction_P Parameter: Age (day) Value: 37
  misc_feature: MA Experiment 20001904 PARAMETER Experiment Name: At_Drought_Reproduction_P Parameter: Organism Value: A. thaliana
  misc_feature: MA Experiment 20001904 PARAMETER Experiment Name: At_Drought_Reproduction_P Parameter: Plant Line Value: WS
  misc_feature: MA Experiment 20001904 PARAMETER Experiment Name: At_Drought_Reproduction_P Parameter: Timepoint (day) Value: 7
  misc_feature: MA Experiment 20001904 PARAMETER Experiment Name: At_Drought_Reproduction_P Parameter: Tissue Value: Rosettes
  misc_feature: MA Experiment 20001904 PARAMETER Experiment Name: At_Drought_Reproduction_P Parameter: Treatment Value: Drought vs. No Drought
aaaccattcacaatcagacaatgacatctctccatacgttactcttctcttctcttcttttcttcatcgtctttccaaccttcacgttttcctccaccttattgtttcagagtttcaattgggagtcatggaagaaagaaggaggattctacaattctctccacaactccattgacgacatagccaacgctggaatcactcatctttggcttcctcctccttctcaatccgttgctcctgaaggttacttaccgggaaagctatacgatctaaacagctccaaatacggttcagaggcggaactgaaatcgttaatcaaagcgttgaatcaaaaaggaataaaagctttggctgatatagtgattaaccacagaacagctgagaggaaagacgataaatgtggatactgttatttcgaaggtgggacttccgatgatcgtcttgattgggatccttcctttgtctgccgcaatgaccctaaatttcccggtaccggaaacctcgacaccggaggagattttgatggagcgcccgacatcgaccaccttaaccctagagttcagaaagagttgtccgaatggatgaattggcttaaaactgaaatcggattccatggttggagatttgattatgttcgaggttatgcatcttccatcaccaaattatacgttcagaatacatcaccggattttgcggtgggtgagaaatgggacgatatgaagtacggaggagacgggaaactagactatgatcagaacgagcatcggtcgggtctcaaacagtggatcgaggaagcgggtggtggtgtgttgacagcttttgatttcaccaccaaagggatcttacagtctgctgtcaaaggtgagctttggagactaaaggactcgcagggaaaaccgcctggtatgataggaatcatgcccggaaacgctgtcacattcatagataaccatgatacattcagaacgtgggttttcccttctgataaagtcttgcttggatacgtttatatacttactcatccaggaactccttgcattttttataatcattacatagaatggggactaaaagagagcatctcaaagctggtggctatcaggaacaaaaatgggattggtagcacaagctctgtaacgataaaagcggcagaggcggatctctacttggctatgattgatgataaagttatcatgaagattggaccaaagcaagatgtgggaacacttgttccttctaattttgctttagcttattcaggccttgactttgctgtctgggagaagaagtaacgcataactcgaatcataagaaaagtaatcgaatgtatcttcttcctttttaataaaacattttggcagtatctaaagatatgtataatgaaatataaaatgataaagaatacctaaataaaaagagcactagtggtg

SEQ ID NO: 104248 - protein, 429 aa, Arabidopsis thaliana; identical to SEQ ID NO: 26568
  peptide (1)..(429): Ceres Seq. ID no. 13614641
  misc_feature (7)..(429): Homolog of NCBI NO: 18416465 NR Description: alpha-amylase (1,4-alpha-D-glucan
  misc_feature (7)..(429): Homolog of NCBI NO: 21592633 NR Description: alpha-amylase-like protein [Arabidopsis thaliana]
  misc_feature (7)..(429): Homolog of NCBI NO: 7435330 NR Description: alpha-amylase (EC 3.2.1.1) - Arabidopsis thaliana
  misc_feature (14)..(429): Homolog of NCBI NO: 21670851 NR Description: alpha-amylase [Ipomoea nil]
  misc_feature (19)..(427): Homolog of NCBI NO: 228404 NR Description: alpha amylase
  misc_feature (19)..(427): Homolog of NCBI NO: 113781 NR Description: ALPHA-AMYLASE PRECURSOR (1,4-ALPHA-D-GLUCAN
  misc_feature (19)..(427): Homolog of NCBI NO: 30962522 NR Description: alpha-amylase [Vigna angularis]
  misc_feature (15)..(427): Homolog of NCBI NO: 3769330 NR Description: alpha-amylase [Phaseolus vulgaris]
  misc_feature (18)..(429): Homolog of NCBI NO: 7435331 NR Description: alpha-amylase (EC 3.2.1.1) precursor - southern dodder (fragment) >gi|458456|gb|AAA16513.1| alpha amylase
  misc_feature (17)..(428): Homolog of NCBI NO: 166985 NR Description: alpha-amylase

SEQ ID NO: 104249 - protein, 423 aa, Arabidopsis thaliana; identical to SEQ ID NO: 26569
  peptide (1)..(423): Ceres Seq. ID no. 13614642
  misc_feature (1)..(423): Homolog of NCBI NO: 18416465 NR Description: alpha-amylase (1,4-alpha-D-glucan
  misc_feature (1)..(423): Homolog of NCBI NO: 21592633 NR Description: alpha-amylase-like protein [Arabidopsis thaliana]
  misc_feature (1)..(423): Homolog of NCBI NO: 7435330 NR Description: alpha-amylase (EC 3.2.1.1) - Arabidopsis thaliana
  misc_feature (8)..(423): Homolog of NCBI NO: 21670851 NR Description: alpha-amylase [Ipomoea nil]
  misc_feature (13)..(421): Homolog of NCBI NO: 228404 NR Description: alpha amylase
  misc_feature (13)..(421): Homolog of NCBI NO: 113781 NR Description: ALPHA-AMYLASE PRECURSOR (1,4-ALPHA-D-GLUCAN
  misc_feature (13)..(421): Homolog of NCBI NO: 30962522 NR Description: alpha-amylase [Vigna angularis]
  misc_feature (9)..(421): Homolog of NCBI NO: 3769330 NR Description: alpha-amylase [Phaseolus vulgaris]
  misc_feature (12)..(423): Homolog of NCBI NO: 7435331 NR Description: alpha-amylase (EC 3.2.1.1) precursor - southern dodder (fragment) >gi|458456|gb|AAA16513.1| alpha amylase
  misc_feature (11)..(422): Homolog of NCBI NO: 166985 NR Description: alpha-amylase

SEQ ID NO: 104250 - protein, 236 aa, Arabidopsis thaliana; identical to SEQ ID NO: 26570
  peptide (1)..(236): Ceres Seq. ID no. 13614643
  misc_feature (1)..(236): Homolog of NCBI NO: 18416465 NR Description: alpha-amylase (1,4-alpha-D-glucan
  misc_feature (1)..(236): Homolog of NCBI NO: 21592633 NR Description: alpha-amylase-like protein [Arabidopsis thaliana]
  misc_feature (1)..(236): Homolog of NCBI NO: 7435330 NR Description: alpha-amylase (EC 3.2.1.1) - Arabidopsis thaliana
  misc_feature (1)..(236): Homolog of NCBI NO: 21670851 NR Description: alpha-amylase [Ipomoea nil]
  misc_feature (1)..(234): Homolog of NCBI NO: 228404 NR Description: alpha amylase
  misc_feature (1)..(234): Homolog of NCBI NO: 113781 NR Description: ALPHA-AMYLASE PRECURSOR (1,4-ALPHA-D-GLUCAN
  misc_feature (1)..(234): Homolog of NCBI NO: 30962522 NR Description: alpha-amylase [Vigna angularis]
  misc_feature (1)..(234): Homolog of NCBI NO: 3769330 NR Description: alpha-amylase [Phaseolus vulgaris]
  misc_feature (1)..(236): Homolog of NCBI NO: 7435331 NR Description: alpha-amylase (EC 3.2.1.1) precursor - southern dodder (fragment) >gi|458456|gb|AAA16513.1| alpha amylase
  misc_feature (1)..(235): Homolog of NCBI NO: 166985 NR Description: alpha-amylase

SEQ ID NO: 104251 - DNA, 1161 bp, Arabidopsis thaliana
  misc_feature (1)..(1161): Ceres Seq. ID no. 13614644
  misc_feature: MA Experiment ID: 108434 Result: Down-regulated in Transcription
  misc_feature: MA Experiment 108434 PARAMETER Experiment Name: At_Root_Tips_cDNA_P Parameter: Tissue Value: Root Tips
  misc_feature: MA Experiment ID: 108463 Result: Up-regulated in Transcription
  misc_feature: MA Experiment 108463 PARAMETER Experiment Name: At_Germinating_Seeds_cDNA_P Parameter: Age (day) Value: 3 vs. 0
  misc_feature: MA Experiment 108463 PARAMETER Experiment Name: At_Germinating_Seeds_cDNA_P Parameter: Tissue Value: Germinating Seeds
  misc_feature: MA Experiment ID: 108464 Result: Up-regulated in Transcription
  misc_feature: MA Experiment 108464 PARAMETER Experiment Name: At_Germinating_Seeds_cDNA_P Parameter: Age (day) Value: 4 vs. 0
  misc_feature: MA Experiment 108464 PARAMETER Experiment Name: At_Germinating_Seeds_cDNA_P Parameter: Tissue Value: Germinating Seeds
  misc_feature: MA Experiment ID: 108473 Result: Up-regulated in Transcription
  misc_feature: MA Experiment 108473 PARAMETER Experiment Name: At_Drought_Flowers_cDNA_P Parameter: Timepoint (hr) Value: 7 d
  misc_feature: MA Experiment 108473 PARAMETER Experiment Name: At_Drought_Flowers_cDNA_P Parameter: Tissue Value: Flower
  misc_feature: MA Experiment 108473 PARAMETER Experiment Name: At_Drought_Flowers_cDNA_P Parameter: Treatment Value: Drought vs. No Drought
  misc_feature: MA Experiment ID: 108474 Result: Down-regulated in Transcription
  misc_feature: MA Experiment 108474 PARAMETER Experiment Name: At_Drought_Flowers_cDNA_P Parameter: Timepoint (hr) Value: null
  misc_feature: MA Experiment 108474 PARAMETER Experiment Name: At_Drought_Flowers_cDNA_P Parameter: Treatment Value: Drought vs. No Drought
  misc_feature: MA Experiment ID: 108594 Result: Down-regulated in Transcription
  misc_feature: MA Experiment 108594 PARAMETER Experiment Name: At_Ler-rhl_Root_cDNA_P Parameter: Plant Line Value: null
  misc_feature: MA Experiment ID: 20000264 Result: Up-regulated in Transcription
  misc_feature: MA Experiment 20000264 PARAMETER Experiment Name: At_Open_Flower_P Parameter: Age (day) Value: 21
  misc_feature: MA Experiment 20000264 PARAMETER Experiment Name: At_Open_Flower_P Parameter: Plant Line Value: WS
  misc_feature: MA Experiment 20000264 PARAMETER Experiment Name: At_Open_Flower_P Parameter: Tissue Value: Open Flower vs. Whole Plant
  misc_feature: MA Experiment ID: 20000265 Result: Up-regulated in Transcription
  misc_feature: MA Experiment 20000265 PARAMETER Experiment Name: At_Open_Flower_P Parameter: Age (day) Value: 21
  misc_feature: MA Experiment 20000265 PARAMETER Experiment Name: At_Open_Flower_P Parameter: Plant Line Value: WS
  misc_feature: MA Experiment 20000265 PARAMETER Experiment Name: At_Open_Flower_P Parameter: Tissue Value: Closed Flower vs. Whole Plant
  misc_feature: MA Experiment ID: 20000269 Result: Up-regulated in Transcription
  misc_feature: MA Experiment 20000269 PARAMETER Experiment Name: At_1mM_KNO3_L-vs-H_Roots_P Parameter: Age (day) Value: 7,10,12
  misc_feature: MA Experiment 20000269 PARAMETER Experiment Name: At_1mM_KNO3_L-vs-H_Roots_P Parameter: Organism Value: A. thaliana
  misc_feature: MA Experiment 20000269 PARAMETER Experiment Name: At_1mM_KNO3_L-vs-H_Roots_P Parameter: Plant Line Value: WS
  misc_feature: MA Experiment 20000269 PARAMETER Experiment Name: At_1mM_KNO3_L-vs-H_Roots_P Parameter: Timepoint (day) Value: 7,10,12
  misc_feature: MA Experiment 20000269 PARAMETER Experiment Name: At_1mM_KNO3_L-vs-H_Roots_P Parameter: Tissue Value: Roots
  misc_feature: MA Experiment 20000269 PARAMETER Experiment Name: At_1mM_KNO3_L-vs-H_Roots_P Parameter: Treatment Value: 1mM KNO3 vs. 50mM KNO3
  misc_feature: MA Experiment ID: 20000286 Result: Up-regulated in Transcription
  misc_feature: MA Experiment 20000286 PARAMETER Experiment Name: At_Open_Flower_P Parameter: Age (day) Value: 21
  misc_feature: MA Experiment 20000286 PARAMETER Experiment Name: At_Open_Flower_P Parameter: Plant Line Value: WS
  misc_feature: MA Experiment 20000286 PARAMETER Experiment Name: At_Open_Flower_P Parameter: Tissue Value: Half Open vs. Whole Plant
  misc_feature: MA Experiment ID: 20000436 Result: Up-regulated in Transcription
  misc_feature: MA Experiment 20000436 PARAMETER Experiment Name: At_Drought_P Parameter: Age (day) Value: 7
  misc_feature: MA Experiment 20000436 PARAMETER Experiment Name: At_Drought_P Parameter: Organism Value: A. thaliana
  misc_feature: MA Experiment 20000436 PARAMETER Experiment Name: At_Drought_P Parameter: Plant Line Value: WS
  misc_feature: MA Experiment 20000436 PARAMETER Experiment Name: At_Drought_P Parameter: Timepoint (hr) Value: 12
  misc_feature: MA Experiment 20000436 PARAMETER Experiment Name: At_Drought_P Parameter: Tissue Value: Whole Plant
  misc_feature: MA Experiment 20000436 PARAMETER Experiment Name: At_Drought_P Parameter: Treatment Value: Drought vs. No Drought
  misc_feature: MA Experiment ID: 20000437 Result: Up-regulated in Transcription
  misc_feature: MA Experiment 20000437 PARAMETER Experiment Name: At_Drought_P Parameter: Age (day) Value: 8
  misc_feature: MA Experiment 20000437 PARAMETER Experiment Name: At_Drought_P Parameter: Organism Value: A. thaliana
  misc_feature: MA Experiment 20000437 PARAMETER Experiment Name: At_Drought_P Parameter: Plant Line Value: WS
  misc_feature: MA Experiment 20000437 PARAMETER Experiment Name: At_Drought_P Parameter: Timepoint (hr) Value: 24
  misc_feature: MA Experiment 20000437 PARAMETER Experiment Name: At_Drought_P Parameter: Tissue Value: Whole Plant
  misc_feature: MA Experiment 20000437 PARAMETER Experiment Name: At_Drought_P Parameter: Treatment Value: Drought vs. No Drought
  misc_feature: MA Experiment ID: 20000794 Result: Up-regulated in Transcription
  misc_feature: MA Experiment 20000794 PARAMETER Experiment Name: At_Petals_P Parameter: Age (day) Value: 23-25 days
  misc_feature: MA Experiment 20000794 PARAMETER Experiment Name: At_Petals_P Parameter: Plant Line Value: WS
  misc_feature: MA Experiment 20000794 PARAMETER Experiment Name: At_Petals_P Parameter: Tissue Value: Petals vs. Whole plant
  misc_feature: MA Experiment ID: 20001773 Result: Up-regulated in Transcription
  misc_feature: MA Experiment 20001773 PARAMETER Experiment Name: At_Far-red-enriched-adult_P Parameter: Age (day) Value: 30
  misc_feature: MA Experiment 20001773 PARAMETER Experiment Name: At_Far-red-enriched-adult_P Parameter: Light Value: Far-red enriched vs. White
  misc_feature: MA Experiment 20001773 PARAMETER Experiment Name: At_Far-red-enriched-adult_P Parameter: Organism Value: A. thaliana
  misc_feature: MA Experiment 20001773 PARAMETER Experiment Name: At_Far-red-enriched-adult_P Parameter: Plant Line Value: Columbia
  misc_feature: MA Experiment 20001773 PARAMETER Experiment Name: At_Far-red-enriched-adult_P Parameter: Timepoint (hr) Value: 48
  misc_feature: MA Experiment 20001773 PARAMETER Experiment Name: At_Far-red-enriched-adult_P Parameter: Tissue Value: Aerial
  misc_feature: MA Experiment ID: 20001910 Result: Up-regulated in Transcription
  misc_feature: MA Experiment 20001910 PARAMETER Experiment Name: At_Drought_Reproduction_P Parameter: Age (day) Value: 37
  misc_feature: MA Experiment 20001910 PARAMETER Experiment Name: At_Drought_Reproduction_P Parameter: Organism Value: A. thaliana
  misc_feature: MA Experiment 20001910 PARAMETER Experiment Name: At_Drought_Reproduction_P Parameter: Plant Line Value: WS
  misc_feature: MA Experiment 20001910 PARAMETER Experiment Name: At_Drought_Reproduction_P Parameter: Timepoint (day) Value: 7
  misc_feature: MA Experiment 20001910 PARAMETER Experiment Name: At_Drought_Reproduction_P Parameter: Tissue Value: Flowers
  misc_feature: MA Experiment 20001910 PARAMETER Experiment Name: At_Drought_Reproduction_P Parameter: Treatment Value: Drought vs. No Drought
  misc_feature: MA Experiment ID: 20001911 Result: Up-regulated in Transcription
  misc_feature: MA Experiment 20001911 PARAMETER Experiment Name: At_Drought_Reproduction_P Parameter: Age (day) Value: 40
  misc_feature: MA Experiment 20001911 PARAMETER Experiment Name: At_Drought_Reproduction_P Parameter: Organism Value: A. thaliana
  misc_feature: MA Experiment 20001911 PARAMETER Experiment Name: At_Drought_Reproduction_P Parameter: Plant Line Value: WS
  misc_feature: MA Experiment 20001911 PARAMETER Experiment Name: At_Drought_Reproduction_P Parameter: Timepoint (day) Value: 10
  misc_feature: MA Experiment 20001911 PARAMETER Experiment Name: At_Drought_Reproduction_P Parameter: Tissue Value: Flowers
  misc_feature: MA Experiment 20001911 PARAMETER Experiment Name: At_Drought_Reproduction_P Parameter: Treatment Value: Drought vs. No Drought
attagttttctccgacactcccattcaaaagtagaaagatactgaagagctcgctcattcacaaaataaccaaaatggttctcactcacaacgtattggcagttacatttggagtcctgggtaacatcatatcgttcatcgttttcttggcaccagtgccaacttttgtaagaatctgcaagaaaaaatcgatagaaggttttgaatcacttccctacgtgtcagccctctttagcgcgatgctatggatttactatgctctgcaaaaagatggagcaggcttccttctcattaccataaacgctgtgggatgcttcatcgaaaccatctacatcatcctcttcatcacctatgctaacaagaaagctagaatatcaactttgaaggttcttgggctcttgaatttcttgggttttgctgctattattctcgtctgcgagctcctaaccaaaggatcgaaccgtgagaaagtccttggagggatttgcgtcggattttctgtttgtgttttcgcagctcctttgagcatcatgagagtggtgatacgaacaaagagtgtggagtttatgcctttctctctatcattgtttcttacaatcagcgccattacgtggctcttctacggtcttgctattaaagacttctacgttgcgcttccaaatatattgggtgcgtttctcggagcagtccaaatgattctatacgtcatattcaagtactacaaaactccactagtggttgatgagacagagaagcccaaaacggtgtcggatcattccatcaacatggtcaagctttcatctactccggcttctggtgatcttacggttcagccgcagactaatcctgacgtgagtcatcctattaaaactcatggtggtgacttagaggaccagatggacaagaaaatgccaaactaagtcaagatttagttttcaattatgaattagtgattgactttaatgttgaactgttgagtctggtttcctaatttgtcttttattttctcatcatcttctttcgaaatatctcgaaattgtactatccttcaaaaatttatgtgcgtcgtttagaattttgtaaaatagtttttgatgcctctgttctcagtaatacttaaaagtttattagtccggctaattaaaaaggaaatgaaaattc

SEQ ID NO: 104252 - protein, 281 aa, Arabidopsis thaliana
  peptide (1)..(281): Ceres Seq. ID no. 13614645
  misc_feature (10)..(98): Pfam Name: MtN3/saliva family Pfam Description: MtN3/saliva family
  misc_feature (1)..(281): Homolog of NCBI NO: 15234863 NR Description: nodulin MtN3 family protein [Arabidopsis thaliana]
  misc_feature (1)..(243): Homolog of NCBI NO: 15241278 NR Description: nodulin MtN3 family protein [Arabidopsis thaliana]
  misc_feature (1)..(243): Homolog of NCBI NO: 21593109 NR Description: MtN3-like protein [Arabidopsis thaliana]
  misc_feature (4)..(257): Homolog of NCBI NO: 15237803 NR Description: nodulin MtN3 family protein [Arabidopsis thaliana]
  misc_feature (4)..(257): Homolog of NCBI NO: 15229019 NR Description: nodulin MtN3 family protein [Arabidopsis thaliana]
  misc_feature (1)..(243): Homolog of NCBI NO: 14715258 NR Description: N3 like protein [Medicago truncatula]
  misc_feature (1)..(278): Homolog of NCBI NO: 15241265 NR Description: nodulin MtN3 family protein [Arabidopsis thaliana]
  misc_feature (1)..(214): Homolog of NCBI NO: 1619602 NR Description: MtN3 [Medicago truncatula]
  misc_feature (1)..(271): Homolog of NCBI NO: 21593422 NR Description: senescence-associated protein (SAG29)
  misc_feature (1)..(271): Homolog of NCBI NO: 15240040 NR Description: nodulin MtN3 family protein [Arabidopsis thaliana]
MVLTHNVLAVTFGVLGNIISFIVFLAPVPTFVRICKKKSIEGFESLPYVSALFSAMLWIYYALQKDGAGFLLITINAVGCFIETIYIILFITYANKKARISTLKVLGLLNFLGFAAIILVCELLTKGSNREKVLGGICVGFSVCVFAAPLSIMRVVIRTKSVEFMPFSLSLFLTISAITWLFYGLAIKDFYVALPNILGAFLGAVQMILYVIFKYYKTPLVVDETEKPKTVSDHSINMVKLSSTPASGDLTVQPQTNPDVSHPIKTHGGDLEDQMDKKMPN

SEQ ID NO: 104253 - protein, 226 aa, Arabidopsis thaliana
  peptide (1)..(226): Ceres Seq. ID no. 13614646
  misc_feature (1)..(226): Homolog of NCBI NO: 15234863 NR Description: nodulin MtN3 family protein [Arabidopsis thaliana]
  misc_feature (1)..(188): Homolog of NCBI NO: 15241278 NR Description: nodulin MtN3 family protein [Arabidopsis thaliana]
  misc_feature (1)..(188): Homolog of NCBI NO: 21593109 NR Description: MtN3-like protein [Arabidopsis thaliana]
  misc_feature (1)..(202): Homolog of NCBI NO: 15237803 NR Description: nodulin MtN3 family protein [Arabidopsis thaliana]
  misc_feature (1)..(202): Homolog of NCBI NO: 15229019 NR Description: nodulin MtN3 family protein [Arabidopsis thaliana]
  misc_feature (1)..(188): Homolog of NCBI NO: 14715258 NR Description: N3 like protein [Medicago truncatula]
  misc_feature (1)..(223): Homolog of NCBI NO: 15241265 NR Description: nodulin MtN3 family protein [Arabidopsis thaliana]
  misc_feature (1)..(159): Homolog of NCBI NO: 1619602 NR Description: MtN3 [Medicago truncatula]
  misc_feature (1)..(216): Homolog of NCBI NO: 21593422 NR Description: senescence-associated protein (SAG29)
  misc_feature (1)..(216): Homolog of NCBI NO: 15240040 NR Description: nodulin MtN3 family protein [Arabidopsis thaliana]
MLWIYYALQKDGAGFLLITINAVGCFIETIYIILFITYANKKARISTLKVLGLLNFLGFAAIILVCELLTKGSNREKVLGGICVGFSVCVFAAPLSIMRVVIRTKSVEFMPFSLSLFLTISAITWLFYGLAIKDFYVALPNILGAFLGAVQMILYVIFKYYKTPLVVDETEKPKTVSDHSINMVKLSSTPASGDLTVQPQTNPDVSHPIKTHGGDLEDQMDKKMPN

SEQ ID NO: 104254 - DNA, 1049 bp, Arabidopsis thaliana
  misc_feature (1)..(1049): Ceres Seq. ID no. 13614651
  misc_feature: MA Experiment ID: 108435 Result: Down-regulated in Transcription
  misc_feature: MA Experiment 108435 PARAMETER Experiment Name: At_stm_Mutants_cDNA_P Parameter: Plant Line Value: wt Landsburg vs stm
  misc_feature: MA Experiment 108435 PARAMETER Experiment Name: At_stm_Mutants_cDNA_P Parameter: Tissue Value: Shoot Apical Meristem Region
  misc_feature: MA Experiment ID: 108462 Result: Up-regulated in Transcription
  misc_feature: MA Experiment 108462 PARAMETER Experiment Name: At_Germinating_Seeds_cDNA_P Parameter: Age (day) Value: 2 vs. 0
  misc_feature: MA Experiment 108462 PARAMETER Experiment Name: At_Germinating_Seeds_cDNA_P Parameter: Tissue Value: Germinating Seeds
  misc_feature: MA Experiment ID: 108576 Result: Up-regulated in Transcription
  misc_feature: MA Experiment 108576 PARAMETER Experiment Name: At_42deg_Heat_cDNA_P Parameter: Temperature (deg C) Value: 42 vs. 22
  misc_feature: MA Experiment 108576 PARAMETER Experiment Name: At_42deg_Heat_cDNA_P Parameter: Timepoint (hr) Value: 1
  misc_feature: MA Experiment 108576 PARAMETER Experiment Name: At_42deg_Heat_cDNA_P Parameter: Tissue Value: Aerial
  misc_feature: MA Experiment ID: 108577 Result: Up-regulated in Transcription
  misc_feature: MA Experiment 108577 PARAMETER Experiment Name: At_42deg_Heat_cDNA_P Parameter: Temperature (deg C) Value: 42 vs. 22
  misc_feature: MA Experiment 108577 PARAMETER Experiment Name: At_42deg_Heat_cDNA_P Parameter: Timepoint (hr) Value: 6
  misc_feature: MA Experiment 108577 PARAMETER Experiment Name: At_42deg_Heat_cDNA_P Parameter: Tissue Value: Aerial
  misc_feature: MA Experiment ID: 108595 Result: Down-regulated in Transcription
  misc_feature: MA Experiment 108595 PARAMETER Experiment Name: At_Ler-pi_Ovule_cDNA_P Parameter: Plant Line Value: null
  misc_feature: MA Experiment ID: 20000093 Result: Up-regulated in Transcription
  misc_feature: MA Experiment 20000093 PARAMETER Experiment Name: At_42deg_Heat_cDNA_P Parameter: Temperature (deg C) Value: 42 vs. 22
  misc_feature: MA Experiment 20000093 PARAMETER Experiment Name: At_42deg_Heat_cDNA_P Parameter: Timepoint (hr) Value: 0.5
  misc_feature: MA Experiment 20000093 PARAMETER Experiment Name: At_42deg_Heat_cDNA_P Parameter: Tissue Value: Aerial
  misc_feature: MA Experiment ID: 20000111 Result: Up-regulated in Transcription
  misc_feature: MA Experiment 20000111 PARAMETER Experiment Name: At_42deg_Heat_cDNA_P Parameter: Temperature (deg C) Value: 42 vs. 22
  misc_feature: MA Experiment 20000111 PARAMETER Experiment Name: At_42deg_Heat_cDNA_P Parameter: Timepoint (hr) Value: 6
  misc_feature: MA Experiment 20000111 PARAMETER Experiment Name: At_42deg_Heat_cDNA_P Parameter: Tissue Value: Aerial
  misc_feature: MA Experiment ID: 20000112 Result: Up-regulated in Transcription
  misc_feature: MA Experiment 20000112 PARAMETER Experiment Name: At_42deg_Heat_cDNA_P Parameter: Temperature (deg C) Value: 42 vs. 22
  misc_feature: MA Experiment 20000112 PARAMETER Experiment Name: At_42deg_Heat_cDNA_P Parameter: Timepoint (hr) Value: 2
  misc_feature: MA Experiment 20000112 PARAMETER Experiment Name: At_42deg_Heat_cDNA_P Parameter: Tissue Value: Aerial
  misc_feature: MA Experiment ID: 20000113 Result: Up-regulated in Transcription
  misc_feature: MA Experiment 20000113 PARAMETER Experiment Name: At_42deg_Heat_cDNA_P Parameter: Temperature (deg C) Value: 42 vs. 22
  misc_feature: MA Experiment 20000113 PARAMETER Experiment Name: At_42deg_Heat_cDNA_P Parameter: Timepoint (hr) Value: 8
  misc_feature: MA Experiment 20000113 PARAMETER Experiment Name: At_42deg_Heat_cDNA_P Parameter: Tissue Value: Aerial
  misc_feature: MA Experiment ID: 20000171 Result: Up-regulated in Transcription
  misc_feature: MA Experiment 20000171 PARAMETER Experiment Name: At_42deg_Heat_P Parameter: Age (day) Value: 14
  misc_feature: MA Experiment 20000171 PARAMETER Experiment Name: At_42deg_Heat_P Parameter: Organism Value: A. thaliana
  misc_feature: MA Experiment 20000171 PARAMETER Experiment Name: At_42deg_Heat_P Parameter: Plant Line Value: WS
  misc_feature: MA Experiment 20000171 PARAMETER Experiment Name: At_42deg_Heat_P Parameter: Temperature (deg C) Value: 42 vs. 22
  misc_feature: MA Experiment 20000171 PARAMETER Experiment Name: At_42deg_Heat_P Parameter: Timepoint (hr) Value: 1
  misc_feature: MA Experiment 20000171 PARAMETER Experiment Name: At_42deg_Heat_P Parameter: Tissue Value: Aerial
  misc_feature: MA Experiment ID: 20000173 Result: Up-regulated in Transcription
  misc_feature: MA Experiment 20000173 PARAMETER Experiment Name: At_42deg_Heat_P Parameter: Age (day) Value: 14
  misc_feature: MA Experiment 20000173 PARAMETER Experiment Name: At_42deg_Heat_P Parameter: Organism Value: A. thaliana
  misc_feature: MA Experiment 20000173 PARAMETER Experiment Name: At_42deg_Heat_P Parameter: Plant Line Value: WS
  misc_feature: MA Experiment 20000173 PARAMETER Experiment Name: At_42deg_Heat_P Parameter: Temperature (deg C) Value: 42 vs. 22
  misc_feature: MA Experiment 20000173 PARAMETER Experiment Name: At_42deg_Heat_P Parameter: Timepoint (hr) Value: 6
  misc_feature: MA Experiment 20000173 PARAMETER Experiment Name: At_42deg_Heat_P Parameter: Tissue Value: Aerial
  misc_feature: MA Experiment ID: 20000180 Result: Up-regulated in Transcription
  misc_feature: MA Experiment 20000180 PARAMETER Experiment Name: At_Germinating_Seeds_P Parameter: Age (hr) Value: 24 vs. 0
  misc_feature: MA Experiment 20000180 PARAMETER Experiment Name: At_Germinating_Seeds_P Parameter: Tissue Value: Germinating Seeds
  misc_feature: MA Experiment ID: 20000184 Result: Up-regulated in Transcription
  misc_feature: MA Experiment 20000184 PARAMETER Experiment Name: At_Shoots__P Parameter: Age (day) Value: 7
  misc_feature: MA Experiment 20000184 PARAMETER Experiment Name: At_Shoots__P Parameter: Tissue Value: Shoots vs. Whole Plant
  misc_feature: MA Experiment ID: 20000227 Result: Up-regulated in Transcription
  misc_feature: MA Experiment 20000227 PARAMETER Experiment Name: At_Root-Tips-vs-Tops_P Parameter: Tissue Value: Root Tips vs. Root Tops
  misc_feature: MA Experiment ID: 20001248 Result: Down-regulated in Transcription
  misc_feature: MA Experiment 20001248 PARAMETER Experiment Name: At_Far-red-induction_P Parameter: Age (day) Value: 7
  misc_feature: MA Experiment 20001248 PARAMETER Experiment Name: At_Far-red-induction_P Parameter: Light Value: Far-red vs. White
  misc_feature: MA Experiment 20001248 PARAMETER Experiment Name: At_Far-red-induction_P Parameter: Organism Value: A. thaliana
  misc_feature: MA Experiment 20001248 PARAMETER Experiment Name: At_Far-red-induction_P Parameter: Plant Line Value: Columbia
  misc_feature: MA Experiment 20001248 PARAMETER Experiment Name: At_Far-red-induction_P Parameter: Timepoint (hr) Value: 4
  misc_feature: MA Experiment 20001248 PARAMETER Experiment Name: At_Far-red-induction_P Parameter: Tissue Value: Whole Plant
  misc_feature: MA Experiment ID: 20001450 Result: Down-regulated in Transcription
  misc_feature: MA Experiment 20001450 PARAMETER Experiment Name: At_Far-red-induction_P Parameter: Age (day) Value: 7
  misc_feature: MA Experiment 20001450 PARAMETER Experiment Name: At_Far-red-induction_P Parameter: Light Value: Far-red vs. White
  misc_feature: MA Experiment 20001450 PARAMETER Experiment Name: At_Far-red-induction_P Parameter: Organism Value: A. thaliana
  misc_feature: MA Experiment 20001450 PARAMETER Experiment Name: At_Far-red-induction_P Parameter: Plant Line Value: Columbia
  misc_feature: MA Experiment 20001450 PARAMETER Experiment Name: At_Far-red-induction_P Parameter: Timepoint (hr) Value: 8
  misc_feature: MA Experiment 20001450 PARAMETER Experiment Name: At_Far-red-induction_P Parameter: Tissue Value: Whole Plant
  misc_feature: MA Experiment ID: 20001451 Result: Down-regulated in Transcription
  misc_feature: MA Experiment 20001451 PARAMETER Experiment Name: At_Far-red-induction_P Parameter: Age (day) Value: 7
  misc_feature: MA Experiment 20001451 PARAMETER Experiment Name: At_Far-red-induction_P Parameter: Light Value: Far-red vs. White
  misc_feature: MA Experiment 20001451 PARAMETER Experiment Name: At_Far-red-induction_P Parameter: Organism Value: A. thaliana
  misc_feature: MA Experiment 20001451 PARAMETER Experiment Name: At_Far-red-induction_P Parameter: Plant Line Value: Columbia
  misc_feature: MA Experiment 20001451 PARAMETER Experiment Name: At_Far-red-induction_P Parameter: Timepoint (hr) Value: 24
  misc_feature: MA Experiment 20001451 PARAMETER Experiment Name: At_Far-red-induction_P Parameter: Tissue Value: Whole Plant
ggatacaaataataaatctatctgcctcttaaaagttccaaatttcaccacgtcactgctttgataatgcaggtcctcgtcgtctctcctccgctcatcgccgccgcatctctctctaaacctctcaattctctctctaaagccgcactctctttctccagagccaaacccatttgtcctttccctcaaacctctcgacgaccaatctccgtatacaaatccccaatgaacaaccttttcaacagactcggattcgggtctcgtcctcaagcccaagctgacccatcttccgccgcaatcgcccaaggacccgacgatgatgttccgtcttcaggtcagcaattcgcgcaatttggcgccggttgtttctggggagtggagctagcttaccagagagttcctggtgtgaccaagaccgaggttgggtatagccatggcatcgtgcacaatccgagttacgaggatgtctgtactggcactacgggacataacgaggttgttagagttcagtatgatcccaaagagtgtagctttgagagcttgcttgatgttttctggaatcgtcatgatccaaccaccttgaatcgtcagggtggggatgtgggaacgcagtatcgatcaggtatatactactacacagacgagcaagagcgcatagctcgtgaagctgttgagaaacagcagaagatattgaacaagaggattgtcacagagatacttcccgctacgaaattctacagagcagaaaattaccaccagcaatacctggcaaaagggggtcgcatgggtttaagacaatcagctgagaaaggttgcaaggatccaatccgatgctatggctaagaaactaagtcagtcttccctcaagcacataaaaagaagtgagttgtctcatgaaaaatacaataatctgtagatcacatttgtttcttgtctttgttatgcaaccaatggttatgatgcatcctatgcttatatgaatcaaggctttgtccaaatcaatttcaatttgatactacagtactggtaatacaatttgggaagttctc

SEQ ID NO: 104255 - protein, 258 aa, Arabidopsis thaliana
  peptide (1)..(258): Ceres Seq. ID no. 13614652
  misc_feature (92)..(245): Pfam Name: Peptide methionine sulfoxide reductase Pfam Description: Peptide methionine sulfoxide reductase
  misc_feature (1)..(258): Homolog of NCBI NO: 15234942 NR Description: protein-methionine-S-oxide reductase [Arabidopsis >gi|12644314|sp|P54150|MSRA_ARATH Peptide methionine sulfoxide
  misc_feature (1)..(258): Homolog of NCBI NO: 21593143 NR Description: protein-methionine-S-oxide reductase [Arabidopsis
  misc_feature (1)..(258): Homolog of NCBI NO: 15146324 NR Description: AT4g25130/F13M23_270 [Arabidopsis thaliana]
  misc_feature (1)..(258): Homolog of NCBI NO: 1279212 NR Description: methionine sulfoxide reductase [Arabidopsis
  misc_feature (1)..(258): Homolog of NCBI NO: 11278974 NR Description: protein-methionine-S-oxide reductase (EC 1.8.4.6)
  misc_feature (1)..(258): Homolog of NCBI NO: 1709690 NR Description: Peptide methionine sulfoxide reductase
  misc_feature (12)..(258): Homolog of NCBI NO: 29469000 NR Description: peptide methionine sulfoxide reductase; cPMSR
  misc_feature (14)..(258): Homolog of NCBI NO: 12230349 NR Description: Peptide methionine sulfoxide reductase
  misc_feature (62)..(258): Homolog of NCBI NO: 37536896 NR Description: putative peptide methionine sulfoxide reductase
  misc_feature (56)..(258): Homolog of NCBI NO: 18424492 NR Description: peptide methionine sulfoxide reductase - like [Arabidopsis thaliana] >gi|9758479|dbj|BAB09008.1| peptide sulfoxide reductase [Arabidopsis thaliana]
MQVLVVSPPLIAAASLSKPLNSLSKAALSFSRAKPICPFPQTSRRPISVYKSPMNNLFNRLGFGSRPQAQADPSSAAIAQGPDDDVPSSGQQFAQFGAGCFWGVELAYQRVPGVTKTEVGYSHGIVHNPSYEDVCTGTTGHNEVVRVQYDPKECSFESLLDVFWNRHDPTTLNRQGGDVGTQYRSGIYYYTDEQERIAREAVEKQQKILNKRIVTEILPATKFYRAENYHQQYLAKGGRMGLRQSAEKGCKDPIRCYG

SEQ ID NO: 104256 - protein, 205 aa, Arabidopsis thaliana
  peptide (1)..(205): Ceres Seq. ID no. 13614653
  misc_feature (39)..(192): Pfam Name: Peptide methionine sulfoxide reductase Pfam Description: Peptide methionine sulfoxide reductase
  misc_feature (1)..(205): Homolog of NCBI NO: 15234942 NR Description: protein-methionine-S-oxide reductase [Arabidopsis >gi|12644314|sp|P54150|MSRA_ARATH Peptide methionine sulfoxide
  misc_feature (1)..(205): Homolog of NCBI NO: 21593143 NR Description: protein-methionine-S-oxide reductase [Arabidopsis
  misc_feature (1)..(205): Homolog of NCBI NO: 15146324 NR Description: AT4g25130/F13M23_270 [Arabidopsis thaliana]
  misc_feature (1)..(205): Homolog of NCBI NO: 1279212 NR Description: methionine sulfoxide reductase [Arabidopsis
  misc_feature (1)..(205): Homolog of NCBI NO: 11278974 NR Description: protein-methionine-S-oxide reductase (EC 1.8.4.6)
  misc_feature (1)..(205): Homolog of NCBI NO: 1709690 NR Description: Peptide methionine sulfoxide reductase
  misc_feature (1)..(205): Homolog of NCBI NO: 29469000 NR Description: peptide methionine sulfoxide reductase; cPMSR
  misc_feature (1)..(205): Homolog of NCBI NO: 12230349 NR Description: Peptide methionine sulfoxide reductase
  misc_feature (9)..(205): Homolog of NCBI NO: 37536896 NR Description: putative peptide methionine sulfoxide reductase
  misc_feature (3)..(205): Homolog of NCBI NO: 18424492 NR Description: peptide methionine sulfoxide reductase - like [Arabidopsis thaliana] >gi|9758479|dbj|BAB09008.1| peptide sulfoxide reductase [Arabidopsis thaliana]
MNNLFNRLGFGSRPQAQADPSSAAIAQGPDDDVPSSGQQFAQFGAGCFWGVELAYQRVPGVTKTEVGYSHGIVHNPSYEDVCTGTTGHNEVVRVQYDPKECSFESLLDVFWNRHDPTTLNRQGGDVGTQYRSGIYYYTDEQERIAREAVEKQQKILNKRIVTEILPATKFYRAENYHQQYLAKGGRMGLRQSAEKGCKDPIRCYG

SEQ ID NO: 104257 - DNA, 2088 bp, Arabidopsis thaliana
  misc_feature (1)..(2088): Ceres Seq. ID no. 13614658
  misc_feature: MA Experiment ID: 20000113 Result: Down-regulated in Transcription
  misc_feature: MA Experiment 20000113 PARAMETER Experiment Name: At_42deg_Heat_cDNA_P Parameter: Temperature (deg C) Value: 42 vs. 22
  misc_feature: MA Experiment 20000113 PARAMETER Experiment Name: At_42deg_Heat_cDNA_P Parameter: Timepoint (hr) Value: 8
  misc_feature: MA Experiment 20000113 PARAMETER Experiment Name: At_42deg_Heat_cDNA_P Parameter: Tissue Value: Aerial
  misc_feature: MA Experiment ID: 20000227 Result: Up-regulated in Transcription
  misc_feature: MA Experiment 20000227 PARAMETER Experiment Name: At_Root-Tips-vs-Tops_P Parameter: Tissue Value: Root Tips vs. Root Tops
gatttcgcgtcttcactgttgtggatttcttctgaatcttctgagctcgcttcacctacaagaagacaacaaggatcattttctctagattccagatcctgaagaaggtgaaatcttatctgtgatccagtggaagattgaatcaagtaacagattcacttagttcacttgcgtattgcatgcccctgaagataacattttgaataatgttgatattgaattatcacctataagctctggttcttgttgcttgtattggttctgggtatctactagtgaagaaaccatggcttttggttctcctaggaataattctatattagctgcggctggatttcctcggaaagtgtctacagttgcaattgctattggtggtttggcatcattctttgttttcggattgttgcttcgtctttcgtatccgaatagttcttcagttggtggcatattttatgggatagggaatcctgaacaagttcatgtccctttatctttgagcaaccatactgtcaatatccttcagaagagtagtgacatcaatgcgtttgataaaaatctgacttctgattctagctctggcttacctgttgttgttagcaaaagtataccacctccagatttcagtagtgataggaagttggagacacctttgacacaagaaaaagaggatttggtttcttcggatataactgaaaagactgatgttcaatcaggtgaacgtgaaaccaatgtttccaaggctgaagacactccaagtgcatcatctcctccagatgatgtctctgaaactgcttcagcagaaccagagtgtgatttgtatcaaggtagttggttttatgatcctgggggacctctctacacgaacaactcttgccctgtcctgacgcagatgcagaattgccagggaaatggaagacctgacaagggatatgagaactggagatggaaaccgtctcagtgtgagcttcctcggtttgatgccagaaaatttcttgaacttatgaaaggcaagacactggcctttataggagattcagtagctcgtaatcagatggagtccatgttgtgccttctttggcaggttgaaacaccagtcaatcgtgggagccgaaagatgcagagatggtattttaagcaatcatcagtaatgattgcccgtatttggtcatcttggcttgttcatcagttcaacgaaaaattcgattatgctcctgaaggtgtcacaaaactaaagctggatcttcctgatgagcgcataatggaagctatcccgaaattcgacgtggttgtcctctcatcagggcactggtttgcaaagcagtctgtctacatattgaaagaagagatcgtgggaggccaattatggtggccagacaaatcaaaacccatgaaagtcaataacgtggatgcatttggaatatcagttgaaacaatccttaagtccatggctacacacccgaactacagcggtttgaccattgtgagaacattctcacctgatcattacgaaggtggtgcttggaacacaggtggatcatgcacggggaaagaagaacccatccttccagggaagctagtgaaaaacggattcacagagataatgcatgagaagcaagcgacaggatataaccaagccgtcgataaagtcgcggagaatttgaagctaaaactaaagctgatggatatcacagaggcatttggatatcgccatgatggtcatcctggtccattcagaagtcctgaccctaacaagatcactaaacggggaccagacggacggcctccacctcaggactgcttgcactggtgcatgccaggaccagtcgatacatggaacgaaatggtcttggagctcataaggagagacaggaaaagctcatcaacttgacttggtttgaaactcaaaggatgagagagcatattacacgacttatactattaatctgattcttggttactgataaactcaaagataaactcacttgtagatttgtgctaggcacggtgagttaggattagaatttgttccactatacttgttggttcgtttgtcctgagattgaaatttaagatttgggagttatgagt

SEQ ID NO: 104258 - protein, 533 aa, Arabidopsis thaliana; identical to SEQ ID NO: 24504
  peptide (1)..(533): Ceres Seq. ID no. 13614659
  misc_feature (342)..(524): Pfam Name: Arabidopsis proteins of unknown function Pfam Description: Arabidopsis proteins of unknown function
  misc_feature (1)..(533): Homolog of NCBI NO: 22328922 NR Description: expressed protein [Arabidopsis thaliana] unknown protein [Arabidopsis thaliana]
  misc_feature (1)..(533): Homolog of NCBI NO: 7487578 NR Description: hypothetical protein T30C3.30 - Arabidopsis >gi|5123925|emb|CAB45513.1| putative protein [Arabidopsis >gi|7269387|emb|CAB81347.1| putative protein [Arabidopsis
  misc_feature (108)..(531): Homolog of NCBI NO: 15242138 NR Description: (YLS7) leaf-senescence-related protein thaliana] >gi|9758206|dbj|BAB08680.1|
  misc_feature (1)..(95): Homolog of NCBI NO: 15242138 NR Description: (YLS7) leaf-senescence-related protein thaliana] >gi|9758206|dbj|BAB08680.1|
  misc_feature (141)..(527): Homolog of NCBI NO: 34906936 NR Description: leaf senescence related protein-like [Oryza
  misc_feature (147)..(528): Homolog of NCBI NO: 15237044 NR Description: expressed protein [Arabidopsis thaliana]
  misc_feature (42)..(527): Homolog of NCBI NO: 15237211 NR Description: expressed protein [Arabidopsis thaliana]
  misc_feature (174)..(524): Homolog of NCBI NO: 7486743 NR Description: hypothetical protein F9D16.260 - Arabidopsis >gi|4454048|emb|CAA23045.1| putative protein [Arabidopsis >gi|7269228|emb|CAB81297.1| putative protein [Arabidopsis
  misc_feature (174)..(524): Homolog of NCBI NO: 30686312 NR Description: expressed protein [Arabidopsis thaliana]
  misc_feature (155)..(529): Homolog of NCBI NO: 30678135 NR Description: expressed protein [Arabidopsis thaliana] unknown protein [Arabidopsis thaliana]

SEQ ID NO: 104259 - protein, 332 aa, Arabidopsis thaliana; identical to SEQ ID NO: 24505
  peptide (1)..(332): Ceres Seq. ID no. 13614660
  misc_feature (141)..(323): Pfam Name: Arabidopsis proteins of unknown function Pfam Description: Arabidopsis proteins of unknown function
  misc_feature (1)..(332): Homolog of NCBI NO: 22328922 NR Description: expressed protein [Arabidopsis thaliana] unknown protein [Arabidopsis thaliana]
  misc_feature (1)..(332): Homolog of NCBI NO: 7487578 NR Description: hypothetical protein T30C3.30 - Arabidopsis >gi|5123925|emb|CAB45513.1| putative protein [Arabidopsis >gi|7269387|emb|CAB81347.1| putative protein [Arabidopsis
  misc_feature (1)..(330): Homolog of NCBI NO: 15242138 NR Description: (YLS7) leaf-senescence-related protein thaliana] >gi|9758206|dbj|BAB08680.1|
  misc_feature (1)..(326): Homolog of NCBI NO: 34906936 NR Description: leaf senescence related protein-like [Oryza
  misc_feature (1)..(327): Homolog of NCBI NO: 15237044 NR Description: expressed protein [Arabidopsis thaliana]
  misc_feature (1)..(326): Homolog of NCBI NO: 15237211 NR Description: expressed protein [Arabidopsis thaliana]
  misc_feature (1)..(323): Homolog of NCBI NO: 7486743 NR Description: hypothetical protein F9D16.260 - Arabidopsis >gi|4454048|emb|CAA23045.1| putative protein [Arabidopsis >gi|7269228|emb|CAB81297.1| putative protein [Arabidopsis
  misc_feature (1)..(323): Homolog of NCBI NO: 30686312 NR Description: expressed protein [Arabidopsis thaliana]
  misc_feature (1)..(328): Homolog of NCBI NO: 30678135 NR Description: expressed protein [Arabidopsis thaliana] unknown protein [Arabidopsis thaliana]
  misc_feature (1)..(323): Homolog of NCBI NO: 34911888 NR Description: OSJNBb0032K15.21 [Oryza sativa (japonica

SEQ ID NO: 104260 - protein, 295 aa, Arabidopsis thaliana; identical to SEQ ID NO: 24506
  peptide (1)..(295): Ceres Seq. ID no. 13614661
  misc_feature (104)..(286): Pfam Name: Arabidopsis proteins of unknown function Pfam Description: Arabidopsis proteins of unknown function
  misc_feature (1)..(295): Homolog of NCBI NO: 22328922 NR Description: expressed protein [Arabidopsis thaliana] unknown protein [Arabidopsis thaliana]
  misc_feature (1)..(295): Homolog of NCBI NO: 7487578 NR Description: hypothetical protein T30C3.30 - Arabidopsis >gi|5123925|emb|CAB45513.1| putative protein [Arabidopsis >gi|7269387|emb|CAB81347.1| putative protein [Arabidopsis
  misc_feature (1)..(293): Homolog of NCBI NO: 15242138 NR Description: (YLS7) leaf-senescence-related protein thaliana] >gi|9758206|dbj|BAB08680.1|
  misc_feature (1)..(289): Homolog of NCBI NO: 34906936 NR Description: leaf senescence related protein-like [Oryza
  misc_feature (1)..(290): Homolog of NCBI NO: 15237044 NR Description: expressed protein [Arabidopsis thaliana]
  misc_feature (1)..(289): Homolog of NCBI NO: 15237211 NR Description: expressed protein [Arabidopsis thaliana]
  misc_feature (1)..(286): Homolog of NCBI NO: 7486743 NR Description: hypothetical protein F9D16.260 - Arabidopsis >gi|4454048|emb|CAA23045.1| putative protein [Arabidopsis >gi|7269228|emb|CAB81297.1| putative protein [Arabidopsis
  misc_feature (1)..(286): Homolog of NCBI NO: 30686312 NR Description: expressed protein [Arabidopsis thaliana]
  misc_feature (1)..(291): Homolog of NCBI NO: 30678135 NR Description: expressed protein [Arabidopsis thaliana] unknown protein [Arabidopsis thaliana]
  misc_feature (1)..(286): Homolog of NCBI NO: 34911888 NR Description: OSJNBb0032K15.21 [Oryza sativa (japonica

SEQ ID NO: 104261 - DNA, 998 bp, Arabidopsis thaliana
  misc_feature (1)..(998): Ceres Seq. ID no. 13614662
  misc_feature: MA Experiment ID: 20000180 Result: Up-regulated in Transcription
  misc_feature: MA Experiment 20000180 PARAMETER Experiment Name: At_Germinating_Seeds_P Parameter: Age (hr) Value: 24 vs. 0
  misc_feature: MA Experiment 20000180 PARAMETER Experiment Name: At_Germinating_Seeds_P Parameter: Tissue Value: Germinating Seeds
  misc_feature: MA Experiment ID: 20000234 Result: Down-regulated in Transcription
  misc_feature: MA Experiment 20000234 PARAMETER Experiment Name: At_Siliques_P Parameter: Age (day) Value: 21
  misc_feature: MA Experiment 20000234 PARAMETER Experiment Name: At_Siliques_P Parameter: Organism Value: A. thaliana
  misc_feature: MA Experiment 20000234 PARAMETER Experiment Name: At_Siliques_P Parameter: Plant Line Value: WS
  misc_feature: MA Experiment 20000234 PARAMETER Experiment Name: At_Siliques_P Parameter: Tissue Value: Less Than 5mm Siliques vs. Whole Plant
  misc_feature: MA Experiment ID: 20000265 Result: Down-regulated in Transcription
  misc_feature: MA Experiment 20000265 PARAMETER Experiment Name: At_Open_Flower_P Parameter: Age (day) Value: 21
  misc_feature: MA Experiment 20000265 PARAMETER Experiment Name: At_Open_Flower_P Parameter: Plant Line Value: WS
  misc_feature: MA Experiment 20000265 PARAMETER Experiment Name: At_Open_Flower_P Parameter: Tissue Value: Closed Flower vs. Whole Plant
  misc_feature: MA Experiment ID: 20001557 Result: Down-regulated in Transcription
  misc_feature: MA Experiment 20001557 PARAMETER Experiment Name: At_Drought_Soil_Dry_P Parameter: Age (day) Value: 27
  misc_feature: MA Experiment 20001557 PARAMETER Experiment Name: At_Drought_Soil_Dry_P Parameter: Organism Value: A. thaliana
  misc_feature: MA Experiment 20001557 PARAMETER Experiment Name: At_Drought_Soil_Dry_P Parameter: Plant Line Value: WS
  misc_feature: MA Experiment 20001557 PARAMETER Experiment Name: At_Drought_Soil_Dry_P Parameter: Post Timepoint (hr) Value: 3
  misc_feature: MA Experiment 20001557 PARAMETER Experiment Name: At_Drought_Soil_Dry_P Parameter: Post-Treatment Value: Re-Water vs. No Drought
  misc_feature: MA Experiment 20001557 PARAMETER Experiment Name: At_Drought_Soil_Dry_P Parameter: Timepoint (day) Value: 13
  misc_feature: MA Experiment 20001557 PARAMETER Experiment Name: At_Drought_Soil_Dry_P Parameter: Treatment Value: Drought vs. No Drought
  misc_feature: MA Experiment ID: 20001558 Result: Down-regulated in Transcription
  misc_feature: MA Experiment 20001558 PARAMETER Experiment Name: At_Drought_Soil_Dry_P Parameter: Age (day) Value: 27
  misc_feature: MA Experiment 20001558 PARAMETER Experiment Name: At_Drought_Soil_Dry_P Parameter: Organism Value: A. thaliana
  misc_feature: MA Experiment 20001558 PARAMETER Experiment Name: At_Drought_Soil_Dry_P Parameter: Plant Line Value: WS
  misc_feature: MA Experiment 20001558 PARAMETER Experiment Name: At_Drought_Soil_Dry_P Parameter: Post Timepoint (hr) Value: 6
  misc_feature: MA Experiment 20001558 PARAMETER Experiment Name: At_Drought_Soil_Dry_P Parameter: Post-Treatment Value: Re-Water vs. No Drought
  misc_feature: MA Experiment 20001558 PARAMETER Experiment Name: At_Drought_Soil_Dry_P Parameter: Timepoint (day) Value: 13
  misc_feature: MA Experiment 20001558 PARAMETER Experiment Name: At_Drought_Soil_Dry_P Parameter: Treatment Value: Drought vs. No Drought
  misc_feature: MA Experiment ID: 20001560 Result: Down-regulated in Transcription
  misc_feature: MA Experiment 20001560 PARAMETER Experiment Name: At_Drought_Soil_Dry_P Parameter: Age (day) Value: 28
  misc_feature: MA Experiment 20001560 PARAMETER Experiment Name: At_Drought_Soil_Dry_P Parameter: Organism Value: A. thaliana
  misc_feature: MA Experiment 20001560 PARAMETER Experiment Name: At_Drought_Soil_Dry_P Parameter: Plant Line Value: WS
  misc_feature: MA Experiment 20001560 PARAMETER Experiment Name: At_Drought_Soil_Dry_P Parameter: Post Timepoint (hr) Value: None
  misc_feature: MA Experiment 20001560 PARAMETER Experiment Name: At_Drought_Soil_Dry_P Parameter: Post-Treatment Value: None
  misc_feature: MA Experiment 20001560 PARAMETER Experiment Name: At_Drought_Soil_Dry_P Parameter: Timepoint (day) Value: 14
  misc_feature: MA Experiment 20001560 PARAMETER Experiment Name: At_Drought_Soil_Dry_P Parameter: Treatment Value: Drought vs. No Drought
gattcgtctcagaggccgaggttgaagattaatcggacaaaggagattagaagagtagaaaaaacgacaagaagaaagaaacacagttgcaggagagaaagagatatggctgtccggataaacgcgatggcggtgacgtttgtggcgcacgcgctggcggtaatagcggcgattatggtactggtttggagtatcagttacagaggtggattggcctgggaagctactaacaagaatctcatcttcaatctgcatcctgttctgatgctcatcggatttataatcttgggaggagaagccatcataagttacaaatcgcttccgctggagaaaccagtgaagaagttgatccaccttatactccatgccattgctctggctcttgggatatttggcatctgtgcagcctttaagaaccacaatgaaagccatatccctaatctctacagtctccattcctggattggtattggagtcatttctctttatggcttccagtgggtgtacagcttcatagtgttcttcttcccaggaggatcaacaaatttgaaaagcggattgcttccgtggcacgcaatgcttggcctgtttgtttacatacttgctgtcgggaatgcagctttagggtttctggaaaagctgactttcttggagaatggagggcttgacaagtatggatccgaagcatttcttatcaacttcacggccattatcactattctctttggtgcctttgtggtactcactgcttctgctgagtctccttctccttctccttccgtctccaatgatgatagtgttgacttcagttattctgctatataaaacactttctacattccacgttacatctgtatcgccccttgtactctcaaaactccatttatgtatgatgcatttgtagcgaaaagctttgtgtgttacggctttgctacttctggtgtgtaaaatcttcaatgatattgatgaatcttttaaatcattttcttttcttttct

SEQ ID NO: 104262 - protein, 274 aa, Arabidopsis thaliana
  peptide (1)..(274): Ceres Seq. ID no. 13614663
  misc_feature (1)..(274): Homolog of NCBI NO: 7486819 NR Description: hypothetical protein M7J2.60 - Arabidopsis >gi|2980793|emb|CAA18169.1| putative protein [Arabidopsis
  misc_feature (1)..(274): Homolog of NCBI NO: 25407597 NR Description: hypothetical protein AT4g25570 [imported] - thaliana >gi|7269407|emb|CAB81367.1| putative protein
  misc_feature (36)..(274): Homolog of NCBI NO: 18416576 NR Description: expressed protein [Arabidopsis thaliana] putative protein [Arabidopsis thaliana]
  misc_feature (36)..(274): Homolog of NCBI NO: 12597245 NR Description: cytochrome b561 [Arabidopsis thaliana]
  misc_feature (36)..(274): Homolog of NCBI NO: 21553731 NR Description: cytochrome b561 [Arabidopsis thaliana]
  misc_feature (40)..(259): Homolog of NCBI NO: 38346996 NR Description: OSJNBb0039L24.15 [Oryza sativa (japonica
  misc_feature (40)..(222): Homolog of NCBI NO: 6822123 NR Description: putative cytochrome B 561 [Craterostigma
  misc_feature (36)..(252): Homolog of NCBI NO: 37535830 NR Description: putative cytochrome b-561 [Oryza sativa (japonica
  misc_feature (48)..(254): Homolog of NCBI NO: 38637027 NR Description: putative cytochrome b561 [Oryza sativa (japonica group)] >gi|38637292|dbj|BAD03555.1| putative cytochrome b561
  misc_feature (36)..(248): Homolog of NCBI NO: 15240965 NR Description: cytochrome b-561 (gb|AAD45585.1) [Arabidopsis
DSSQRPRLKINRTKEIRRVEKTTRRKKHSCRRERDMAVRINAMAVTFVAHALAVIAAIMVLVWSISYRGGLAWEATNKNLIFNLHPVLMLIGFIILGGEAIISYKSLPLEKPVKKLIHLILHAIALALGIFGICAAFKNHNESHIPNLYSLHSWIGIGVISLYGFQWVYSFIVFFFPGGSTNLKSGLLPWHAMLGLFVYILAVGNAALGFLEKLTFLENGGLDKYGSEAFLINFTAIITILFGAFVVLTASAESPSPSPSVSNDDSVDFSYSAI

SEQ ID NO: 104263 - protein, 239 aa, Arabidopsis thaliana; identical to SEQ ID NO: 29951
  peptide (1)..(239): Ceres Seq. ID no. 13614664
  misc_feature (1)..(239): Homolog of NCBI NO: 7486819 NR Description: hypothetical protein M7J2.60 - Arabidopsis >gi|2980793|emb|CAA18169.1| putative protein [Arabidopsis
  misc_feature (1)..(239): Homolog of NCBI NO: 25407597 NR Description: hypothetical protein AT4g25570 [imported] - thaliana >gi|7269407|emb|CAB81367.1| putative protein
  misc_feature (1)..(239): Homolog of NCBI NO: 18416576 NR Description: expressed protein [Arabidopsis thaliana] putative protein [Arabidopsis thaliana]
  misc_feature (1)..(239): Homolog of NCBI NO: 12597245 NR Description: cytochrome b561 [Arabidopsis thaliana]
  misc_feature (1)..(239): Homolog of NCBI NO: 21553731 NR Description: cytochrome b561 [Arabidopsis thaliana]
  misc_feature (5)..(224): Homolog of NCBI NO: 38346996 NR Description: OSJNBb0039L24.15 [Oryza sativa (japonica
  misc_feature (5)..(187): Homolog of NCBI NO: 6822123 NR Description: putative cytochrome B 561 [Craterostigma
  misc_feature (1)..(217): Homolog of NCBI NO: 37535830 NR Description: putative cytochrome b-561 [Oryza sativa (japonica
  misc_feature (13)..(219): Homolog of NCBI NO: 38637027 NR Description: putative cytochrome b561 [Oryza sativa (japonica group)] >gi|38637292|dbj|BAD03555.1| putative cytochrome b561
  misc_feature (1)..(213): Homolog of NCBI NO: 15240965 NR Description: cytochrome b-561 (gb|AAD45585.1) [Arabidopsis

SEQ ID NO: 104264 - protein, 232 aa, Arabidopsis thaliana; identical to SEQ ID NO: 29952
  peptide (1)..(232): Ceres Seq. ID no. 13614665
  misc_feature (1)..(232): Homolog of NCBI NO: 7486819 NR Description: hypothetical protein M7J2.60 - Arabidopsis >gi|2980793|emb|CAA18169.1| putative protein [Arabidopsis
  misc_feature (1)..(232): Homolog of NCBI NO: 25407597 NR Description: hypothetical protein AT4g25570 [imported] - thaliana >gi|7269407|emb|CAB81367.1| putative protein
  misc_feature (1)..(232): Homolog of NCBI NO: 18416576 NR Description: expressed protein [Arabidopsis thaliana] putative protein [Arabidopsis thaliana]
  misc_feature (1)..(232): Homolog of NCBI NO: 12597245 NR Description: cytochrome b561 [Arabidopsis thaliana]
  misc_feature (1)..(232): Homolog of NCBI NO: 21553731 NR Description: cytochrome b561 [Arabidopsis thaliana]
  misc_feature (1)..(217): Homolog of NCBI NO: 38346996 NR Description: OSJNBb0039L24.15 [Oryza sativa (japonica
  misc_feature (1)..(180): Homolog of NCBI NO: 6822123 NR Description: putative cytochrome B 561 [Craterostigma
  misc_feature (1)..(210): Homolog of NCBI NO: 37535830 NR Description: putative cytochrome b-561 [Oryza sativa (japonica
  misc_feature (6)..(212): Homolog of NCBI NO: 38637027 NR Description: putative cytochrome b561 [Oryza sativa (japonica group)] >gi|38637292|dbj|BAD03555.1| putative cytochrome b561
  misc_feature (1)..(206): Homolog of NCBI NO: 15240965 NR Description: cytochrome b-561 (gb|AAD45585.1) [Arabidopsis

SEQ ID NO: 104265 - DNA, 1166 bp, Arabidopsis thaliana
  misc_feature (1)..(1166): Ceres Seq. ID no. 13614666
  misc_feature: MA Experiment ID: 20000179 Result: Up-regulated in Transcription
  misc_feature: MA Experiment 20000179 PARAMETER Experiment Name: At_Germinating_Seeds_P Parameter: Age (hr) Value: 6 vs. 0
  misc_feature: MA Experiment 20000179 PARAMETER Experiment Name: At_Germinating_Seeds_P Parameter: Tissue Value: Germinating Seeds
  misc_feature: MA Experiment ID: 20000182 Result: Down-regulated in Transcription
  misc_feature: MA Experiment 20000182 PARAMETER Experiment Name: At_2mM_SA_P Parameter: Age (day) Value: 14
  misc_feature: MA Experiment 20000182 PARAMETER Experiment Name: At_2mM_SA_P Parameter: Organism Value: A. thaliana
  misc_feature: MA Experiment 20000182 PARAMETER Experiment Name: At_2mM_SA_P Parameter: Plant Line Value: WS
  misc_feature: MA Experiment 20000182 PARAMETER Experiment Name: At_2mM_SA_P Parameter: Timepoint (hr) Value: 6
  misc_feature: MA Experiment 20000182 PARAMETER Experiment Name: At_2mM_SA_P Parameter: Tissue Value: Aerial
  misc_feature: MA Experiment 20000182 PARAMETER Experiment Name: At_2mM_SA_P Parameter: Treatment Value: 2mM SA vs. No Treatment
  misc_feature: MA Experiment ID: 20000234 Result: Up-regulated in Transcription
  misc_feature: MA Experiment 20000234 PARAMETER Experiment Name: At_Siliques_P Parameter: Age (day) Value: 21
  misc_feature: MA Experiment 20000234 PARAMETER Experiment Name: At_Siliques_P Parameter: Organism Value: A. thaliana
  misc_feature: MA Experiment 20000234 PARAMETER Experiment Name: At_Siliques_P Parameter: Plant Line Value: WS
  misc_feature: MA Experiment 20000234 PARAMETER Experiment Name: At_Siliques_P Parameter: Tissue Value: Less Than 5mm Siliques vs. Whole Plant
  misc_feature: MA Experiment ID: 20000265 Result: Up-regulated in Transcription
  misc_feature: MA Experiment 20000265 PARAMETER Experiment Name: At_Open_Flower_P Parameter: Age (day) Value: 21
  misc_feature: MA Experiment 20000265 PARAMETER Experiment Name: At_Open_Flower_P Parameter: Plant Line Value: WS
  misc_feature: MA Experiment 20000265 PARAMETER Experiment Name: At_Open_Flower_P Parameter: Tissue Value: Closed Flower vs. Whole Plant
  misc_feature: MA Experiment ID: 20000495 Result: Up-regulated in Transcription
  misc_feature: MA Experiment 20000495 PARAMETER Experiment Name: At_Guard_Cells_P Parameter: Harvest Date Value: 8/2/2002
  misc_feature: MA Experiment 20000495 PARAMETER Experiment Name: At_Guard_Cells_P Parameter: Organism Value: A. thaliana
  misc_feature: MA Experiment 20000495 PARAMETER Experiment Name: At_Guard_Cells_P Parameter: Tissue Value: Guard Cells vs. Leaves
ctttctgttcctcgtttcagcgatgtagcagtagtacccagtggagtggagcaatggcttgccttagccgaatcttccttattctgatgattactatgtcttcttcgtctcctcctttctgttccggtggaagtcggaaggagctccgagataaagaaattacgagtaagagtgatgatacacaggcgagttatgttttaggatctaaatttgtggacccgacacgtgttcttcaactttcatggctaccaagggtctttctataccgcgggttcttgtcggaggaagagtgtgatcatctgatatctctgagaaaggagactacagaggtttactcagtggatgctgatggaaagacgcaacttgatccagtagttgctgggattgaagaaaaagtttctgcgtggactttcctcccaggagaaaatggcggctctatcaaggtaagaagttacacttctgagaagtcaggaaagaagttggattattttggagaggaacctagctccgtattgcatgaatctttgctggcaaccgtcgttctctacctctcaaacacaactcaaggaggagagcttctcttcccaaattcagagatgaaacccaaaaacagttgcttggagggcggtaacattttaagaccagtaaaaggaaacgcaattctgttcttcaccaggctcttgaatgcatctttggatgggaaaagcactcatttgaggtgccctgtggtgaaaggagaactgttagtggcaacaaaactgatctatgcgaagaaacaagcaagaattgaggagagtggggaatgcagtgatgaagacgaaaactgtggacgatgggctaagcttggggagtgcaagaaaaaccctgtctatatgattggctctcctgattactacggtacctgcagaaagagttgtaacgcttgttgattcttcaatcttatcgcaaataattgaacattttcatactcaagtacttgagctgtttttggtctataagatagaataaatagtgaatagttaagggtcgtggtggtaattaattcctcttggccataggagaaaagaatatactcacttagatcttctttgatataactagaagtctttgtctatgttgttatctatgtttctctcgaatcataaatttgcatcttgctgtttctc

SEQ ID NO: 104266 - protein, 308 aa, Arabidopsis thaliana
  peptide (1)..(308): Ceres Seq. ID no. 13614667
  misc_feature (267)..(308): Pfam Name: ShTK domain Pfam Description: ShTK domain
  misc_feature (18)..(308): Homolog of NCBI NO: 30686940 NR Description: ShTK domain-containing protein [Arabidopsis >gi|26451153|dbj|BAC42680.1| unknown protein [Arabidopsis >gi|29893542|gb|AAP06823.1| unknown protein [Arabidopsis
  misc_feature (141)..(308): Homolog of NCBI NO: 7486817 NR Description: hypothetical protein M7J2.30 - Arabidopsis >gi|2980790|emb|CAA18166.1| hypothetical protein [Arabidopsis
  misc_feature (84)..(140): Homolog of NCBI NO: 7486817 NR Description: hypothetical protein M7J2.30 - Arabidopsis >gi|2980790|emb|CAA18166.1| hypothetical protein [Arabidopsis
  misc_feature (32)..(84): Homolog of NCBI NO: 7486817 NR Description: hypothetical protein M7J2.30 - Arabidopsis >gi|2980790|emb|CAA18166.1| hypothetical protein [Arabidopsis
  misc_feature (141)..(308): Homolog of NCBI NO: 25365919 NR Description: hypothetical protein AT4g25600 [imported] - thaliana >gi|7269410|emb|CAB81370.1| hypothetical protein
  misc_feature (84)..(140): Homolog of NCBI NO: 25365919 NR Description: hypothetical protein AT4g25600 [imported] - thaliana >gi|7269410|emb|CAB81370.1| hypothetical protein
  misc_feature (33)..(84): Homolog of NCBI NO: 25365919 NR Description: hypothetical protein AT4g25600 [imported] - thaliana >gi|7269410|emb|CAB81370.1| hypothetical protein
  misc_feature (122)..(308): Homolog of NCBI NO: 9294583 NR Description: prolyl 4-hydroxylase alpha subunit-like protein
  misc_feature (34)..(116): Homolog of NCBI NO: 9294583 NR Description: prolyl 4-hydroxylase alpha subunit-like protein
  misc_feature (122)..(308): Homolog of NCBI NO: 18405808 NR Description: oxidoreductase, 2OG-Fe(II) oxygenase family
FCSSFQRCSSSTQWSGAMACLSRIFLILMITMSSSSPPFCSGGSRKELRDKEITSKSDDTQASYVLGSKFVDPTRVLQLSWLPRVFLYRGFLSEEECDHLISLRKETTEVYSVDADGKTQLDPVVAGIEEKVSAWTFLPGENGGSIKVRSYTSEKSGKKLDYFGEEPSSVLHESLLATVVLYLSNTTQGGELLFPNSEMKPKNSCLEGGNILRPVKGNAILFFTRLLNASLDGKSTHLRCPVVKGELLVATKLIYAKKQARIEESGECSDEDENCGRWAKLGECKKNPVYMIGSPDYYGTCRKSCNAC

SEQ ID NO: 104267 - protein, 291 aa, Arabidopsis thaliana
  peptide (1)..(291): Ceres Seq. ID no. 13614668
  misc_feature (250)..(291): Pfam Name: ShTK domain Pfam Description: ShTK domain
  misc_feature (1)..(291): Homolog of NCBI NO: 30686940 NR Description: ShTK domain-containing protein [Arabidopsis >gi|26451153|dbj|BAC42680.1| unknown protein [Arabidopsis >gi|29893542|gb|AAP06823.1| unknown protein [Arabidopsis
  misc_feature (124)..(291): Homolog of NCBI NO: 7486817 NR Description: hypothetical protein M7J2.30 - Arabidopsis >gi|2980790|emb|CAA18166.1| hypothetical protein [Arabidopsis
  misc_feature (67)..(123): Homolog of NCBI NO: 7486817 NR Description: hypothetical protein M7J2.30 - Arabidopsis >gi|2980790|emb|CAA18166.1| hypothetical protein [Arabidopsis
  misc_feature (15)..(67): Homolog of NCBI NO: 7486817 NR Description: hypothetical protein M7J2.30 - Arabidopsis >gi|2980790|emb|CAA18166.1| hypothetical protein [Arabidopsis
  misc_feature (124)..(291): Homolog of NCBI NO: 25365919 NR Description: hypothetical protein AT4g25600 [imported] - thaliana >gi|7269410|emb|CAB81370.1| hypothetical protein
  misc_feature (67)..(123): Homolog of NCBI NO: 25365919 NR Description: hypothetical protein AT4g25600 [imported] - thaliana >gi|7269410|emb|CAB81370.1| hypothetical protein
  misc_feature (16)..(67): Homolog of NCBI NO: 25365919 NR Description: hypothetical protein AT4g25600 [imported] - thaliana >gi|7269410|emb|CAB81370.1| hypothetical protein
  misc_feature (105)..(291): Homolog of NCBI NO: 9294583 NR Description: prolyl 4-hydroxylase alpha subunit-like protein
  misc_feature (17)..(99): Homolog of NCBI NO: 9294583 NR Description: prolyl 4-hydroxylase alpha subunit-like protein
  misc_feature (105)..(291): Homolog of NCBI NO: 18405808 NR Description: oxidoreductase, 2OG-Fe(II) oxygenase family
MACLSRIFLILMITMSSSSPPFCSGGSRKELRDKEITSKSDDTQASYVLGSKFVDPTRVLQLSWLPRVFLYRGFLSEEECDHLISLRKETTEVYSVDADGKTQLDPVVAGIEEKVSAWTFLPGENGGSIKVRSYTSEKSGKKLDYFGEEPSSVLHESLLATVVLYLSNTTQGGELLFPNSEMKPKNSCLEGGNILRPVKGNAILFFTRLLNASLDGKSTHLRCPVVKGELLVATKLIYAKKQARIEESGECSDEDENCGRWAKLGECKKNPVYMIGSPDYYGTCRKSCNAC

SEQ ID NO: 104268 - protein, 280 aa, Arabidopsis thaliana
  peptide (1)..(280): Ceres Seq. ID no. 13614669
  misc_feature (239)..(280): Pfam Name: ShTK domain Pfam Description: ShTK domain
  misc_feature (1)..(280): Homolog of NCBI NO: 30686940 NR Description: ShTK domain-containing protein [Arabidopsis >gi|26451153|dbj|BAC42680.1| unknown protein [Arabidopsis >gi|29893542|gb|AAP06823.1| unknown protein [Arabidopsis
  misc_feature (113)..(280): Homolog of NCBI NO: 7486817 NR Description: hypothetical protein M7J2.30 - Arabidopsis >gi|2980790|emb|CAA18166.1| hypothetical protein [Arabidopsis
  misc_feature (56)..(112): Homolog of NCBI NO: 7486817 NR Description: hypothetical protein M7J2.30 - Arabidopsis >gi|2980790|emb|CAA18166.1| hypothetical protein [Arabidopsis
  misc_feature (4)..(56): Homolog of NCBI NO: 7486817 NR Description: hypothetical protein M7J2.30 - Arabidopsis >gi|2980790|emb|CAA18166.1| hypothetical protein [Arabidopsis
  misc_feature (113)..(280): Homolog of NCBI NO: 25365919 NR Description: hypothetical protein AT4g25600 [imported] - thaliana >gi|7269410|emb|CAB81370.1| hypothetical protein
  misc_feature (56)..(112): Homolog of NCBI NO: 25365919 NR Description: hypothetical protein AT4g25600 [imported] - thaliana >gi|7269410|emb|CAB81370.1| hypothetical protein
  misc_feature (5)..(56): Homolog of NCBI NO: 25365919 NR Description: hypothetical protein AT4g25600 [imported] - thaliana >gi|7269410|emb|CAB81370.1| hypothetical protein
  misc_feature (94)..(280): Homolog of NCBI NO: 9294583 NR Description: prolyl 4-hydroxylase alpha subunit-like protein
  misc_feature (6)..(88): Homolog of NCBI NO: 9294583 NR Description: prolyl 4-hydroxylase alpha subunit-like protein
  misc_feature (94)..(280): Homolog of NCBI NO: 18405808 NR Description: oxidoreductase, 2OG-Fe(II) oxygenase family
MITMSSSSPPFCSGGSRKELRDKEITSKSDDTQASYVLGSKFVDPTRVLQLSWLPRVFLYRGFLSEEECDHLISLRKETTEVYSVDADGKTQLDPVVAGIEEKVSAWTFLPGENGGSIKVRSYTSEKSGKKLDYFGEEPSSVLHESLLATVVLYLSNTTQGGELLFPNSEMKPKNSCLEGGNILRPVKGNAILFFTRLLNASLDGKSTHLRCPVVKGELLVATKLIYAKKQARIEESGECSDEDENCGRWAKLGECKKNPVYMIGSPDYYGTCRKSCNAC

SEQ ID NO: 104269 - DNA, 844 bp, Arabidopsis thaliana
  misc_feature (1)..(844): Ceres Seq. ID no. 13614670
  misc_feature: MA Experiment ID: 108434 Result: Up-regulated in Transcription
  misc_feature: MA Experiment 108434 PARAMETER Experiment Name: At_Root_Tips_cDNA_P Parameter: Tissue Value: Root Tips
  misc_feature: MA Experiment ID: 108462 Result: Down-regulated in Transcription
  misc_feature: MA Experiment 108462 PARAMETER Experiment Name: At_Germinating_Seeds_cDNA_P Parameter: Age (day) Value: 2 vs. 0
  misc_feature: MA Experiment 108462 PARAMETER Experiment Name: At_Germinating_Seeds_cDNA_P Parameter: Tissue Value: Germinating Seeds
  misc_feature: MA Experiment ID: 108463 Result: Down-regulated in Transcription
  misc_feature: MA Experiment 108463 PARAMETER Experiment Name: At_Germinating_Seeds_cDNA_P Parameter: Age (day) Value: 3 vs. 0
  misc_feature: MA Experiment 108463 PARAMETER Experiment Name: At_Germinating_Seeds_cDNA_P Parameter: Tissue Value: Germinating Seeds
  misc_feature: MA Experiment ID: 108464 Result: Down-regulated in Transcription
  misc_feature: MA Experiment 108464 PARAMETER Experiment Name: At_Germinating_Seeds_cDNA_P Parameter: Age (day) Value: 4 vs. 0
  misc_feature: MA Experiment 108464 PARAMETER Experiment Name: At_Germinating_Seeds_cDNA_P Parameter: Tissue Value: Germinating Seeds
  misc_feature: MA Experiment ID: 108488 Result: Up-regulated in Transcription
  misc_feature: MA Experiment ID: 108561 Result: Down-regulated in Transcription
  misc_feature: MA Experiment 108561 PARAMETER Experiment Name: At_100uM_ABA_cDNA_P Parameter: Timepoint (hr) Value: 6
  misc_feature: MA Experiment 108561 PARAMETER Experiment Name: At_100uM_ABA_cDNA_P Parameter: Tissue Value: Aerial
  misc_feature: MA Experiment 108561 PARAMETER Experiment Name: At_100uM_ABA_cDNA_P Parameter: Treatment Value: 100uM ABA vs. No Treatment
  misc_feature: MA Experiment ID: 108573 Result: Down-regulated in Transcription
  misc_feature: MA Experiment 108573 PARAMETER Experiment Name: At_Drought_cDNA_P Parameter: Timepoint (hr) Value: 6
  misc_feature: MA Experiment 108573 PARAMETER Experiment Name: At_Drought_cDNA_P Parameter: Tissue Value: Aerial
  misc_feature: MA Experiment 108573 PARAMETER Experiment Name: At_Drought_cDNA_P Parameter: Treatment Value: Drought vs. No Drought
  misc_feature: MA Experiment ID: 20000184 Result: Up-regulated in Transcription
  misc_feature: MA Experiment 20000184 PARAMETER Experiment Name: At_Shoots__P Parameter: Age (day) Value: 7
  misc_feature: MA Experiment 20000184 PARAMETER Experiment Name: At_Shoots__P Parameter: Tissue Value: Shoots vs. Whole Plant
  misc_feature: MA Experiment ID: 20000437 Result: Down-regulated in Transcription
  misc_feature: MA Experiment 20000437 PARAMETER Experiment Name: At_Drought_P Parameter: Age (day) Value: 8
  misc_feature: MA Experiment 20000437 PARAMETER Experiment Name: At_Drought_P Parameter: Organism Value: A. thaliana
  misc_feature: MA Experiment 20000437 PARAMETER Experiment Name: At_Drought_P Parameter: Plant Line Value: WS
  misc_feature: MA Experiment 20000437 PARAMETER Experiment Name: At_Drought_P Parameter: Timepoint (hr) Value: 24
  misc_feature: MA Experiment 20000437 PARAMETER Experiment Name: At_Drought_P Parameter: Tissue Value: Whole Plant
  misc_feature: MA Experiment 20000437 PARAMETER Experiment Name: At_Drought_P Parameter: Treatment Value: Drought vs. No Drought
  misc_feature: MA Experiment ID: 20000794 Result: Down-regulated in Transcription
  misc_feature: MA Experiment 20000794 PARAMETER Experiment Name: At_Petals_P Parameter: Age (day) Value: 23-25 days
  misc_feature: MA Experiment 20000794 PARAMETER Experiment Name: At_Petals_P Parameter: Plant Line Value: WS
  misc_feature: MA Experiment 20000794 PARAMETER Experiment Name: At_Petals_P Parameter: Tissue Value: Petals vs. Whole plant
  misc_feature: MA Experiment ID: 20001558 Result: Up-regulated in Transcription
  misc_feature: MA Experiment 20001558 PARAMETER Experiment Name: At_Drought_Soil_Dry_P Parameter: Age (day) Value: 27
  misc_feature: MA Experiment 20001558 PARAMETER Experiment Name: At_Drought_Soil_Dry_P Parameter: Organism Value: A. thaliana
  misc_feature: MA Experiment 20001558 PARAMETER Experiment Name: At_Drought_Soil_Dry_P Parameter: Plant Line Value: WS
  misc_feature: MA Experiment 20001558 PARAMETER Experiment Name: At_Drought_Soil_Dry_P Parameter: Post Timepoint (hr) Value: 6
  misc_feature: MA Experiment 20001558 PARAMETER Experiment Name: At_Drought_Soil_Dry_P Parameter: Post-Treatment Value: Re-Water vs. No Drought
  misc_feature: MA Experiment 20001558 PARAMETER Experiment Name: At_Drought_Soil_Dry_P Parameter: Timepoint (day) Value: 13
  misc_feature: MA Experiment 20001558 PARAMETER Experiment Name: At_Drought_Soil_Dry_P Parameter: Treatment Value: Drought vs. No Drought
  misc_feature: MA Experiment ID: 20001560 Result: Up-regulated in Transcription
  misc_feature: MA Experiment 20001560 PARAMETER Experiment Name: At_Drought_Soil_Dry_P Parameter: Age (day) Value: 28
  misc_feature: MA Experiment 20001560 PARAMETER Experiment Name: At_Drought_Soil_Dry_P Parameter: Organism Value: A. thaliana
  misc_feature: MA Experiment 20001560 PARAMETER Experiment Name: At_Drought_Soil_Dry_P Parameter: Plant Line Value: WS
  misc_feature: MA Experiment 20001560 PARAMETER Experiment Name: At_Drought_Soil_Dry_P Parameter: Post Timepoint (hr) Value: None
  misc_feature: MA Experiment 20001560 PARAMETER Experiment Name: At_Drought_Soil_Dry_P Parameter: Post-Treatment Value: None
  misc_feature: MA Experiment 20001560 PARAMETER Experiment Name: At_Drought_Soil_Dry_P Parameter: Timepoint (day) Value: 14
  misc_feature: MA Experiment 20001560 PARAMETER Experiment Name: At_Drought_Soil_Dry_P Parameter: Treatment Value: Drought vs. No Drought
  misc_feature: MA Experiment ID: 20001757 Result: Up-regulated in Transcription
  misc_feature: MA Experiment 20001757 PARAMETER Experiment Name: At_50mM_NH4NO3_L-to-H_P Parameter: Timepoint (hr) Value: 6
  misc_feature: MA Experiment 20001757 PARAMETER Experiment Name: At_50mM_NH4NO3_L-to-H_P Parameter: Tissue Value: Leaf
  misc_feature: MA Experiment 20001757 PARAMETER Experiment Name: At_50mM_NH4NO3_L-to-H_P Parameter: Treatment Value: 50mM NH4NO3 vs 100mM Mannitol
atggtcttcacctcctctggaaaaccatatcagtttatacattattgttctaaatgtatgtacaaatataaaattaaagaaaaccctattgctcccctttgctcaagctcagtgcctctttgcagcgaaagctcaaccaacaagacgatgattatctcagagaacaatcgcagagagatctgcaaataccttttcaaagagggagtatgctttgctaagaaggatttcaatctcccaaagcatccgttgattgatgtaccaaacctgcaagtgattaagctcatgcagagtttcaagtccaaggagtacgttagggagacatttgcgtggatgcattattattggtttctgactaatgaaggaattgagttcttgagaacttatcttaaccttccttccgatgttgtccctgctactttgaagaagtctgctaagcccggtggtcgtccctttggtggcccacctggtgatcgccaaagaggaccacctcgctctgatggagaccgtcccagatttggtgaccgtgatggataccgtggaggcccacgtggtggtgatgagaagggtggagctccagctgatttccagccgtctttccaaggaggtggtggtaggcctggttttggccgtggtgcaggcggttacagtgcagcagcaccatctggttcagggttcccttgaaaaatttgttgtcatattgcgacgatggaaggacagttttgttttttgttctagttctgtttgtgtaatgcaaatctggaatctataatctatctattaccttcaccttggtttaaacgaacaaatcctgtagtttcaggattagtgtcaaaattcatgtttc

SEQ ID NO: 104270 - protein, 226 aa, Arabidopsis thaliana
  peptide (1)..(226): Ceres Seq. ID no. 13614671
  misc_feature (52)..(147): Pfam Name: Plectin/S10 domain Pfam Description: Plectin/S10 domain
  misc_feature (50)..(226): Homolog of NCBI NO: 15235985 NR Description: 40S ribosomal protein S10 (RPS10A) [Arabidopsis
  misc_feature (50)..(226): Homolog of NCBI NO: 15237217 NR Description: 40S ribosomal protein S10 (RPS10C) [Arabidopsis >gi|17528966|gb|AAL38693.1| unknown protein [Arabidopsis >gi|21617950|gb|AAM67000.1| putative ribosomal protein S10
  misc_feature (50)..(226): Homolog of NCBI NO: 20139798 NR Description: 40S ribosomal protein S10-3 contains similarity to 40S ribosomal protein S10~gene_id:F6N7.14
  misc_feature (50)..(223): Homolog of NCBI NO: 34897532 NR Description: OSJNBa0042L16.3 [Oryza sativa (japonica
  misc_feature (50)..(223): Homolog of NCBI NO: 20140213 NR Description: 40S ribosomal protein S10
  misc_feature (50)..(226): Homolog of NCBI NO: 15238099 NR Description: expressed protein [Arabidopsis thaliana]
  misc_feature (50)..(221): Homolog of NCBI NO: 34905824 NR Description: putative ribosomal protein S10 [Oryza sativa
  misc_feature (50)..(220): Homolog of NCBI NO: 40642980 NR Description: ribosomal protein S10 [Crassostrea gigas]
  misc_feature (50)..(212): Homolog of NCBI NO: 24266976 NR Description: ribosomal protein S10 [Branchiostoma belcheri]
  misc_feature (50)..(212): Homolog of NCBI NO: 28200289 NR Description: ribosomal protein S10 [Branchiostoma belcheri
MVFTSSGKPYQFIHYCSKCMYKYKIKENPIAPLCSSSVPLCSESSTNKTMIISENNRREICKYLFKEGVCFAKKDFNLPKHPLIDVPNLQVIKLMQSFKSKEYVRETFAWMHYYWFLTNEGIEFLRTYLNLPSDVVPATLKKSAKPGGRPFGGPPGDRQRGPPRSDGDRPRFGDRDGYRGGPRGGDEKGGAPADFQPSFQGGGGRPGFGRGAGGYSAAAPSGSGFP

SEQ ID NO: 104271 - protein, 207 aa, Arabidopsis thaliana
  peptide (1)..(207): Ceres Seq. ID no. 13614672
  misc_feature (33)..(128): Pfam Name: Plectin/S10 domain Pfam Description: Plectin/S10 domain
  misc_feature (31)..(207): Homolog of NCBI NO: 15235985 NR Description: 40S ribosomal protein S10 (RPS10A) [Arabidopsis
  misc_feature (31)..(207): Homolog of NCBI NO: 15237217 NR Description: 40S ribosomal protein S10 (RPS10C) [Arabidopsis >gi|17528966|gb|AAL38693.1| unknown protein [Arabidopsis >gi|21617950|gb|AAM67000.1| putative ribosomal protein S10
  misc_feature (31)..(207): Homolog of NCBI NO: 20139798 NR Description: 40S ribosomal protein S10-3 contains similarity to 40S ribosomal protein S10~gene_id:F6N7.14
  misc_feature (31)..(204): Homolog of NCBI NO: 34897532 NR Description: OSJNBa0042L16.3 [Oryza sativa (japonica
  misc_feature (31)..(204): Homolog of NCBI NO: 20140213 NR Description: 40S ribosomal protein S10
  misc_feature (31)..(207): Homolog of NCBI NO: 15238099 NR Description: expressed protein [Arabidopsis thaliana]
  misc_feature (31)..(202): Homolog of NCBI NO: 34905824 NR Description: putative ribosomal protein S10 [Oryza sativa
  misc_feature (31)..(201): Homolog of NCBI NO: 40642980 NR Description: ribosomal protein S10 [Crassostrea gigas]
  misc_feature (31)..(193): Homolog of NCBI NO: 24266976 NR Description: ribosomal protein S10 [Branchiostoma belcheri]
  misc_feature (31)..(193): Homolog of NCBI NO: 28200289 NR Description: ribosomal protein S10 [Branchiostoma belcheri
MYKYKIKENPIAPLCSSSVPLCSESSTNKTMIISENNRREICKYLFKEGVCFAKKDFNLPKHPLIDVPNLQVIKLMQSFKSKEYVRETFAWMHYYWFLTNEGIEFLRTYLNLPSDVVPATLKKSAKPGGRPFGGPPGDRQRGPPRSDGDRPRFGDRDGYRGGPRGGDEKGGAPADFQPSFQGGGGRPGFGRGAGGYSAAAPSGSGFP

SEQ ID NO: 104272 - protein, 177 aa, Arabidopsis thaliana; identical to SEQ ID NO: 28487
  peptide (1)..(177): Ceres Seq. ID no. 13614673
  misc_feature (3)..(98): Pfam Name: Plectin/S10 domain Pfam Description: Plectin/S10 domain
  misc_feature (1)..(177): Homolog of NCBI NO: 15235985 NR Description: 40S ribosomal protein S10 (RPS10A) [Arabidopsis
  misc_feature (1)..(177): Homolog of NCBI NO: 15237217 NR Description: 40S ribosomal protein S10 (RPS10C) [Arabidopsis >gi|17528966|gb|AAL38693.1| unknown protein [Arabidopsis >gi|21617950|gb|AAM67000.1| putative ribosomal protein S10
  misc_feature (1)..(177): Homolog of NCBI NO: 20139798 NR Description: 40S ribosomal protein S10-3 contains similarity to 40S ribosomal protein S10~gene_id:F6N7.14
  misc_feature (1)..(174): Homolog of NCBI NO: 34897532 NR Description: OSJNBa0042L16.3 [Oryza sativa (japonica
  misc_feature (1)..(174): Homolog of NCBI NO: 20140213 NR Description: 40S ribosomal protein S10
  misc_feature (1)..(177): Homolog of NCBI NO: 15238099 NR Description: expressed protein [Arabidopsis thaliana]
  misc_feature (1)..(172): Homolog of NCBI NO: 34905824 NR Description: putative ribosomal protein S10 [Oryza sativa
  misc_feature (1)..(171): Homolog of NCBI NO: 40642980 NR Description: ribosomal protein S10 [Crassostrea gigas]
  misc_feature (1)..(163): Homolog of NCBI NO: 24266976 NR Description: ribosomal protein S10 [Branchiostoma belcheri]
  misc_feature (1)..(163): Homolog of NCBI NO: 28200289 NR Description: ribosomal protein S10 [Branchiostoma belcheri

SEQ ID NO: 104273 - DNA, 906 bp, Arabidopsis thaliana
  misc_feature (1)..(906): Ceres Seq. ID no. 13614682
  misc_feature: MA Experiment ID: 108462 Result: Up-regulated in Transcription
  misc_feature: MA Experiment 108462 PARAMETER Experiment Name: At_Germinating_Seeds_cDNA_P Parameter: Age (day) Value: 2 vs. 0
  misc_feature: MA Experiment 108462 PARAMETER Experiment Name: At_Germinating_Seeds_cDNA_P Parameter: Tissue Value: Germinating Seeds
  misc_feature: MA Experiment ID: 108463 Result: Up-regulated in Transcription
  misc_feature: MA Experiment 108463 PARAMETER Experiment Name: At_Germinating_Seeds_cDNA_P Parameter: Age (day) Value: 3 vs. 0
  misc_feature: MA Experiment 108463 PARAMETER Experiment Name: At_Germinating_Seeds_cDNA_P Parameter: Tissue Value: Germinating Seeds
  misc_feature: MA Experiment ID: 108464 Result: Up-regulated in Transcription
  misc_feature: MA Experiment 108464 PARAMETER Experiment Name: At_Germinating_Seeds_cDNA_P Parameter: Age (day) Value: 4 vs. 0
  misc_feature: MA Experiment 108464 PARAMETER Experiment Name: At_Germinating_Seeds_cDNA_P Parameter: Tissue Value: Germinating Seeds
  misc_feature: MA Experiment ID: 108579 Result: Down-regulated in Transcription
  misc_feature: MA Experiment 108579 PARAMETER Experiment Name: At_4deg_Cold_cDNA_P Parameter: Temperature (deg C) Value: 4 vs. 22
  misc_feature: MA Experiment 108579 PARAMETER Experiment Name: At_4deg_Cold_cDNA_P Parameter: Timepoint (hr) Value: 6
  misc_feature: MA Experiment 108579 PARAMETER Experiment Name: At_4deg_Cold_cDNA_P Parameter: Tissue Value: Aerial
  misc_feature: MA Experiment ID: 108585 Result: Down-regulated in Transcription
  misc_feature: MA Experiment 108585 PARAMETER Experiment Name: At_5mM_NaNP_cDNA_P Parameter: Timepoint (hr) Value: 6
  misc_feature: MA Experiment 108585 PARAMETER Experiment Name: At_5mM_NaNP_cDNA_P Parameter: Tissue Value: Aerial
  misc_feature: MA Experiment 108585 PARAMETER Experiment Name: At_5mM_NaNP_cDNA_P Parameter: Treatment Value: null
  misc_feature: MA Experiment ID: 20000180 Result: Up-regulated in Transcription
  misc_feature: MA Experiment 20000180 PARAMETER Experiment Name: At_Germinating_Seeds_P Parameter: Age (hr) Value: 24 vs. 0
  misc_feature: MA Experiment 20000180 PARAMETER Experiment Name: At_Germinating_Seeds_P Parameter: Tissue Value: Germinating Seeds
  misc_feature: MA Experiment ID: 20000185 Result: Down-regulated in Transcription
  misc_feature: MA Experiment 20000185 PARAMETER Experiment Name: At_Roots__P Parameter: Age (day) Value: 7 vs. 21
  misc_feature: MA Experiment 20000185 PARAMETER Experiment Name: At_Roots__P Parameter: Organism Value: A. thaliana
  misc_feature: MA Experiment 20000185 PARAMETER Experiment Name: At_Roots__P Parameter: Tissue Value: Roots vs. Whole Plant
  misc_feature: MA Experiment ID: 20000224 Result: Down-regulated in Transcription
  misc_feature: MA Experiment ID: 20000439 Result: Down-regulated in Transcription
  misc_feature: MA Experiment 20000439 PARAMETER Experiment Name: At_Roots__P Parameter: Age (day) Value: 14 vs. 21
  misc_feature: MA Experiment 20000439 PARAMETER Experiment Name: At_Roots__P Parameter: Organism Value: A. thaliana
  misc_feature: MA Experiment 20000439 PARAMETER Experiment Name: At_Roots__P Parameter: Tissue Value: Roots vs. Whole Plant
  misc_feature: MA Experiment ID: 20000794 Result: Down-regulated in Transcription
  misc_feature: MA Experiment 20000794 PARAMETER Experiment Name: At_Petals_P Parameter: Age (day) Value: 23-25 days
  misc_feature: MA Experiment 20000794 PARAMETER Experiment Name: At_Petals_P Parameter: Plant Line Value: WS
  misc_feature: MA Experiment 20000794 PARAMETER Experiment Name: At_Petals_P Parameter: Tissue Value: Petals vs. Whole plant
  misc_feature: MA Experiment ID: 20001451 Result: Up-regulated in Transcription
  misc_feature: MA Experiment 20001451 PARAMETER Experiment Name: At_Far-red-induction_P Parameter: Age (day) Value: 7
  misc_feature: MA Experiment 20001451 PARAMETER Experiment Name: At_Far-red-induction_P Parameter: Light Value: Far-red vs. White
  misc_feature: MA Experiment 20001451 PARAMETER Experiment Name: At_Far-red-induction_P Parameter: Organism Value: A. thaliana
  misc_feature: MA Experiment 20001451 PARAMETER Experiment Name: At_Far-red-induction_P Parameter: Plant Line Value: Columbia
  misc_feature: MA Experiment 20001451 PARAMETER Experiment Name: At_Far-red-induction_P Parameter: Timepoint (hr) Value: 24
  misc_feature: MA Experiment 20001451 PARAMETER Experiment Name: At_Far-red-induction_P Parameter: Tissue Value: Whole Plant
  misc_feature: MA Experiment ID: 20001905 Result: Down-regulated in Transcription
  misc_feature: MA Experiment 20001905 PARAMETER Experiment Name: At_Drought_Reproduction_P Parameter: Age (day) Value: 40
  misc_feature: MA Experiment 20001905 PARAMETER Experiment Name: At_Drought_Reproduction_P Parameter: Organism Value: A. thaliana
  misc_feature: MA Experiment 20001905 PARAMETER Experiment Name: At_Drought_Reproduction_P Parameter: Plant Line Value: WS
  misc_feature: MA Experiment 20001905 PARAMETER Experiment Name: At_Drought_Reproduction_P Parameter: Timepoint (day) Value: 10
  misc_feature: MA Experiment 20001905 PARAMETER Experiment Name: At_Drought_Reproduction_P Parameter: Tissue Value: Rosettes
  misc_feature: MA Experiment 20001905 PARAMETER Experiment Name: At_Drought_Reproduction_P Parameter: Treatment Value: Drought vs. No Drought
actcttactctgttctcgctacagaatctcctgggaaaaaaaaaaaagaaacttgatccacccgaattccccaaatcttcacaatttctggaaactctctcgatcgtgaagcagaaaagtgaggttccaaatgggttctgtttcgggtcaaacccgaattacaacgatgaacctctcgctctcaacagcagagaagaaccctaatttccgctcgtcgcttctcaattctaagaacgcaatttcagatactttaggggtctcttccaaatgcagtacattcctcaggggtcaatttcaaagaatacatttttcttggctacaacacactcgacctttgagaaaacgaacagtatttggtcacgtgagctgcgtcatgccgttaacggaagagaatgtggagagagtgttagacgaagtacgaccatctctaatggccgacggaggaaacgtggcgttgcacgaaatcgacggacttgtggtggttttaaagctacaaggagcttgtggttcgtgtcctagctcatcaatgacgttgaagatgggaatcgagagtcgtcttcgagacaagattccagagatcatgtccgttgagcagtttcttgaatccgagacaggaggtttagagctgaacgatgagaacattgagaaggttctctctgagttaaggccgtacctatccggtactggaggtggggggcttgagttagttgagattgatggttacgtggtcaaggttcgactcactggaccagctgctggagtcatgactgttcgtgtcgcgttgactcaaaaactgagggaaacaattccttctataggtgcagtccagcttctagagtgacattaacctttttattttgtaacttatatacaaggcctatttttgattcaatatattttatttcc

SEQ ID NO: 104274 - protein, 236 aa, Arabidopsis thaliana; identical to SEQ ID NO: 36829
  peptide (1)..(236): Ceres Seq. ID no. 13614683
  misc_feature (89)..(156): Pfam Name: NifU-like domain Pfam Description: NifU-like domain
  misc_feature (1)..(236): Homolog of NCBI NO: 18416645 NR Description: nitrogen fixation protein, putative (NifU) thaliana] >gi|28207820|emb|CAD55560.1| NFU3 protein [Arabidopsis
  misc_feature (1)..(236): Homolog of NCBI NO: 21554503 NR Description: nitrogen fixation like protein [Arabidopsis
  misc_feature (13)..(236): Homolog of NCBI NO: 7485833 NR Description: hypothetical protein F20B18.20 - Arabidopsis >gi|4538920|emb|CAB39656.1| nitrogen fixation like protein thaliana] >gi|7269442|emb|CAB79446.1| nitrogen fixation like
  misc_feature (23)..(235): Homolog of NCBI NO: 18423084 NR Description: expressed protein [Arabidopsis thaliana] unknown protein [Arabidopsis thaliana] AT5g49940/K9P8_8 [Arabidopsis thaliana]
  misc_feature (65)..(235): Homolog of NCBI NO: 30698492 NR Description: NifU1 [Oryza sativa (japonica cultivar-group)]
  misc_feature (23)..(230): Homolog of NCBI NO: 8777425 NR Description: gene_id:K9P8.8~pir||T09896~strong similarity to
  misc_feature (70)..(157): Homolog of NCBI NO: 22298836 NR Description: ORF_ID:tsl1293~similar to NifU protein
  misc_feature (82)..(157): Homolog of NCBI NO: 16332125 NR Description: NifU protein [Synechocystis sp. PCC 6803]
  misc_feature (81)..(157): Homolog of NCBI NO: 37522446 NR Description: gsl2877 [Gloeobacter violaceus]
  misc_feature (89)..(154): Homolog of NCBI NO: 7387938 NR Description: NITROGEN FIXATION PROTEIN NIFU

SEQ ID NO: 104275 - protein, 224 aa, Arabidopsis thaliana; identical to SEQ ID NO: 36830
  peptide (1)..(224): Ceres Seq. ID no. 13614684
  misc_feature (77)..(144): Pfam Name: NifU-like domain Pfam Description: NifU-like domain
  misc_feature (1)..(224): Homolog of NCBI NO: 18416645 NR Description: nitrogen fixation protein, putative (NifU) thaliana] >gi|28207820|emb|CAD55560.1| NFU3 protein [Arabidopsis
  misc_feature (1)..(224): Homolog of NCBI NO: 21554503 NR Description: nitrogen fixation like protein [Arabidopsis
  misc_feature (1)..(224): Homolog of NCBI NO: 7485833 NR Description: hypothetical protein F20B18.20 - Arabidopsis >gi|4538920|emb|CAB39656.1| nitrogen fixation like protein thaliana] >gi|7269442|emb|CAB79446.1| nitrogen fixation like
  misc_feature (11)..(223): Homolog of NCBI NO: 18423084 NR Description: expressed protein [Arabidopsis thaliana] unknown protein [Arabidopsis thaliana] AT5g49940/K9P8_8 [Arabidopsis thaliana]
  misc_feature (53)..(223): Homolog of NCBI NO: 30698492 NR Description: NifU1 [Oryza sativa (japonica cultivar-group)]
  misc_feature (11)..(218): Homolog of NCBI NO: 8777425 NR Description: gene_id:K9P8.8~pir||T09896~strong similarity to
  misc_feature (58)..(145): Homolog of NCBI NO: 22298836 NR Description: ORF_ID:tsl1293~similar to NifU protein
  misc_feature (70)..(145): Homolog of NCBI NO: 16332125 NR Description: NifU protein [Synechocystis sp. PCC 6803]
  misc_feature (69)..(145): Homolog of NCBI NO: 37522446 NR Description: gsl2877 [Gloeobacter violaceus]
  misc_feature (77)..(142): Homolog of NCBI NO: 7387938 NR Description: NITROGEN FIXATION PROTEIN NIFU

SEQ ID NO: 104276 - protein, 155 aa, Arabidopsis thaliana; identical to SEQ ID NO: 36831
  peptide (1)..(155): Ceres Seq. ID no. 13614685
  misc_feature (8)..(75): Pfam Name: NifU-like domain Pfam Description: NifU-like domain
  misc_feature (1)..(155): Homolog of NCBI NO: 18416645 NR Description: nitrogen fixation protein, putative (NifU) thaliana] >gi|28207820|emb|CAD55560.1| NFU3 protein [Arabidopsis
  misc_feature (1)..(155): Homolog of NCBI NO: 21554503 NR Description: nitrogen fixation like protein [Arabidopsis
  misc_feature (1)..(155): Homolog of NCBI NO: 7485833 NR Description: hypothetical protein F20B18.20 - Arabidopsis >gi|4538920|emb|CAB39656.1| nitrogen fixation like protein thaliana] >gi|7269442|emb|CAB79446.1| nitrogen fixation like
  misc_feature (1)..(154): Homolog of NCBI NO: 18423084 NR Description: expressed protein [Arabidopsis thaliana] unknown protein [Arabidopsis thaliana] AT5g49940/K9P8_8 [Arabidopsis thaliana]
  misc_feature (1)..(154): Homolog of NCBI NO: 30698492 NR Description: NifU1 [Oryza sativa (japonica cultivar-group)]
  misc_feature (1)..(149): Homolog of NCBI NO: 8777425 NR Description: gene_id:K9P8.8~pir||T09896~strong similarity to
  misc_feature (1)..(76): Homolog of NCBI NO: 22298836 NR Description: ORF_ID:tsl1293~similar to NifU protein
  misc_feature (1)..(76): Homolog of NCBI NO: 16332125 NR Description: NifU protein [Synechocystis sp. PCC 6803]
  misc_feature (1)..(76): Homolog of NCBI NO: 37522446 NR Description: gsl2877 [Gloeobacter violaceus]
  misc_feature (8)..(73): Homolog of NCBI NO: 7387938 NR Description: NITROGEN FIXATION PROTEIN NIFU

SEQ ID NO: 104277 - DNA, 1811 bp, Arabidopsis thaliana
  misc_feature (1)..(1811): Ceres Seq. ID no. 13614686
  misc_feature: MA Experiment ID: 108461 Result: Down-regulated in Transcription
  misc_feature: MA Experiment 108461 PARAMETER Experiment Name: At_Germinating_Seeds_cDNA_P Parameter: Age (day) Value: 1 vs. 0
  misc_feature: MA Experiment 108461 PARAMETER Experiment Name: At_Germinating_Seeds_cDNA_P Parameter: Tissue Value: Germinating Seeds
  misc_feature: MA Experiment ID: 108462 Result: Down-regulated in Transcription
  misc_feature: MA Experiment 108462 PARAMETER Experiment Name: At_Germinating_Seeds_cDNA_P Parameter: Age (day) Value: 2 vs. 0
  misc_feature: MA Experiment 108462 PARAMETER Experiment Name: At_Germinating_Seeds_cDNA_P Parameter: Tissue Value: Germinating Seeds
  misc_feature: MA Experiment ID: 108463 Result: Down-regulated in Transcription
  misc_feature: MA Experiment 108463 PARAMETER Experiment Name: At_Germinating_Seeds_cDNA_P Parameter: Age (day) Value: 3 vs. 0
  misc_feature: MA Experiment 108463 PARAMETER Experiment Name: At_Germinating_Seeds_cDNA_P Parameter: Tissue Value: Germinating Seeds
  misc_feature: MA Experiment ID: 108464 Result: Down-regulated in Transcription
  misc_feature: MA Experiment 108464 PARAMETER Experiment Name: At_Germinating_Seeds_cDNA_P Parameter: Age (day) Value: 4 vs. 0
  misc_feature: MA Experiment 108464 PARAMETER Experiment Name: At_Germinating_Seeds_cDNA_P Parameter: Tissue Value: Germinating Seeds
  misc_feature: MA Experiment ID: 20000180 Result: Down-regulated in Transcription
  misc_feature: MA Experiment 20000180 PARAMETER Experiment Name: At_Germinating_Seeds_P Parameter: Age (hr) Value: 24 vs. 0
  misc_feature: MA Experiment 20000180 PARAMETER Experiment Name: At_Germinating_Seeds_P Parameter: Tissue Value: Germinating Seeds
  misc_feature: MA Experiment ID: 20001557 Result: Up-regulated in Transcription
  misc_feature: MA Experiment 20001557 PARAMETER Experiment Name: At_Drought_Soil_Dry_P Parameter: Age (day) Value: 27
  misc_feature: MA Experiment 20001557 PARAMETER Experiment Name: At_Drought_Soil_Dry_P Parameter: Organism Value: A. thaliana
  misc_feature: MA Experiment 20001557 PARAMETER Experiment Name: At_Drought_Soil_Dry_P Parameter: Plant Line Value: WS
  misc_feature: MA Experiment 20001557 PARAMETER Experiment Name: At_Drought_Soil_Dry_P Parameter: Post Timepoint (hr) Value: 3
  misc_feature: MA Experiment 20001557 PARAMETER Experiment Name: At_Drought_Soil_Dry_P Parameter: Post-Treatment Value: Re-Water vs. No Drought
  misc_feature: MA Experiment 20001557 PARAMETER Experiment Name: At_Drought_Soil_Dry_P Parameter: Timepoint (day) Value: 13
  misc_feature: MA Experiment 20001557 PARAMETER Experiment Name: At_Drought_Soil_Dry_P Parameter: Treatment Value: Drought vs. No Drought
  misc_feature: MA Experiment ID: 20001905 Result: Up-regulated in Transcription
  misc_feature: MA Experiment 20001905 PARAMETER Experiment Name: At_Drought_Reproduction_P Parameter: Age (day) Value: 40
  misc_feature: MA Experiment 20001905 PARAMETER Experiment Name: At_Drought_Reproduction_P Parameter: Organism Value: A. thaliana
  misc_feature: MA Experiment 20001905 PARAMETER Experiment Name: At_Drought_Reproduction_P Parameter: Plant Line Value: WS
  misc_feature: MA Experiment 20001905 PARAMETER Experiment Name: At_Drought_Reproduction_P Parameter: Timepoint (day) Value: 10
  misc_feature: MA Experiment 20001905 PARAMETER Experiment Name: At_Drought_Reproduction_P Parameter: Tissue Value: Rosettes
  misc_feature: MA Experiment 20001905 PARAMETER Experiment Name: At_Drought_Reproduction_P Parameter: Treatment Value: Drought vs. No Drought
  misc_feature: MA Experiment ID: 20001911 Result: Up-regulated in Transcription
  misc_feature: MA Experiment 20001911 PARAMETER Experiment Name: At_Drought_Reproduction_P Parameter: Age (day) Value: 40
  misc_feature: MA Experiment 20001911 PARAMETER Experiment Name: At_Drought_Reproduction_P Parameter: Organism Value: A. thaliana
  misc_feature: MA Experiment 20001911 PARAMETER Experiment Name: At_Drought_Reproduction_P Parameter: Plant Line Value: WS
  misc_feature: MA Experiment 20001911 PARAMETER Experiment Name: At_Drought_Reproduction_P Parameter: Timepoint (day) Value: 10
  misc_feature: MA Experiment 20001911 PARAMETER Experiment Name: At_Drought_Reproduction_P Parameter: Tissue Value: Flowers
  misc_feature: MA Experiment 20001911 PARAMETER Experiment Name: At_Drought_Reproduction_P Parameter: Treatment Value: Drought vs. No Drought
ctctttagctatcttttttgtgttaccggttcaaatggccgccgtcgcagattccgttgagaacaacggttccataaacctccctgagaatgaaaaccttataccggcgggattcagtgccgccgcattgcttgacgaaaactctggcgctttccctgaattgaatcagcccgatagcttagctgctgctgagactaccttccccgatacgaacgattccgcggaggagaggtggccaggttggcctggtgattgcgtgtttcgtatgatcgttccggtgactaaagtcggagctattattggacgcaaaggtgactttataaagaagatgtgtgaggagactcgtgctcgtatcaaagtccttgatggtcctgttaatactcccgatcgcatcgtgttaatatctggtaaggaagaaccagaggcctacatgtcaccggcaatggacgcagtgttgagggtgtttagacgtgtttcagggttgcctgataatgatgatgatgatgttcaaaacgctggaagtgtcttctcttcagtgcgtttattagttgcttcaacgcaggcgattaatttgattggaaaacaaggatctttgattaagtctatagtagagaactctggtgcatcagttcgtattttatcagaagaggaaacaccgttttatgctgcacaggatgagaggatagtggatttgcaaggggaagctttaaagattcttaaagcattagaagccattgttggacaccttaggagatttttagttgaccatactgttgtccctctcttcgagaagcaatatctagctagggtctctcaaactcgccaggaagaaccgttagctgaaagcaagtcatctctgcatactatttcgtcaaatctaatggagcctgatttctccctcttagcacggagggaacctttgtttctggagcgcgattctcgggtggactcacgtgttcagccttcgggagtttctatctacagtcaggatcctgtactgtctgccagacactccccaggtcttgctcgggtttcttctgcttttgtgacacaggtatctcaaacgatgcaaataccattctcctatgcagaggatattattggtgtagaaggagctaatatagcctatatccgtcgaagaagcggagctaccataaccattaaagagagtccgcatcctgatcaaatcacagtggaaatcaaaggcacaacttctcaagtacaaactgctgagcaactaattcaagagttcatcatcaatcacaaggaaccagtttcggtatcagggggatatgccagaatcgactctggatatgtacctgcatatcctcctcagctaagtaaccgtcaagagccgctcccgagcacctacatgggcacagagccggtgcagtacagaccaacagcatactctcagctggggggtccttctacctacacaccgaccctgactgggcaaacttatggttcggaatatagaccagcttctgatgttggtggctacagcagttataatctttgaattggttgctgtgtttaagtttatttgcagattaatttctctttagagaaaggctcatttataatataatagagagggaaaaggaacaagttctagagagccaatgtagttgttggaatgtgtaatgtaaatctaggtgccctttttttttttttttttcatacctcgatatatgtcacactacgtttctggtcaaataagaacatgttttttctttcttttttgtatgaatttgtttatcagaagtcagaatgattcagttttaagaaatttttagttaacgttttac

SEQ ID NO: 104278 - protein, 506 aa, Arabidopsis thaliana; identical to SEQ ID NO: 22426
  peptide (1)..(506): Ceres Seq. ID no. 13614687
  misc_feature (180)..(233): Pfam Name: KH domain Pfam Description: KH domain
  misc_feature (12)..(506): Homolog of NCBI NO: 15236094 NR Description: KH domain protein [Arabidopsis thaliana]
  misc_feature (35)..(493): Homolog of NCBI NO: 37536904 NR Description: putative nucleic acid binding protein [Oryza
  misc_feature (45)..(444): Homolog of NCBI NO: 16924113 NR Description: putative RNA binding protein [Oryza sativa]
  misc_feature (46)..(440): Homolog of NCBI NO: 15229321 NR Description: KH domain protein [Arabidopsis thaliana]
  misc_feature (70)..(213): Homolog of NCBI NO: 37534332 NR Description: unknown protein [Oryza sativa (japonica
  misc_feature (339)..(456): Homolog of NCBI NO: 37534332 NR Description: unknown protein [Oryza sativa (japonica
  misc_feature (198)..(263): Homolog of NCBI NO: 37534332 NR Description: unknown protein [Oryza sativa (japonica
  misc_feature (46)..(422): Homolog of NCBI NO: 8809595 NR Description: RNA-binding protein-like [Arabidopsis thaliana]
  misc_feature (46)..(423): Homolog of NCBI NO: 30696273 NR Description: KH domain protein [Arabidopsis thaliana]
  misc_feature (147)..(251): Homolog of NCBI NO: 37535668 NR Description: putative RNA-binding protein [Oryza sativa

SEQ ID NO: 104279 - protein, 495 aa, Arabidopsis thaliana; identical to SEQ ID NO: 22427
  peptide (1)..(495): Ceres Seq. ID no. 13614688
  misc_feature (169)..(222): Pfam Name: KH domain Pfam Description: KH domain
  misc_feature (1)..(495): Homolog of NCBI NO: 15236094 NR Description: KH domain protein [Arabidopsis thaliana]
  misc_feature (24)..(482): Homolog of NCBI NO: 37536904 NR Description: putative nucleic acid binding protein [Oryza
  misc_feature (34)..(433): Homolog of NCBI NO: 16924113 NR Description: putative RNA binding protein [Oryza sativa]
  misc_feature (35)..(429): Homolog of NCBI NO: 15229321 NR Description: KH domain protein [Arabidopsis thaliana]
  misc_feature (59)..(202): Homolog of NCBI NO: 37534332 NR Description: unknown protein [Oryza sativa (japonica
  misc_feature (328)..(445): Homolog of NCBI NO: 37534332 NR Description: unknown protein [Oryza sativa (japonica
  misc_feature (187)..(252): Homolog of NCBI NO: 37534332 NR Description: unknown protein [Oryza sativa (japonica
  misc_feature (35)..(411): Homolog of NCBI NO: 8809595 NR Description: RNA-binding protein-like [Arabidopsis thaliana]
  misc_feature (35)..(412): Homolog of NCBI NO: 30696273 NR Description: KH domain protein [Arabidopsis thaliana]
  misc_feature (136)..(240): Homolog of NCBI NO: 37535668 NR Description: putative RNA-binding protein [Oryza sativa

SEQ ID NO: 104280 - protein, 418 aa, Arabidopsis thaliana; identical to SEQ ID NO: 22428
  peptide (1)..(418): Ceres Seq. ID no. 13614689
  misc_feature (92)..(145): Pfam Name: KH domain Pfam Description: KH domain
  misc_feature (1)..(418): Homolog of NCBI NO: 15236094 NR Description: KH domain protein [Arabidopsis thaliana]
  misc_feature (1)..(405): Homolog of NCBI NO: 37536904 NR Description: putative nucleic acid binding protein [Oryza
  misc_feature (1)..(356): Homolog of NCBI NO: 16924113 NR Description: putative RNA binding protein [Oryza sativa]
  misc_feature (1)..(352): Homolog of NCBI NO: 15229321 NR Description: KH domain protein [Arabidopsis thaliana]
  misc_feature (1)..(125): Homolog of NCBI NO: 37534332 NR Description: unknown protein [Oryza sativa (japonica
  misc_feature (251)..(368): Homolog of NCBI NO: 37534332 NR Description: unknown protein [Oryza sativa (japonica
  misc_feature (110)..(175): Homolog of NCBI NO: 37534332 NR Description: unknown protein [Oryza sativa (japonica
  misc_feature (1)..(334): Homolog of NCBI NO: 8809595 NR Description: RNA-binding protein-like [Arabidopsis thaliana]
  misc_feature (1)..(335): Homolog of NCBI NO: 30696273 NR Description: KH domain protein [Arabidopsis thaliana]
  misc_feature (59)..(163): Homolog of NCBI NO: 37535668 NR Description: putative RNA-binding protein [Oryza sativa

SEQ ID NO: 104281 - DNA, 847 bp, Arabidopsis thaliana
  misc_feature (1)..(847): Ceres Seq. ID no. 13614690
  misc_feature: MA Experiment ID: 108434 Result: Down-regulated in Transcription
  misc_feature: MA Experiment 108434 PARAMETER Experiment Name: At_Root_Tips_cDNA_P Parameter: Tissue Value: Root Tips
  misc_feature: MA Experiment ID: 108469 Result: Up-regulated in Transcription
  misc_feature: MA Experiment ID: 108585 Result: Up-regulated in Transcription
  misc_feature: MA Experiment 108585 PARAMETER Experiment Name: At_5mM_NaNP_cDNA_P Parameter: Timepoint (hr) Value: 6
  misc_feature: MA Experiment 108585 PARAMETER Experiment Name: At_5mM_NaNP_cDNA_P Parameter: Tissue Value: Aerial
  misc_feature: MA Experiment 108585 PARAMETER Experiment Name: At_5mM_NaNP_cDNA_P Parameter: Treatment Value: null
  misc_feature: MA Experiment ID: 108668 Result: Up-regulated in Transcription
  misc_feature: MA Experiment 108668 PARAMETER Experiment Name: At_2mM_SA_cDNA_P Parameter: Plant Line Value: WS
  misc_feature: MA Experiment 108668 PARAMETER Experiment Name: At_2mM_SA_cDNA_P Parameter: Timepoint (hr) Value: 6
  misc_feature: MA Experiment 108668 PARAMETER Experiment Name: At_2mM_SA_cDNA_P Parameter: Treatment Value: 2mM SA vs. No Treatment
  misc_feature: MA Experiment ID: 20000069 Result: Up-regulated in Transcription
  misc_feature: MA Experiment 20000069 PARAMETER Experiment Name: At_100uM_ABA_Mutants_cDNA_P Parameter: Plant Line Value: CS23
  misc_feature: MA Experiment 20000069 PARAMETER Experiment Name: At_100uM_ABA_Mutants_cDNA_P Parameter: Timepoint (hr) Value: 6
  misc_feature: MA Experiment 20000069 PARAMETER Experiment Name: At_100uM_ABA_Mutants_cDNA_P Parameter: Tissue Value: Aerial
  misc_feature: MA Experiment 20000069 PARAMETER Experiment Name: At_100uM_ABA_Mutants_cDNA_P Parameter: Treatment Value: 100uM ABA vs. No Treatment
  misc_feature: MA Experiment ID: 20000070 Result: Up-regulated in Transcription
  misc_feature: MA Experiment 20000070 PARAMETER Experiment Name: At_100uM_ABA_Mutants_cDNA_P Parameter: Plant Line Value: CS24
  misc_feature: MA Experiment 20000070 PARAMETER Experiment Name: At_100uM_ABA_Mutants_cDNA_P Parameter: Timepoint (hr) Value: 6
  misc_feature: MA Experiment 20000070 PARAMETER Experiment Name: At_100uM_ABA_Mutants_cDNA_P Parameter: Tissue Value: Aerial
  misc_feature: MA Experiment 20000070 PARAMETER Experiment Name: At_100uM_ABA_Mutants_cDNA_P Parameter: Treatment Value: 100uM ABA vs. No Treatment
  misc_feature: MA Experiment ID: 20000071 Result: Up-regulated in Transcription
  misc_feature: MA Experiment 20000071 PARAMETER Experiment Name: At_100uM_ABA_Mutants_cDNA_P Parameter: Plant Line Value: CS8104
  misc_feature: MA Experiment 20000071 PARAMETER Experiment Name: At_100uM_ABA_Mutants_cDNA_P Parameter: Timepoint (hr) Value: 6
  misc_feature: MA Experiment 20000071 PARAMETER Experiment Name: At_100uM_ABA_Mutants_cDNA_P Parameter: Tissue Value: Aerial
  misc_feature: MA Experiment 20000071 PARAMETER Experiment Name: At_100uM_ABA_Mutants_cDNA_P Parameter: Treatment Value: 100uM ABA vs. No Treatment
  misc_feature: MA Experiment ID: 20000072 Result: Up-regulated in Transcription
  misc_feature: MA Experiment 20000072 PARAMETER Experiment Name: At_100uM_ABA_Mutants_cDNA_P Parameter: Plant Line Value: CS8105
  misc_feature: MA Experiment 20000072 PARAMETER Experiment Name: At_100uM_ABA_Mutants_cDNA_P Parameter: Timepoint (hr) Value: 6
  misc_feature: MA Experiment 20000072 PARAMETER Experiment Name: At_100uM_ABA_Mutants_cDNA_P Parameter: Tissue Value: Aerial
  misc_feature: MA Experiment 20000072 PARAMETER Experiment Name: At_100uM_ABA_Mutants_cDNA_P Parameter: Treatment Value: 100uM ABA vs. No Treatment
  misc_feature: MA Experiment ID: 20000086 Result: Up-regulated in Transcription
  misc_feature: MA Experiment 20000086 PARAMETER Experiment Name: At_100uM_ABA_Mutants_cDNA_P Parameter: Plant Line Value: CS22
  misc_feature: MA Experiment 20000086 PARAMETER Experiment Name: At_100uM_ABA_Mutants_cDNA_P Parameter: Timepoint (hr) Value: 6
  misc_feature: MA Experiment 20000086 PARAMETER Experiment Name: At_100uM_ABA_Mutants_cDNA_P Parameter: Tissue Value: Aerial
  misc_feature: MA Experiment 20000086 PARAMETER Experiment Name: At_100uM_ABA_Mutants_cDNA_P Parameter: Treatment Value: 100uM ABA vs. No Treatment
  misc_feature: MA Experiment ID: 20000087 Result: Up-regulated in Transcription
  misc_feature: MA Experiment 20000087 PARAMETER Experiment Name: At_100uM_ABA_Mutants_cDNA_P Parameter: Plant Line Value: WS
  misc_feature: MA Experiment 20000087 PARAMETER Experiment Name: At_100uM_ABA_Mutants_cDNA_P Parameter: Timepoint (hr) Value: 6
  misc_feature: MA Experiment 20000087 PARAMETER Experiment Name: At_100uM_ABA_Mutants_cDNA_P Parameter: Tissue Value: Aerial
  misc_feature: MA Experiment 20000087 PARAMETER Experiment Name: At_100uM_ABA_Mutants_cDNA_P Parameter: Treatment Value: 100uM ABA vs. No Treatment
  misc_feature: MA Experiment ID: 20000090 Result: Up-regulated in Transcription
  misc_feature: MA Experiment ID: 20000111 Result: Down-regulated in Transcription
  misc_feature: MA Experiment 20000111 PARAMETER Experiment Name: At_42deg_Heat_cDNA_P Parameter: Temperature (deg C) Value: 42 vs. 22
  misc_feature: MA Experiment 20000111 PARAMETER Experiment Name: At_42deg_Heat_cDNA_P Parameter: Timepoint (hr) Value: 6
  misc_feature: MA Experiment 20000111 PARAMETER Experiment Name: At_42deg_Heat_cDNA_P Parameter: Tissue Value: Aerial
  misc_feature: MA Experiment ID: 20000117 Result: Up-regulated in Transcription
  misc_feature: MA Experiment 20000117 PARAMETER Experiment Name: At_100uM_ABA_Mutants_cDNA_P Parameter: Plant Line Value: Columbia
  misc_feature: MA Experiment 20000117 PARAMETER Experiment Name: At_100uM_ABA_Mutants_cDNA_P Parameter: Timepoint (hr) Value: 6
  misc_feature: MA Experiment 20000117 PARAMETER Experiment Name: At_100uM_ABA_Mutants_cDNA_P Parameter: Tissue Value: Aerial
  misc_feature: MA Experiment 20000117 PARAMETER Experiment Name: At_100uM_ABA_Mutants_cDNA_P Parameter: Treatment Value: 100uM ABA vs. No Treatment
  misc_feature: MA Experiment ID: 20000315 Result: Down-regulated in Transcription
  misc_feature: MA Experiment 20000315 PARAMETER Experiment Name: At_14day_Shoots-Roots_Sub_P Parameter: Age (day) Value: 14
  misc_feature: MA Experiment 20000315 PARAMETER Experiment Name: At_14day_Shoots-Roots_Sub_P Parameter: Organism Value: A. thaliana
  misc_feature: MA Experiment 20000315 PARAMETER Experiment Name: At_14day_Shoots-Roots_Sub_P Parameter: Plant Line Value: WS
  misc_feature: MA Experiment 20000315 PARAMETER Experiment Name: At_14day_Shoots-Roots_Sub_P Parameter: Tissue Value: Shoots vs. Whole Plant
  misc_feature: MA Experiment ID: 20000347 Result: Up-regulated in Transcription
  misc_feature: MA Experiment 20000347 PARAMETER Experiment Name: At_2mM_SA_Sub_P Parameter: Age (day) Value: 14
  misc_feature: MA Experiment 20000347 PARAMETER Experiment Name: At_2mM_SA_Sub_P Parameter: Organism Value: A. thaliana
  misc_feature: MA Experiment 20000347 PARAMETER Experiment Name: At_2mM_SA_Sub_P Parameter: Plant Line Value: WS
  misc_feature: MA Experiment 20000347 PARAMETER Experiment Name: At_2mM_SA_Sub_P Parameter: Timepoint (hr) Value: 6
  misc_feature: MA Experiment 20000347 PARAMETER Experiment Name: At_2mM_SA_Sub_P Parameter: Tissue Value: Aerial
  misc_feature: MA Experiment 20000347 PARAMETER Experiment Name: At_2mM_SA_Sub_P Parameter: Treatment Value: 2mM SA vs. No Treatment
  misc_feature: MA Experiment ID: 20000355 Result: Down-regulated in Transcription
  misc_feature: MA Experiment 20000355 PARAMETER Experiment Name: At_Siliques_Sub_P Parameter: Age (day) Value: 21
  misc_feature: MA Experiment 20000355 PARAMETER Experiment Name: At_Siliques_Sub_P Parameter: Organism Value: A. thaliana
  misc_feature: MA Experiment 20000355 PARAMETER Experiment Name: At_Siliques_Sub_P Parameter: Plant Line Value: WS
  misc_feature: MA Experiment 20000355 PARAMETER Experiment Name: At_Siliques_Sub_P Parameter: Tissue Value: Less Than 5mm Siliques vs. Whole Plant
atcacgctgacgaagttgaaacaagcagcacaagaagaagacgaagcacgacgactctctcgcttccagatttcttgatccgatatttatattccctctgcccttgaaatcaaatctcttctcgaatttgtgctctagaaattataatctggcaatttgaagatcttgtgggtcacgacacaaacttataagcaagagcttagcattttcatcatctgctgaagaacgtatgggagaaactgttaaagagcgtggtgatggaagtgcagagctggttaaatccgtagctgataagcatgccggtctcgtgagaccagttgctaaatattactctgcagttaaagatgctatggtgtgtgggaaaggaagatatacgcttgtaaaagacgtagacgaggtggaaaatggagtgtatgacaagcctcttccatgctttggttgtggaatcggatggttctcctttctcttgggttttgtgttccctttcttatggtactatgcaacacttttatatttcgggaactactaccgcaaggatcctagagaaagagccggccttgctgcttccgcaatcactgcgatgggattctccctcttgctactagtgattgttgttttctggtggctctaatgggttctctgacttatacgccataatcttgagatatatatgatggaaagtctcatccttgtcaaaggaaaaaggaggggacttagatatatatataaaccctatatacacagattatagttagacctctctcaagctctgtatcattttcttctcaaaaatctgcagtgtgtacaaagaacagaaaatacaataataaatgagtaaatggttgtt

SEQ ID NO: 104282 - protein, 133 aa, Arabidopsis thaliana
  peptide (1)..(133): Ceres Seq. ID no. 13614691
  misc_feature (1)..(133): Homolog of NCBI NO: 15236106 NR Description: expressed protein [Arabidopsis thaliana]
  misc_feature (1)..(133): Homolog of NCBI NO: 21553625 NR Description: unknown [Arabidopsis thaliana]
  misc_feature (9)..(132): Homolog of NCBI NO: 8777446 NR Description: gene_id:MHM17.20~pir||T04261~similar to unknown
  misc_feature (9)..(132): Homolog of NCBI NO: 18423932 NR Description: expressed protein [Arabidopsis thaliana] unknown protein [Arabidopsis thaliana]
  misc_feature (1)..(130): Homolog of NCBI NO: 21593960 NR Description: unknown [Arabidopsis thaliana]
MGETVKERGDGSAELVKSVADKHAGLVRPVAKYYSAVKDAMVCGKGRYTLVKDVDEVENGVYDKPLPCFGCGIGWFSFLLGFVFPFLWYYATLLYFGNYYRKDPRERAGLAASAITAMGFSLLLLVIVVFWWL

SEQ ID NO: 104283 - protein, 93 aa, Arabidopsis thaliana
  peptide (1)..(93): Ceres Seq. ID no. 13614692
  misc_feature (1)..(93): Homolog of NCBI NO: 15236106 NR Description: expressed protein [Arabidopsis thaliana]
  misc_feature (1)..(93): Homolog of NCBI NO: 21553625 NR Description: unknown [Arabidopsis thaliana]
  misc_feature (1)..(92): Homolog of NCBI NO: 8777446 NR Description: gene_id:MHM17.20~pir||T04261~similar to unknown
  misc_feature (1)..(92): Homolog of NCBI NO: 18423932 NR Description: expressed protein [Arabidopsis thaliana] unknown protein [Arabidopsis thaliana]
  misc_feature (1)..(90): Homolog of NCBI NO: 21593960 NR Description: unknown [Arabidopsis thaliana]
MVCGKGRYTLVKDVDEVENGVYDKPLPCFGCGIGWFSFLLGFVFPFLWYYATLLYFGNYYRKDPRERAGLAASAITAMGFSLLLLVIVVFWWL

SEQ ID NO: 104284 - protein, 66 aa, Arabidopsis thaliana
  peptide (1)..(66): Ceres Seq. ID no. 13614693
MECMTSLFHALVVESDGSPFSWVLCSLSYGTMQHFYISGTTTARILEKEPALLLPQSLRWDSPSCY

SEQ ID NO: 104285 - DNA, 815 bp, Arabidopsis thaliana
  misc_feature (1)..(815): Ceres Seq. ID no. 13614698
  misc_feature: MA Experiment ID: 108576 Result: Up-regulated in Transcription
  misc_feature: MA Experiment 108576 PARAMETER Experiment Name: At_42deg_Heat_cDNA_P Parameter: Temperature (deg C) Value: 42 vs. 22
  misc_feature: MA Experiment 108576 PARAMETER Experiment Name: At_42deg_Heat_cDNA_P Parameter: Timepoint (hr) Value: 1
  misc_feature: MA Experiment 108576 PARAMETER Experiment Name: At_42deg_Heat_cDNA_P Parameter: Tissue Value: Aerial
  misc_feature: MA Experiment ID: 20000184 Result: Down-regulated in Transcription
  misc_feature: MA Experiment 20000184 PARAMETER Experiment Name: At_Shoots__P Parameter: Age (day) Value: 7
  misc_feature: MA Experiment 20000184 PARAMETER Experiment Name: At_Shoots__P Parameter: Tissue Value: Shoots vs. Whole Plant
  misc_feature: MA Experiment ID: 20000235 Result: Down-regulated in Transcription
  misc_feature: MA Experiment 20000235 PARAMETER Experiment Name: At_Siliques_P Parameter: Age (day) Value: 21
  misc_feature: MA Experiment 20000235 PARAMETER Experiment Name: At_Siliques_P Parameter: Organism Value: A. thaliana
  misc_feature: MA Experiment 20000235 PARAMETER Experiment Name: At_Siliques_P Parameter: Plant Line Value: WS
  misc_feature: MA Experiment 20000235 PARAMETER Experiment Name: At_Siliques_P Parameter: Tissue Value: 5-10mm Siliques vs. Whole Plant
  misc_feature: MA Experiment ID: 20000451 Result: Down-regulated in Transcription
  misc_feature: MA Experiment 20000451 PARAMETER Experiment Name: At_CS6879_Shoots-Roots_P Parameter: Age (day) Value: 14
  misc_feature: MA Experiment 20000451 PARAMETER Experiment Name: At_CS6879_Shoots-Roots_P Parameter: Organism Value: A. thaliana
  misc_feature: MA Experiment 20000451 PARAMETER Experiment Name: At_CS6879_Shoots-Roots_P Parameter: Plant Line Value: CS6879 vs. WS
  misc_feature: MA Experiment 20000451 PARAMETER Experiment Name: At_CS6879_Shoots-Roots_P Parameter: Tissue Value: Roots
  misc_feature: MA Experiment ID: 20000452 Result: Down-regulated in Transcription
  misc_feature: MA Experiment 20000452 PARAMETER Experiment Name: At_CS6879_Shoots-Roots_P Parameter: Age (day) Value: 14
  misc_feature: MA Experiment 20000452 PARAMETER Experiment Name: At_CS6879_Shoots-Roots_P Parameter: Organism Value: A. thaliana
  misc_feature: MA Experiment 20000452 PARAMETER Experiment Name: At_CS6879_Shoots-Roots_P Parameter: Plant Line Value: CS6879 vs. WS
  misc_feature: MA Experiment 20000452 PARAMETER Experiment Name: At_CS6879_Shoots-Roots_P Parameter: Tissue Value: Shoots
  misc_feature: MA Experiment ID: 20001450 Result: Up-regulated in Transcription
  misc_feature: MA Experiment 20001450 PARAMETER Experiment Name: At_Far-red-induction_P Parameter: Age (day) Value: 7
  misc_feature: MA Experiment 20001450 PARAMETER Experiment Name: At_Far-red-induction_P Parameter: Light Value: Far-red vs. White
  misc_feature: MA Experiment 20001450 PARAMETER Experiment Name: At_Far-red-induction_P Parameter: Organism Value: A. thaliana
  misc_feature: MA Experiment 20001450 PARAMETER Experiment Name: At_Far-red-induction_P Parameter: Plant Line Value: Columbia
  misc_feature: MA Experiment 20001450 PARAMETER Experiment Name: At_Far-red-induction_P Parameter: Timepoint (hr) Value: 8
  misc_feature: MA Experiment 20001450 PARAMETER Experiment Name: At_Far-red-induction_P Parameter: Tissue Value: Whole Plant
agaacaaaacaaacaaaaagtcatgtctccgacgacgacatcgttacgatccctaagcttctcgctttacgcttcttctaattctactccgatttctacaccaattgaggcccgacagttactgagttcatgcaatagattctacggtctgtcctcttcgagctcttcttcctcccttactacttcatctttgatcggaaatcttgttttctcatcaaggaatcagtctctctccgtaaaggtccaagcgttagctgctgaaaccgaacagccaaaatggtgggagaggaaagcagggccaaacatgattgacattacctcagctgagcagtttctcaacgcgttaaaagatgcgggagatagattagttatcgtagatttttacggaacttggtgtggttcttgccgtgcaatgttcccaaagctctgcaaaacggcgaaagaacaccctaacatcttgttccttaaagtaaactttgacgagaacaagtctctctgcaaaagcttaaacgtcaaggtgttaccgtatttccacttctaccgcggtgctgatggccaagtcgaatccttctcatgctctcttgccaagttccagaaactgagagaggcgatagagagacacaatgtaggaagtatcagtaacatctcttcttcagcttctgagaaagttgaagattcaagtgaataatcaatgcctggttcagattgatcacagattattttgttaaatcgcttccctgtatatatgttgactgcattttccatgtggtgcatcataatttttgtacataaataaatgagtctgacttcgagtt

SEQ ID NO: 104286 - protein, 228 aa, Arabidopsis thaliana
  peptide (1)..(228): Ceres Seq. ID no. 13614699
  misc_feature (8)..(228): Homolog of NCBI NO: 15236134 NR Description: thioredoxin family [Arabidopsis thaliana]
  misc_feature (8)..(228): Homolog of NCBI NO: 21553512 NR Description: putative thioredoxin [Arabidopsis thaliana]
  misc_feature (15)..(228): Homolog of NCBI NO: 4973258 NR Description: thioredoxin-like 2 [Arabidopsis thaliana]
  misc_feature (7)..(213): Homolog of NCBI NO: 18417441 NR Description: thioredoxin family [Arabidopsis thaliana]
  misc_feature (7)..(213): Homolog of NCBI NO: 21554313 NR Description: thioredoxin-like protein [Arabidopsis thaliana]
  misc_feature (7)..(199): Homolog of NCBI NO: 30688403 NR Description: thioredoxin family [Arabidopsis thaliana]
  misc_feature (102)..(199): Homolog of NCBI NO: 14423392 NR Description: Thioredoxin-like protein [Arabidopsis thaliana]
  misc_feature (41)..(207): Homolog of NCBI NO: 15225825 NR Description: thioredoxin family [Arabidopsis thaliana]
  misc_feature (26)..(207): Homolog of NCBI NO: 15240254 NR Description: thioredoxin family [Arabidopsis thaliana]
  misc_feature (71)..(213): Homolog of NCBI NO: 308906 NR Description: thioredoxin
EQNKQKVMSPTTTSLRSLSFSLYASSNSTPISTPIEARQLLSSCNRFYGLSSSSSSSSLTTSSLIGNLVFSSRNQSLSVKVQALAAETEQPKWWERKAGPNMIDITSAEQFLNALKDAGDRLVIVDFYGTWCGSCRAMFPKLCKTAKEHPNILFLKVNFDENKSLCKSLNVKVLPYFHFYRGADGQVESFSCSLAKFQKLREAIERHNVGSISNISSSASEKVEDSSE

SEQ ID NO: 104287 - protein, 221 aa, Arabidopsis thaliana
  peptide (1)..(221): Ceres Seq. ID no. 13614700
  misc_feature (1)..(221): Homolog of NCBI NO: 15236134 NR Description: thioredoxin family [Arabidopsis thaliana]
  misc_feature (1)..(221): Homolog of NCBI NO: 21553512 NR Description: putative thioredoxin [Arabidopsis thaliana]
  misc_feature (8)..(221): Homolog of NCBI NO: 4973258 NR Description: thioredoxin-like 2 [Arabidopsis thaliana]
  misc_feature (1)..(206): Homolog of NCBI NO: 18417441 NR Description: thioredoxin family [Arabidopsis thaliana]
  misc_feature (1)..(206): Homolog of NCBI NO: 21554313 NR Description: thioredoxin-like protein [Arabidopsis thaliana]
  misc_feature (1)..(192): Homolog of NCBI NO: 30688403 NR Description: thioredoxin family [Arabidopsis thaliana]
  misc_feature (95)..(192): Homolog of NCBI NO: 14423392 NR Description: Thioredoxin-like protein [Arabidopsis thaliana]
  misc_feature (34)..(200): Homolog of NCBI NO: 15225825 NR Description: thioredoxin family [Arabidopsis thaliana]
  misc_feature (19)..(200): Homolog of NCBI NO: 15240254 NR Description: thioredoxin family [Arabidopsis thaliana]
  misc_feature (64)..(206): Homolog of NCBI NO: 308906 NR Description: thioredoxin
MSPTTTSLRSLSFSLYASSNSTPISTPIEARQLLSSCNRFYGLSSSSSSSSLTTSSLIGNLVFSSRNQSLSVKVQALAAETEQPKWWERKAGPNMIDITSAEQFLNALKDAGDRLVIVDFYGTWCGSCRAMFPKLCKTAKEHPNILFLKVNFDENKSLCKSLNVKVLPYFHFYRGADGQVESFSCSLAKFQKLREAIERHNVGSISNISSSASEKVEDSSE

SEQ ID NO: 104288 - protein, 127 aa, Arabidopsis thaliana; identical to SEQ ID NO: 76250
  peptide (1)..(127): Ceres Seq. ID no. 13614701
  misc_feature (1)..(127): Homolog of NCBI NO: 15236134 NR Description: thioredoxin family [Arabidopsis thaliana]
  misc_feature (1)..(127): Homolog of NCBI NO: 21553512 NR Description: putative thioredoxin [Arabidopsis thaliana]
  misc_feature (1)..(127): Homolog of NCBI NO: 4973258 NR Description: thioredoxin-like 2 [Arabidopsis thaliana]
  misc_feature (1)..(112): Homolog of NCBI NO: 18417441 NR Description: thioredoxin family [Arabidopsis thaliana]
  misc_feature (1)..(112): Homolog of NCBI NO: 21554313 NR Description: thioredoxin-like protein [Arabidopsis thaliana]
  misc_feature (1)..(98): Homolog of NCBI NO: 30688403 NR Description: thioredoxin family [Arabidopsis thaliana]
  misc_feature (1)..(98): Homolog of NCBI NO: 14423392 NR Description: Thioredoxin-like protein [Arabidopsis thaliana]
  misc_feature (1)..(106): Homolog of NCBI NO: 15225825 NR Description: thioredoxin family [Arabidopsis thaliana]
  misc_feature (1)..(106): Homolog of NCBI NO: 15240254 NR Description: thioredoxin family [Arabidopsis thaliana]
  misc_feature (1)..(112): Homolog of NCBI NO: 308906 NR Description: thioredoxin

SEQ ID NO: 104289 - DNA, 1356 bp, Arabidopsis thaliana
  misc_feature (1)..(1356): Ceres Seq. ID no. 13614702
  misc_feature: MA Experiment ID: 108462 Result: Down-regulated in Transcription
  misc_feature: MA Experiment 108462 PARAMETER Experiment Name: At_Germinating_Seeds_cDNA_P Parameter: Age (day) Value: 2 vs. 0
  misc_feature: MA Experiment 108462 PARAMETER Experiment Name: At_Germinating_Seeds_cDNA_P Parameter: Tissue Value: Germinating Seeds
  misc_feature: MA Experiment ID: 108463 Result: Down-regulated in Transcription
  misc_feature: MA Experiment 108463 PARAMETER Experiment Name: At_Germinating_Seeds_cDNA_P Parameter: Age (day) Value: 3 vs. 0
  misc_feature: MA Experiment 108463 PARAMETER Experiment Name: At_Germinating_Seeds_cDNA_P Parameter: Tissue Value: Germinating Seeds
  misc_feature: MA Experiment ID: 108464 Result: Down-regulated in Transcription
  misc_feature: MA Experiment 108464 PARAMETER Experiment Name: At_Germinating_Seeds_cDNA_P Parameter: Age (day) Value: 4 vs. 0
  misc_feature: MA Experiment 108464 PARAMETER Experiment Name: At_Germinating_Seeds_cDNA_P Parameter: Tissue Value: Germinating Seeds
  misc_feature: MA Experiment ID: 108561 Result: Down-regulated in Transcription
  misc_feature: MA Experiment 108561 PARAMETER Experiment Name: At_100uM_ABA_cDNA_P Parameter: Timepoint (hr) Value: 6
  misc_feature: MA Experiment 108561 PARAMETER Experiment Name: At_100uM_ABA_cDNA_P Parameter: Tissue Value: Aerial
  misc_feature: MA Experiment 108561 PARAMETER Experiment Name: At_100uM_ABA_cDNA_P Parameter: Treatment Value: 100uM ABA vs. No Treatment
  misc_feature: MA Experiment ID: 108576 Result: Down-regulated in Transcription
  misc_feature: MA Experiment 108576 PARAMETER Experiment Name: At_42deg_Heat_cDNA_P Parameter: Temperature (deg C) Value: 42 vs. 22
  misc_feature: MA Experiment 108576 PARAMETER Experiment Name: At_42deg_Heat_cDNA_P Parameter: Timepoint (hr) Value: 1
  misc_feature: MA Experiment 108576 PARAMETER Experiment Name: At_42deg_Heat_cDNA_P Parameter: Tissue Value: Aerial
  misc_feature: MA Experiment ID: 108595 Result: Down-regulated in Transcription
  misc_feature: MA Experiment 108595 PARAMETER Experiment Name: At_Ler-pi_Ovule_cDNA_P Parameter: Plant Line Value: null
  misc_feature: MA Experiment ID: 108605 Result: Down-regulated in Transcription
  misc_feature: MA Experiment 108605 PARAMETER Experiment Name: At_100uM_ABA_cDNA_P Parameter: Timepoint (hr) Value: 6
  misc_feature: MA Experiment 108605 PARAMETER Experiment Name: At_100uM_ABA_cDNA_P Parameter: Tissue Value: Aerial
  misc_feature: MA Experiment 108605 PARAMETER Experiment Name: At_100uM_ABA_cDNA_P Parameter: Treatment Value: 100uM ABA vs. No Treatment
  misc_feature: MA Experiment ID: 20000089 Result: Up-regulated in Transcription
  misc_feature: MA Experiment ID: 20000111 Result: Down-regulated in Transcription
  misc_feature: MA Experiment 20000111 PARAMETER Experiment Name: At_42deg_Heat_cDNA_P Parameter: Temperature (deg C) Value: 42 vs. 22
  misc_feature: MA Experiment 20000111 PARAMETER Experiment Name: At_42deg_Heat_cDNA_P Parameter: Timepoint (hr) Value: 6
  misc_feature: MA Experiment 20000111 PARAMETER Experiment Name: At_42deg_Heat_cDNA_P Parameter: Tissue Value: Aerial
  misc_feature: MA Experiment ID: 20000112 Result: Down-regulated in Transcription
  misc_feature: MA Experiment 20000112 PARAMETER Experiment Name: At_42deg_Heat_cDNA_P Parameter: Temperature (deg C) Value: 42 vs. 22
  misc_feature: MA Experiment 20000112 PARAMETER Experiment Name: At_42deg_Heat_cDNA_P Parameter: Timepoint (hr) Value: 2
  misc_feature: MA Experiment 20000112 PARAMETER Experiment Name: At_42deg_Heat_cDNA_P Parameter: Tissue Value: Aerial
  misc_feature: MA Experiment ID: 20000144 Result: Down-regulated in Transcription
  misc_feature: MA Experiment 20000144 PARAMETER Experiment Name: At_42deg_Heat_cDNA_P Parameter: Temperature (deg C) Value: 42 vs. 22
  misc_feature: MA Experiment 20000144 PARAMETER Experiment Name: At_42deg_Heat_cDNA_P Parameter: Timepoint (hr) Value: 1
  misc_feature: MA Experiment 20000144 PARAMETER Experiment Name: At_42deg_Heat_cDNA_P Parameter: Tissue Value: Aerial
  misc_feature: MA Experiment ID: 20000182 Result: Down-regulated in Transcription
  misc_feature: MA Experiment 20000182 PARAMETER Experiment Name: At_2mM_SA_P Parameter: Age (day) Value: 14
  misc_feature: MA Experiment 20000182 PARAMETER Experiment Name: At_2mM_SA_P Parameter: Organism Value: A. thaliana
  misc_feature: MA Experiment 20000182 PARAMETER Experiment Name: At_2mM_SA_P Parameter: Plant Line Value: WS
  misc_feature: MA Experiment 20000182 PARAMETER Experiment Name: At_2mM_SA_P Parameter: Timepoint (hr) Value: 6
  misc_feature: MA Experiment 20000182 PARAMETER Experiment Name: At_2mM_SA_P Parameter: Tissue Value: Aerial
  misc_feature: MA Experiment 20000182 PARAMETER Experiment Name: At_2mM_SA_P Parameter: Treatment Value: 2mM SA vs. No Treatment
  misc_feature: MA Experiment ID: 20000185 Result: Down-regulated in Transcription
  misc_feature: MA Experiment 20000185 PARAMETER Experiment Name: At_Roots__P Parameter: Age (day) Value: 7 vs. 21
  misc_feature: MA Experiment 20000185 PARAMETER Experiment Name: At_Roots__P Parameter: Organism Value: A. thaliana
  misc_feature: MA Experiment 20000185 PARAMETER Experiment Name: At_Roots__P Parameter: Tissue Value: Roots vs. Whole Plant
  misc_feature: MA Experiment ID: 20000439 Result: Down-regulated in Transcription
  misc_feature: MA Experiment 20000439 PARAMETER Experiment Name: At_Roots__P Parameter: Age (day) Value: 14 vs. 21
  misc_feature: MA Experiment 20000439 PARAMETER Experiment Name: At_Roots__P Parameter: Organism Value: A. thaliana
  misc_feature: MA Experiment 20000439 PARAMETER Experiment Name: At_Roots__P Parameter: Tissue Value: Roots vs. Whole Plant
  misc_feature: MA Experiment ID: 20000527 Result: Up-regulated in Transcription
  misc_feature: MA Experiment 20000527 PARAMETER Experiment Name: At_10percent_PEG_P Parameter: Age (day) Value: 20
  misc_feature: MA Experiment 20000527 PARAMETER Experiment Name: At_10percent_PEG_P Parameter: Organism Value: A. thaliana
  misc_feature: MA Experiment 20000527 PARAMETER Experiment Name: At_10percent_PEG_P Parameter: Plant Line Value: WS
  misc_feature: MA Experiment 20000527 PARAMETER Experiment Name: At_10percent_PEG_P Parameter: Timepoint (day) Value: 20
  misc_feature: MA Experiment 20000527 PARAMETER Experiment Name: At_10percent_PEG_P Parameter: Tissue Value: Whole Plant
  misc_feature: MA Experiment 20000527 PARAMETER Experiment Name: At_10percent_PEG_P Parameter: Treatment Value: 10percent PEG vs. No Treatment
  misc_feature: MA Experiment ID: 20001451 Result: Down-regulated in Transcription
  misc_feature: MA Experiment 20001451 PARAMETER Experiment Name: At_Far-red-induction_P Parameter: Age (day) Value: 7
  misc_feature: MA Experiment 20001451 PARAMETER Experiment Name: At_Far-red-induction_P Parameter: Light Value: Far-red vs. White
  misc_feature: MA Experiment 20001451 PARAMETER Experiment Name: At_Far-red-induction_P Parameter: Organism Value: A. thaliana
  misc_feature: MA Experiment 20001451 PARAMETER Experiment Name: At_Far-red-induction_P Parameter: Plant Line Value: Columbia
  misc_feature: MA Experiment 20001451 PARAMETER Experiment Name: At_Far-red-induction_P Parameter: Timepoint (hr) Value: 24
  misc_feature: MA Experiment 20001451 PARAMETER Experiment Name: At_Far-red-induction_P Parameter: Tissue Value: Whole Plant
tttttttcaattttacggatatcgttatctgcttctcacactaacacggcgaagcagaaaaagagctcgaaacaaaaatggagggaaccttctcgccgctttgcttacgttcttcttcgaacctctgttacttctccagtaatgtttcaccagattctcaccgttctataggatttacattggttgattcgctccggccaacgaacttggtttccctgcgaacgggaaataaacgttcgtcatcgtcttcactacggctatttctctctccgactagaagcgctctccgtacgccgactatttccgcggaggaggtgaaagatgtcccgatgccgaagattgataagagcggccgattaagcagtcctcgagccgcacgcgagctcgctcttgtaatactttatgccgcatgcttagaaggctctgacccaattcgtctctttgagaagagaataaacgcaagaagagagcctggatacgagtttgacaagagttctttgttggaatacaaccacatgagctttggaggacccccagttaaaacagaaacaaaagaagaagaagatgagcttgtgcgccatgatgaaaaagaatcgaaaatcgaagccgaagtgctttcagctcccccaaagctggtgtacagcaaacttgttttacggtttgcaaagaaactcttggctgcggtagttgataaatgggatagtcatgtcgttatcatcgagaaaatttccccgccagattggaagagtgcaccagctggaagaatattggagttttcgattcttcacttggcaatgtctgaagtggcagtccttgaaacccgacacccgattgtcattaacgaggctgttgatcttgcaaaacggttctgcgatggatcagcaccacgcataatcaacggatgcctaaggacatttgtcaaggatagagcaacaacatcaacacctcaagctttagaattgaagcaagaagtgtcggtttaaattagaacaaaacccgcatcttcgttaggaggcaggcaacctcaagatgttggtcgtcggaagtcgctagtaggcaaagtgttgatccgatgatcttatatattcgacaaagtcgctctctgtcttgacagaccgcttctggtccgaagcttttgatacctgagactgaatctatccattgcaggtcaacatgattattgctaagaacacagcatactcatgtctgtattaatatattgcccataagatagtattaatttatgtagtagttttcatgtttctgtctttgtatcctcctccttcacttgtgtcccatatttgagaacaaacaaagctgtataatcaggtttttcgtatagatgtttttttccgc

SEQ ID NO: 104290 - protein, 301 aa, Arabidopsis thaliana; identical to SEQ ID NO: 25868
  peptide (1)..(301): Ceres Seq. ID no. 13614703
  misc_feature (26)..(156): Pfam Name: NusB family Pfam Description: NusB family
  misc_feature (1)..(301): Homolog of NCBI NO: 18416739 NR Description: expressed protein [Arabidopsis thaliana] putative protein [Arabidopsis thaliana]
  misc_feature (1)..(301): Homolog of NCBI NO: 7486786 NR Description: hypothetical protein M3E9.200 - Arabidopsis >gi|2982469|emb|CAA18233.1| putative protein [Arabidopsis >gi|7269489|emb|CAB79492.1| putative protein [Arabidopsis
  misc_feature (46)..(296): Homolog of NCBI NO: 31415975 NR Description: unknown protein [Oryza sativa (japonica
  misc_feature (63)..(275): Homolog of NCBI NO: 18483231 NR Description: hypothetical protein M3E9.200 [Sorghum bicolor]

SEQ ID NO: 104291 - protein, 217 aa, Arabidopsis thaliana; identical to SEQ ID NO: 25869
  peptide (1)..(217): Ceres Seq. ID no. 13614704
  misc_feature (1)..(72): Pfam Name: NusB family Pfam Description: NusB family
  misc_feature (1)..(217): Homolog of NCBI NO: 18416739 NR Description: expressed protein [Arabidopsis thaliana] putative protein [Arabidopsis thaliana]
  misc_feature (1)..(217): Homolog of NCBI NO: 7486786 NR Description: hypothetical protein M3E9.200 - Arabidopsis >gi|2982469|emb|CAA18233.1| putative protein [Arabidopsis >gi|7269489|emb|CAB79492.1| putative protein [Arabidopsis
  misc_feature (1)..(212): Homolog of NCBI NO: 31415975 NR Description: unknown protein [Oryza sativa (japonica
  misc_feature (1)..(191): Homolog of NCBI NO: 18483231 NR Description: hypothetical protein M3E9.200 [Sorghum bicolor]

SEQ ID NO: 104292 - protein, 155 aa, Arabidopsis thaliana; identical to SEQ ID NO: 25870
  peptide (1)..(155): Ceres Seq. ID no. 13614705
  misc_feature (1)..(155): Homolog of NCBI NO: 18416739 NR Description: expressed protein [Arabidopsis thaliana] putative protein [Arabidopsis thaliana]
  misc_feature (1)..(155): Homolog of NCBI NO: 7486786 NR Description: hypothetical protein M3E9.200 - Arabidopsis >gi|2982469|emb|CAA18233.1| putative protein [Arabidopsis >gi|7269489|emb|CAB79492.1| putative protein [Arabidopsis
  misc_feature (1)..(150): Homolog of NCBI NO: 31415975 NR Description: unknown protein [Oryza sativa (japonica
  misc_feature (1)..(129): Homolog of NCBI NO: 18483231 NR Description: hypothetical protein M3E9.200 [Sorghum bicolor]

SEQ ID NO: 104293 - DNA, 2007 bp, Arabidopsis thaliana
  misc_feature (1)..(2007): Ceres Seq. ID no. 13614709
  misc_feature: MA Experiment ID: 108461 Result: Up-regulated in Transcription
  misc_feature: MA Experiment 108461 PARAMETER Experiment Name: At_Germinating_Seeds_cDNA_P Parameter: Age (day) Value: 1 vs. 0
  misc_feature: MA Experiment 108461 PARAMETER Experiment Name: At_Germinating_Seeds_cDNA_P Parameter: Tissue Value: Germinating Seeds
  misc_feature: MA Experiment ID: 108576 Result: Down-regulated in Transcription
  misc_feature: MA Experiment 108576 PARAMETER Experiment Name: At_42deg_Heat_cDNA_P Parameter: Temperature (deg C) Value: 42 vs. 22
  misc_feature: MA Experiment 108576 PARAMETER Experiment Name: At_42deg_Heat_cDNA_P Parameter: Timepoint (hr) Value: 1
  misc_feature: MA Experiment 108576 PARAMETER Experiment Name: At_42deg_Heat_cDNA_P Parameter: Tissue Value: Aerial
  misc_feature: MA Experiment ID: 20000171 Result: Down-regulated in Transcription
  misc_feature: MA Experiment 20000171 PARAMETER Experiment Name: At_42deg_Heat_P Parameter: Age (day) Value: 14
  misc_feature: MA Experiment 20000171 PARAMETER Experiment Name: At_42deg_Heat_P Parameter: Organism Value: A. thaliana
  misc_feature: MA Experiment 20000171 PARAMETER Experiment Name: At_42deg_Heat_P Parameter: Plant Line Value: WS
  misc_feature: MA Experiment 20000171 PARAMETER Experiment Name: At_42deg_Heat_P Parameter: Temperature (deg C) Value: 42 vs. 22
  misc_feature: MA Experiment 20000171 PARAMETER Experiment Name: At_42deg_Heat_P Parameter: Timepoint (hr) Value: 1
  misc_feature: MA Experiment 20000171 PARAMETER Experiment Name: At_42deg_Heat_P Parameter: Tissue Value: Aerial
  misc_feature: MA Experiment ID: 20000173 Result: Down-regulated in Transcription
  misc_feature: MA Experiment 20000173 PARAMETER Experiment Name: At_42deg_Heat_P Parameter: Age (day) Value: 14
  misc_feature: MA Experiment 20000173 PARAMETER Experiment Name: At_42deg_Heat_P Parameter: Organism Value: A. thaliana
  misc_feature: MA Experiment 20000173 PARAMETER Experiment Name: At_42deg_Heat_P Parameter: Plant Line Value: WS
  misc_feature: MA Experiment 20000173 PARAMETER Experiment Name: At_42deg_Heat_P Parameter: Temperature (deg C) Value: 42 vs. 22
  misc_feature: MA Experiment 20000173 PARAMETER Experiment Name: At_42deg_Heat_P Parameter: Timepoint (hr) Value: 6
  misc_feature: MA Experiment 20000173 PARAMETER Experiment Name: At_42deg_Heat_P Parameter: Tissue Value: Aerial
  misc_feature: MA Experiment ID: 20000179 Result: Up-regulated in Transcription
  misc_feature: MA Experiment 20000179 PARAMETER Experiment Name: At_Germinating_Seeds_P Parameter: Age (hr) Value: 6 vs. 0
  misc_feature: MA Experiment 20000179 PARAMETER Experiment Name: At_Germinating_Seeds_P Parameter: Tissue Value: Germinating Seeds
  misc_feature: MA Experiment ID: 20000180 Result: Up-regulated in Transcription
  misc_feature: MA Experiment 20000180 PARAMETER Experiment Name: At_Germinating_Seeds_P Parameter: Age (hr) Value: 24 vs. 0
  misc_feature: MA Experiment 20000180 PARAMETER Experiment Name: At_Germinating_Seeds_P Parameter: Tissue Value: Germinating Seeds
  misc_feature: MA Experiment ID: 20000185 Result: Up-regulated in Transcription
  misc_feature: MA Experiment 20000185 PARAMETER Experiment Name: At_Roots__P Parameter: Age (day) Value: 7 vs. 21
  misc_feature: MA Experiment 20000185 PARAMETER Experiment Name: At_Roots__P Parameter: Organism Value: A. thaliana
  misc_feature: MA Experiment 20000185 PARAMETER Experiment Name: At_Roots__P Parameter: Tissue Value: Roots vs. Whole Plant
  misc_feature: MA Experiment ID: 20000234 Result: Up-regulated in Transcription
  misc_feature: MA Experiment 20000234 PARAMETER Experiment Name: At_Siliques_P Parameter: Age (day) Value: 21
  misc_feature: MA Experiment 20000234 PARAMETER Experiment Name: At_Siliques_P Parameter: Organism Value: A. thaliana
  misc_feature: MA Experiment 20000234 PARAMETER Experiment Name: At_Siliques_P Parameter: Plant Line Value: WS
  misc_feature: MA Experiment 20000234 PARAMETER Experiment Name: At_Siliques_P Parameter: Tissue Value: Less Than 5mm Siliques vs. Whole Plant
  misc_feature: MA Experiment ID: 20000235 Result: Up-regulated in Transcription
  misc_feature: MA Experiment 20000235 PARAMETER Experiment Name: At_Siliques_P Parameter: Age (day) Value: 21
  misc_feature: MA Experiment 20000235 PARAMETER Experiment Name: At_Siliques_P Parameter: Organism Value: A. thaliana
  misc_feature: MA Experiment 20000235 PARAMETER Experiment Name: At_Siliques_P Parameter: Plant Line Value: WS
  misc_feature: MA Experiment 20000235 PARAMETER Experiment Name: At_Siliques_P Parameter: Tissue Value: 5-10mm Siliques vs. Whole Plant
  misc_feature: MA Experiment ID: 20000265 Result: Up-regulated in Transcription
  misc_feature: MA Experiment 20000265 PARAMETER Experiment Name: At_Open_Flower_P Parameter: Age (day) Value: 21
  misc_feature: MA Experiment 20000265 PARAMETER Experiment Name: At_Open_Flower_P Parameter: Plant Line Value: WS
  misc_feature: MA Experiment 20000265 PARAMETER Experiment Name: At_Open_Flower_P Parameter: Tissue Value: Closed Flower vs. Whole Plant
  misc_feature: MA Experiment ID: 20000286 Result: Up-regulated in Transcription
  misc_feature: MA Experiment 20000286 PARAMETER Experiment Name: At_Open_Flower_P Parameter: Age (day) Value: 21
  misc_feature: MA Experiment 20000286 PARAMETER Experiment Name: At_Open_Flower_P Parameter: Plant Line Value: WS
  misc_feature: MA Experiment 20000286 PARAMETER Experiment Name: At_Open_Flower_P Parameter: Tissue Value: Half Open vs. Whole Plant
  misc_feature: MA Experiment ID: 20000439 Result: Up-regulated in Transcription
  misc_feature: MA Experiment 20000439 PARAMETER Experiment Name: At_Roots__P Parameter: Age (day) Value: 14 vs. 21
  misc_feature: MA Experiment 20000439 PARAMETER Experiment Name: At_Roots__P Parameter: Organism Value: A. thaliana
  misc_feature: MA Experiment 20000439 PARAMETER Experiment Name: At_Roots__P Parameter: Tissue Value: Roots vs. Whole Plant
  misc_feature: MA Experiment ID: 20001451 Result: Down-regulated in Transcription
  misc_feature: MA Experiment 20001451 PARAMETER Experiment Name: At_Far-red-induction_P Parameter: Age (day) Value: 7
  misc_feature: MA Experiment 20001451 PARAMETER Experiment Name: At_Far-red-induction_P Parameter: Light Value: Far-red vs. White
  misc_feature: MA Experiment 20001451 PARAMETER Experiment Name: At_Far-red-induction_P Parameter: Organism Value: A. thaliana
  misc_feature: MA Experiment 20001451 PARAMETER Experiment Name: At_Far-red-induction_P Parameter: Plant Line Value: Columbia
  misc_feature: MA Experiment 20001451 PARAMETER Experiment Name: At_Far-red-induction_P Parameter: Timepoint (hr) Value: 24
  misc_feature: MA Experiment 20001451 PARAMETER Experiment Name: At_Far-red-induction_P Parameter: Tissue Value: Whole Plant
aaagcataatgacggaagagctcatcgaccaatcaccaccacctgacccagacccgattcaaaattcgaatttaataatccacccaagacgtgttcctttcgagcacggccttcttccgatccagaagctcgtttttaccgacccgattcaaactctagctccgatcaagcaaaagttagcttctttggcgacgaatcatcgcgtcggatctgctgccatttccgatgcactctcgatctccgatgaccatgcgcgcctcgttctcgaaactctctcttcggtgctccattgcgagactgacccattggttttggccaaacctgaggaagttgattccgtgggagctgatttgagggatctgatattgtttctctacattcaatcgtataagaagttattgcctaggacgcataaagactctgcttctgtggctgatgtttggccttcgacttctgcttttgatggatacttgtcggcattatctccaattcagcttgttcgtagcaacagccgtcggtttatgccatcaccgacagatgaagaagctcatcaattatcgtatctgcaaaagcacattgcaaatattatttctctccttgcagagcctgtggagggacaaggagatgattctttggtcctgtctatggagagtttggagcacattgggtttcttgttcattatggtgataagggatttgatgtaccttctttaagccaagctactcctttttttgcgaattctgatcctgatatgcccgctgtccccgttcctgcttcccaagtgaatgattggcttctcaaagacatagcttccgccttagaaagcatttctaacagaatctctgggaaagaaaatggggcatctaatgcctctgatcagaatgctgcaatggctgattctagtgtagctcttaataaagtttcatctaacgacagaggtccatgtattattgagggagtctctaagacctcacttttcaagcaggcttctgatcttaagggtagatcagtgaaggttgccaattgccatgattctgttatttatctgttagcgccattgagatatgcaactgtgtatgggtgttctgattctactatcgttctgggagctgctggcaaggcagtaaaagttgagcattgtgagagagttcatgtgattgtagctaccaaacgaatttgcatcgccaattgccgtgaatgtgtgttctttttgggagtcaatcagcgacctcttatagttggtgataaccacaaactacaggttgctccatataatacattttactcacacttggaggagcacataaccgaggtaggaattcagccaactatcaacaaatggaacgaatccttggcgctcggagcaattgatccgcatgactcactatcacatccgactggtgcctctgataaacaagctgaaccggcttcttgtgtggaccctgaccagttcactacctttttgatcccaaactggtttgcgggtgaggcgattggttccacgaaagacaatccatttccattgccagatgcatataaggcagtgcagcagacaaaccttaagaacttagaggaaacaagacaatccttgagagaaacacctctcgaagaaaaccgaaaacgagaactcactacagcgttccacatgtatttcaaagactggctatacgcgacgggaaatattcggcaactttactgcctacaaggcgattaagaccaatggcgattgaaaatgtcagagtcactgtagagttctcttgatccgttccttctcagagatttgctagcacgtttgacatcagaatttaactgcacagcacgctctctaactcctaaagctctgtttttttgtgtgtaggtttctctctgcttttatcgtatttattagtcttaaatatccacgtttttgtccttgaaaaacattaagccatcttgtcttgttgttgatttctttcaattgttataacaacttttctcaataccatatatataaatcttttagtaac

SEQ ID NO: 104294 - protein, 570 aa, Arabidopsis thaliana
  peptide (1)..(570): Ceres Seq. ID no. 13614710
  misc_feature (165)..(556): Homolog of NCBI NO: 7452467 NR Description: hypothetical protein At2g42230 [imported] - thaliana >gi|2673914|gb|AAB88648.1| hypothetical protein
  misc_feature (3)..(113): Homolog of NCBI NO: 7452467 NR Description: hypothetical protein At2g42230 [imported] - thaliana >gi|2673914|gb|AAB88648.1| hypothetical protein
  misc_feature (165)..(570): Homolog of NCBI NO: 30688947 NR Description: expressed protein [Arabidopsis thaliana]
  misc_feature (3)..(113): Homolog of NCBI NO: 30688947 NR Description: expressed protein [Arabidopsis thaliana]
  misc_feature (3)..(570): Homolog of NCBI NO: 18410836 NR Description: expressed protein [Arabidopsis thaliana] AT3g57890/T10K17_100 [Arabidopsis thaliana]
  misc_feature (169)..(570): Homolog of NCBI NO: 11280529 NR Description: hypothetical protein T10K17.100 - Arabidopsis >gi|6729532|emb|CAB67617.1| putative protein [Arabidopsis
  misc_feature (3)..(292): Homolog of NCBI NO: 11280529 NR Description: hypothetical protein T10K17.100 - Arabidopsis >gi|6729532|emb|CAB67617.1| putative protein [Arabidopsis
  misc_feature (73)..(454): Homolog of NCBI NO: 34869310 NR Description: similar to hypothetical protein FLJ10560 [Rattus
  misc_feature (481)..(564): Homolog of NCBI NO: 34869310 NR Description: similar to hypothetical protein FLJ10560 [Rattus
  misc_feature (73)..(453): Homolog of NCBI NO: 8922517 NR Description: hypothetical protein FLJ10560 [Homo sapiens] unnamed protein product [Homo sapiens]
SIMTEELIDQSPPPDPDPIQNSNLIIHPRRVPFEHGLLPIQKLVFTDPIQTLAPIKQKLASLATNHRVGSAAISDALSISDDHARLVLETLSSVLHCETDPLVLAKPEEVDSVGADLRDLILFLYIQSYKKLLPRTHKDSASVADVWPSTSAFDGYLSALSPIQLVRSNSRRFMPSPTDEEAHQLSYLQKHIANIISLLAEPVEGQGDDSLVLSMESLEHIGFLVHYGDKGFDVPSLSQATPFFANSDPDMPAVPVPASQVNDWLLKDIASALESISNRISGKENGASNASDQNAAMADSSVALNKVSSNDRGPCIIEGVSKTSLFKQASDLKGRSVKVANCHDSVIYLLAPLRYATVYGCSDSTIVLGAAGKAVKVEHCERVHVIVATKRICIANCRECVFFLGVNQRPLIVGDNHKLQVAPYNTFYSHLEEHITEVGIQPTINKWNESLALGAIDPHDSLSHPTGASDKQAEPASCVDPDQFTTFLIPNWFAGEAIGSTKDNPFPLPDAYKAVQQTNLKNLEETRQSLRETPLEENRKRELTTAFHMYFKDWLYATGNIRQLYCLQGD

SEQ ID NO: 104295 - protein, 568 aa, Arabidopsis thaliana
  peptide (1)..(568): Ceres Seq. ID no. 13614711
  misc_feature (163)..(554): Homolog of NCBI NO: 7452467 NR Description: hypothetical protein At2g42230 [imported] - thaliana >gi|2673914|gb|AAB88648.1| hypothetical protein
  misc_feature (1)..(111): Homolog of NCBI NO: 7452467 NR Description: hypothetical protein At2g42230 [imported] - thaliana >gi|2673914|gb|AAB88648.1| hypothetical protein
  misc_feature (163)..(568): Homolog of NCBI NO: 30688947 NR Description: expressed protein [Arabidopsis thaliana]
  misc_feature (1)..(111): Homolog of NCBI NO: 30688947 NR Description: expressed protein [Arabidopsis thaliana]
  misc_feature (1)..(568): Homolog of NCBI NO: 18410836 NR Description: expressed protein [Arabidopsis thaliana] AT3g57890/T10K17_100 [Arabidopsis thaliana]
  misc_feature (167)..(568): Homolog of NCBI NO: 11280529 NR Description: hypothetical protein T10K17.100 - Arabidopsis >gi|6729532|emb|CAB67617.1| putative protein [Arabidopsis
  misc_feature (1)..(290): Homolog of NCBI NO: 11280529 NR Description: hypothetical protein T10K17.100 - Arabidopsis >gi|6729532|emb|CAB67617.1| putative protein [Arabidopsis
  misc_feature (71)..(452): Homolog of NCBI NO: 34869310 NR Description: similar to hypothetical protein FLJ10560 [Rattus
  misc_feature (479)..(562): Homolog of NCBI NO: 34869310 NR Description: similar to hypothetical protein FLJ10560 [Rattus
  misc_feature (71)..(451): Homolog of NCBI NO: 8922517 NR Description: hypothetical protein FLJ10560 [Homo sapiens] unnamed protein product [Homo sapiens]
MTEELIDQSPPPDPDPIQNSNLIIHPRRVPFEHGLLPIQKLVFTDPIQTLAPIKQKLASLATNHRVGSAAISDALSISDDHARLVLETLSSVLHCETDPLVLAKPEEVDSVGADLRDLILFLYIQSYKKLLPRTHKDSASVADVWPSTSAFDGYLSALSPIQLVRSNSRRFMPSPTDEEAHQLSYLQKHIANIISLLAEPVEGQGDDSLVLSMESLEHIGFLVHYGDKGFDVPSLSQATPFFANSDPDMPAVPVPASQVNDWLLKDIASALESISNRISGKENGASNASDQNAAMADSSVALNKVSSNDRGPCIIEGVSKTSLFKQASDLKGRSVKVANCHDSVIYLLAPLRYATVYGCSDSTIVLGAAGKAVKVEHCERVHVIVATKRICIANCRECVFFLGVNQRPLIVGDNHKLQVAPYNTFYSHLEEHITEVGIQPTINKWNESLALGAIDPHDSLSHPTGASDKQAEPASCVDPDQFTTFLIPNWFAGEAIGSTKDNPFPLPDAYKAVQQTNLKNLEETRQSLRETPLEENRKRELTTAFHMYFKDWLYATGNIRQLYCLQGD

SEQ ID NO: 104296 - protein, 397 aa, Arabidopsis thaliana
  peptide (1)..(397): Ceres Seq. ID no. 13614712
  misc_feature (1)..(383): Homolog of NCBI NO: 7452467 NR Description: hypothetical protein At2g42230 [imported] - thaliana >gi|2673914|gb|AAB88648.1| hypothetical protein
  misc_feature (1)..(397): Homolog of NCBI NO: 30688947 NR Description: expressed protein [Arabidopsis thaliana]
  misc_feature (1)..(397): Homolog of NCBI NO: 18410836 NR Description: expressed protein [Arabidopsis thaliana] AT3g57890/T10K17_100 [Arabidopsis thaliana]
  misc_feature (1)..(397): Homolog of NCBI NO: 11280529 NR Description: hypothetical protein T10K17.100 - Arabidopsis >gi|6729532|emb|CAB67617.1| putative protein [Arabidopsis
  misc_feature (1)..(119): Homolog of NCBI NO: 11280529 NR Description: hypothetical protein T10K17.100 - Arabidopsis >gi|6729532|emb|CAB67617.1| putative protein [Arabidopsis
  misc_feature (1)..(281): Homolog of NCBI NO: 34869310 NR Description: similar to hypothetical protein FLJ10560 [Rattus
  misc_feature (308)..(391): Homolog of NCBI NO: 34869310 NR Description: similar to hypothetical protein FLJ10560 [Rattus
  misc_feature (1)..(280): Homolog of NCBI NO: 8922517 NR Description: hypothetical protein FLJ10560 [Homo sapiens] unnamed protein product [Homo sapiens]
  misc_feature (144)..(384): Homolog of NCBI NO: 29250580 NR Description: GLP_254_3153_1495 [Giardia lamblia ATCC 50803]
MPSPTDEEAHQLSYLQKHIANIISLLAEPVEGQGDDSLVLSMESLEHIGFLVHYGDKGFDVPSLSQATPFFANSDPDMPAVPVPASQVNDWLLKDIASALESISNRISGKENGASNASDQNAAMADSSVALNKVSSNDRGPCIIEGVSKTSLFKQASDLKGRSVKVANCHDSVIYLLAPLRYATVYGCSDSTIVLGAAGKAVKVEHCERVHVIVATKRICIANCRECVFFLGVNQRPLIVGDNHKLQVAPYNTFYSHLEEHITEVGIQPTINKWNESLALGAIDPHDSLSHPTGASDKQAEPASCVDPDQFTTFLIPNWFAGEAIGSTKDNPFPLPDAYKAVQQTNLKNLEETRQSLRETPLEENRKRELTTAFHMYFKDWLYATGNIRQLYCLQGD

SEQ ID NO: 104297 - DNA, 1234 bp, Arabidopsis thaliana
  misc_feature (1)..(1234): Ceres Seq. ID no. 13614725
  misc_feature: MA Experiment ID: 108434 Result: Up-regulated in Transcription
  misc_feature: MA Experiment 108434 PARAMETER Experiment Name: At_Root_Tips_cDNA_P Parameter: Tissue Value: Root Tips
  misc_feature: MA Experiment ID: 108461 Result: Up-regulated in Transcription
  misc_feature: MA Experiment 108461 PARAMETER Experiment Name: At_Germinating_Seeds_cDNA_P Parameter: Age (day) Value: 1 vs. 0
  misc_feature: MA Experiment 108461 PARAMETER Experiment Name: At_Germinating_Seeds_cDNA_P Parameter: Tissue Value: Germinating Seeds
  misc_feature: MA Experiment ID: 108462 Result: Up-regulated in Transcription
  misc_feature: MA Experiment 108462 PARAMETER Experiment Name: At_Germinating_Seeds_cDNA_P Parameter: Age (day) Value: 2 vs. 0
  misc_feature: MA Experiment 108462 PARAMETER Experiment Name: At_Germinating_Seeds_cDNA_P Parameter: Tissue Value: Germinating Seeds
  misc_feature: MA Experiment ID: 108463 Result: Up-regulated in Transcription
  misc_feature: MA Experiment 108463 PARAMETER Experiment Name: At_Germinating_Seeds_cDNA_P Parameter: Age (day) Value: 3 vs. 0
  misc_feature: MA Experiment 108463 PARAMETER Experiment Name: At_Germinating_Seeds_cDNA_P Parameter: Tissue Value: Germinating Seeds
  misc_feature: MA Experiment ID: 108595 Result: Up-regulated in Transcription
  misc_feature: MA Experiment 108595 PARAMETER Experiment Name: At_Ler-pi_Ovule_cDNA_P Parameter: Plant Line Value: null
  misc_feature: MA Experiment ID: 20000179 Result: Up-regulated in Transcription
  misc_feature: MA Experiment 20000179 PARAMETER Experiment Name: At_Germinating_Seeds_P Parameter: Age (hr) Value: 6 vs. 0
  misc_feature: MA Experiment 20000179 PARAMETER Experiment Name: At_Germinating_Seeds_P Parameter: Tissue Value: Germinating Seeds
  misc_feature: MA Experiment ID: 20000180 Result: Up-regulated in Transcription
  misc_feature: MA Experiment 20000180 PARAMETER Experiment Name: At_Germinating_Seeds_P Parameter: Age (hr) Value: 24 vs. 0
  misc_feature: MA Experiment 20000180 PARAMETER Experiment Name: At_Germinating_Seeds_P Parameter: Tissue Value: Germinating Seeds
  misc_feature: MA Experiment ID: 20000185 Result: Up-regulated in Transcription
  misc_feature: MA Experiment 20000185 PARAMETER Experiment Name: At_Roots__P Parameter: Age (day) Value: 7 vs. 21
  misc_feature: MA Experiment 20000185 PARAMETER Experiment Name: At_Roots__P Parameter: Organism Value: A. thaliana
  misc_feature: MA Experiment 20000185 PARAMETER Experiment Name: At_Roots__P Parameter: Tissue Value: Roots vs. Whole Plant
  misc_feature: MA Experiment ID: 20000227 Result: Up-regulated in Transcription
  misc_feature: MA Experiment 20000227 PARAMETER Experiment Name: At_Root-Tips-vs-Tops_P Parameter: Tissue Value: Root Tips vs. Root Tops
  misc_feature: MA Experiment ID: 20000234 Result: Up-regulated in Transcription
  misc_feature: MA Experiment 20000234 PARAMETER Experiment Name: At_Siliques_P Parameter: Age (day) Value: 21
  misc_feature: MA Experiment 20000234 PARAMETER Experiment Name: At_Siliques_P Parameter: Organism Value: A. thaliana
  misc_feature: MA Experiment 20000234 PARAMETER Experiment Name: At_Siliques_P Parameter: Plant Line Value: WS
  misc_feature: MA Experiment 20000234 PARAMETER Experiment Name: At_Siliques_P Parameter: Tissue Value: Less Than 5mm Siliques vs. Whole Plant
  misc_feature: MA Experiment ID: 20000264 Result: Up-regulated in Transcription
  misc_feature: MA Experiment 20000264 PARAMETER Experiment Name: At_Open_Flower_P Parameter: Age (day) Value: 21
  misc_feature: MA Experiment 20000264 PARAMETER Experiment Name: At_Open_Flower_P Parameter: Plant Line Value: WS
  misc_feature: MA Experiment 20000264 PARAMETER Experiment Name: At_Open_Flower_P Parameter: Tissue Value: Open Flower vs. Whole Plant
  misc_feature: MA Experiment ID: 20000265 Result: Up-regulated in Transcription
  misc_feature: MA Experiment 20000265 PARAMETER Experiment Name: At_Open_Flower_P Parameter: Age (day) Value: 21
  misc_feature: MA Experiment 20000265 PARAMETER Experiment Name: At_Open_Flower_P Parameter: Plant Line Value: WS
  misc_feature: MA Experiment 20000265 PARAMETER Experiment Name: At_Open_Flower_P Parameter: Tissue Value: Closed Flower vs. Whole Plant
  misc_feature: MA Experiment ID: 20000286 Result: Up-regulated in Transcription
  misc_feature: MA Experiment 20000286 PARAMETER Experiment Name: At_Open_Flower_P Parameter: Age (day) Value: 21
  misc_feature: MA Experiment 20000286 PARAMETER Experiment Name: At_Open_Flower_P Parameter: Plant Line Value: WS
  misc_feature: MA Experiment 20000286 PARAMETER Experiment Name: At_Open_Flower_P Parameter: Tissue Value: Half Open vs. Whole Plant
  misc_feature: MA Experiment ID: 20000439 Result: Up-regulated in Transcription
  misc_feature: MA Experiment 20000439 PARAMETER Experiment Name: At_Roots__P Parameter: Age (day) Value: 14 vs. 21
  misc_feature: MA Experiment 20000439 PARAMETER Experiment Name: At_Roots__P Parameter: Organism Value: A. thaliana
  misc_feature: MA Experiment 20000439 PARAMETER Experiment Name: At_Roots__P Parameter: Tissue Value: Roots vs. Whole Plant
  misc_feature: MA Experiment ID: 20000527 Result: Down-regulated in Transcription
  misc_feature: MA Experiment 20000527 PARAMETER Experiment Name: At_10percent_PEG_P Parameter: Age (day) Value: 20
  misc_feature: MA Experiment 20000527 PARAMETER Experiment Name: At_10percent_PEG_P Parameter: Organism Value: A. thaliana
  misc_feature: MA Experiment 20000527 PARAMETER Experiment Name: At_10percent_PEG_P Parameter: Plant Line Value: WS
  misc_feature: MA Experiment 20000527 PARAMETER Experiment Name: At_10percent_PEG_P Parameter: Timepoint (day) Value: 20
  misc_feature: MA Experiment 20000527 PARAMETER Experiment Name: At_10percent_PEG_P Parameter: Tissue Value: Whole Plant
  misc_feature: MA Experiment 20000527 PARAMETER Experiment Name: At_10percent_PEG_P Parameter: Treatment Value: 10percent PEG vs. No Treatment
  misc_feature: MA Experiment ID: 20001560 Result: Up-regulated in Transcription
  misc_feature: MA Experiment 20001560 PARAMETER Experiment Name: At_Drought_Soil_Dry_P Parameter: Age (day) Value: 28
  misc_feature: MA Experiment 20001560 PARAMETER Experiment Name: At_Drought_Soil_Dry_P Parameter: Organism Value: A. thaliana
  misc_feature: MA Experiment 20001560 PARAMETER Experiment Name: At_Drought_Soil_Dry_P Parameter: Plant Line Value: WS
  misc_feature: MA Experiment 20001560 PARAMETER Experiment Name: At_Drought_Soil_Dry_P Parameter: Post Timepoint (hr) Value: None
  misc_feature: MA Experiment 20001560 PARAMETER Experiment Name: At_Drought_Soil_Dry_P Parameter: Post-Treatment Value: None
  misc_feature: MA Experiment 20001560 PARAMETER Experiment Name: At_Drought_Soil_Dry_P Parameter: Timepoint (day) Value: 14
  misc_feature: MA Experiment 20001560 PARAMETER Experiment Name: At_Drought_Soil_Dry_P Parameter: Treatment Value: Drought vs. No Drought
  misc_feature: MA Experiment ID: 20001906 Result: Down-regulated in Transcription
  misc_feature: MA Experiment 20001906 PARAMETER Experiment Name: At_Drought_Reproduction_P Parameter: Age (day) Value: 35
  misc_feature: MA Experiment 20001906 PARAMETER Experiment Name: At_Drought_Reproduction_P Parameter: Organism Value: A. thaliana
  misc_feature: MA Experiment 20001906 PARAMETER Experiment Name: At_Drought_Reproduction_P Parameter: Plant Line Value: WS
  misc_feature: MA Experiment 20001906 PARAMETER Experiment Name: At_Drought_Reproduction_P Parameter: Timepoint (day) Value: 5
  misc_feature: MA Experiment 20001906 PARAMETER Experiment Name: At_Drought_Reproduction_P Parameter: Tissue Value: Siliques
  misc_feature: MA Experiment 20001906 PARAMETER Experiment Name: At_Drought_Reproduction_P Parameter: Treatment Value: Drought vs. No Drought
acaccaatctcgctctcaccacaaaacagagaatctcagatcgaagaagcaaagaaagagagaatgggtttcacttcccgaggaaacccttcttttctcttcttcttcttcttcttcctctgtctctccacagtctctgcttacatcaacagcacaagcagcaataatgatgaagtaagaagagagctagcttctgggagatgtaattggtttagagggaattgggtttatgatgtaaagtacccactttatgatccttataaatgtccattcatagatccacagtttaactgtaagaagtatggtcgtcctgacaatgcttaccttaagtatcgatggcaaccatcttcttgctctctccccagattcaatgggttgtatttcttgaggaggatgagagggaagaagataatgttcgttggagattcactaagcacaaacatgtggcaatctcttgcttgtctaattcactcttgggttcctaacactcgttacactcttattcgccaaaagggtcttgcttcacttacctttgaggaatacggagtgacgttgttgctatacagaacacagttcttggtagatttgaatgtggagaaagttgggagagtgcttaagcttgattccattaagcaagggaatatgtggagaggcatggacgttttgattttcaactcgtggcattggtggacacacaccgaacacattcagccgtgggattacatggaagatgggaataggttgtacaaagacatgaaccggctcgttgctttctacaaaggaatgaccacttgggctcgatgggttaatgcttacgtcgatccttctaagactaaagtcttcttcaacggcgtgtctcctactcattacgagggaaaggattggggagagccaatgaactcatgtaggagtcaaacgcagccattttacggaaggaagtatccaggagggacaccaatggcttgggtgattctaaacaaagtgatgaggagattgaagaaaccggtccattggctcgatataaccggtctgtctcagcttcgtaaagatgctcatccttctgctttcagtgggaaccatcctggtaatgactgtagccattggtgtctccctggtttgcctgatacttggaacttgctcttttactctactcttttctcttcttaattaattcctttctcatcaatgtataagttaacttaaaacaacaatcaattatttttagttatctttc

SEQ ID NO: 104298 - protein, 388 aa, Arabidopsis thaliana
  peptide (1)..(388): Ceres Seq. ID no. 13614726
  misc_feature (22)..(388): Homolog of NCBI NO: 18406003 NR Description: expressed protein [Arabidopsis thaliana]
  misc_feature (63)..(387): Homolog of NCBI NO: 21593142 NR Description: unknown [Arabidopsis thaliana]
  misc_feature (63)..(387): Homolog of NCBI NO: 28393769 NR Description: unknown protein [Arabidopsis thaliana]
  misc_feature (60)..(385): Homolog of NCBI NO: 18396930 NR Description: expressed protein [Arabidopsis thaliana] unknown protein [Arabidopsis thaliana]
  misc_feature (60)..(387): Homolog of NCBI NO: 34911864 NR Description: OSJNBb0032K15.9 [Oryza sativa (japonica
  misc_feature (61)..(385): Homolog of NCBI NO: 18403435 NR Description: expressed protein [Arabidopsis thaliana] expressed protein [Arabidopsis thaliana]
  misc_feature (60)..(385): Homolog of NCBI NO: 25366741 NR Description: F28N24.24 protein - Arabidopsis thaliana
  misc_feature (68)..(388): Homolog of NCBI NO: 15224585 NR Description: expressed protein [Arabidopsis thaliana]
  misc_feature (32)..(387): Homolog of NCBI NO: 15219157 NR Description: hypothetical protein [Arabidopsis thaliana]
  misc_feature (68)..(388): Homolog of NCBI NO: 30350855 NR Description: hypothetical protein At2g30900 [Arabidopsis
TPISLSPQNRESQIEEAKKERMGFTSRGNPSFLFFFFFFLCLSTVSAYINSTSSNNDEVRRELASGRCNWFRGNWVYDVKYPLYDPYKCPFIDPQFNCKKYGRPDNAYLKYRWQPSSCSLPRFNGLYFLRRMRGKKIMFVGDSLSTNMWQSLACLIHSWVPNTRYTLIRQKGLASLTFEEYGVTLLLYRTQFLVDLNVEKVGRVLKLDSIKQGNMWRGMDVLIFNSWHWWTHTEHIQPWDYMEDGNRLYKDMNRLVAFYKGMTTWARWVNAYVDPSKTKVFFNGVSPTHYEGKDWGEPMNSCRSQTQPFYGRKYPGGTPMAWVILNKVMRRLKKPVHWLDITGLSQLRKDAHPSAFSGNHPGNDCSHWCLPGLPDTWNLLFYSTLFSS

SEQ ID NO: 104299 - protein, 367 aa, Arabidopsis thaliana
  peptide (1)..(367): Ceres Seq. ID no. 13614727
  misc_feature (1)..(367): Homolog of NCBI NO: 18406003 NR Description: expressed protein [Arabidopsis thaliana]
  misc_feature (42)..(366): Homolog of NCBI NO: 21593142 NR Description: unknown [Arabidopsis thaliana]
  misc_feature (42)..(366): Homolog of NCBI NO: 28393769 NR Description: unknown protein [Arabidopsis thaliana]
  misc_feature (39)..(364): Homolog of NCBI NO: 18396930 NR Description: expressed protein [Arabidopsis thaliana] unknown protein [Arabidopsis thaliana]
  misc_feature (39)..(366): Homolog of NCBI NO: 34911864 NR Description: OSJNBb0032K15.9 [Oryza sativa (japonica
  misc_feature (40)..(364): Homolog of NCBI NO: 18403435 NR Description: expressed protein [Arabidopsis thaliana] expressed protein [Arabidopsis thaliana]
  misc_feature (39)..(364): Homolog of NCBI NO: 25366741 NR Description: F28N24.24 protein - Arabidopsis thaliana
  misc_feature (47)..(367): Homolog of NCBI NO: 15224585 NR Description: expressed protein [Arabidopsis thaliana]
  misc_feature (11)..(366): Homolog of NCBI NO: 15219157 NR Description: hypothetical protein [Arabidopsis thaliana]
  misc_feature (47)..(367): Homolog of NCBI NO: 30350855 NR Description: hypothetical protein At2g30900 [Arabidopsis
MGFTSRGNPSFLFFFFFFLCLSTVSAYINSTSSNNDEVRRELASGRCNWFRGNWVYDVKYPLYDPYKCPFIDPQFNCKKYGRPDNAYLKYRWQPSSCSLPRFNGLYFLRRMRGKKIMFVGDSLSTNMWQSLACLIHSWVPNTRYTLIRQKGLASLTFEEYGVTLLLYRTQFLVDLNVEKVGRVLKLDSIKQGNMWRGMDVLIFNSWHWWTHTEHIQPWDYMEDGNRLYKDMNRLVAFYKGMTTWARWVNAYVDPSKTKVFFNGVSPTHYEGKDWGEPMNSCRSQTQPFYGRKYPGGTPMAWVILNKVMRRLKKPVHWLDITGLSQLRKDAHPSAFSGNHPGNDCSHWCLPGLPDTWNLLFYSTLFSS

SEQ ID NO: 104300 - protein, 257 aa, Arabidopsis thaliana
  peptide (1)..(257): Ceres Seq. ID no. 13614728
  misc_feature (1)..(257): Homolog of NCBI NO: 18406003 NR Description: expressed protein [Arabidopsis thaliana]
  misc_feature (1)..(256): Homolog of NCBI NO: 21593142 NR Description: unknown [Arabidopsis thaliana]
  misc_feature (1)..(256): Homolog of NCBI NO: 28393769 NR Description: unknown protein [Arabidopsis thaliana]
  misc_feature (1)..(254): Homolog of NCBI NO: 18396930 NR Description: expressed protein [Arabidopsis thaliana] unknown protein [Arabidopsis thaliana]
  misc_feature (1)..(256): Homolog of NCBI NO: 34911864 NR Description: OSJNBb0032K15.9 [Oryza sativa (japonica
  misc_feature (1)..(254): Homolog of NCBI NO: 18403435 NR Description: expressed protein [Arabidopsis thaliana] expressed protein [Arabidopsis thaliana]
  misc_feature (1)..(254): Homolog of NCBI NO: 25366741 NR Description: F28N24.24 protein - Arabidopsis thaliana
  misc_feature (1)..(257): Homolog of NCBI NO: 15224585 NR Description: expressed protein [Arabidopsis thaliana]
  misc_feature (1)..(256): Homolog of NCBI NO: 15219157 NR Description: hypothetical protein [Arabidopsis thaliana]
  misc_feature (1)..(257): Homolog of NCBI NO: 30350855 NR Description: hypothetical protein At2g30900 [Arabidopsis
MRGKKIMFVGDSLSTNMWQSLACLIHSWVPNTRYTLIRQKGLASLTFEEYGVTLLLYRTQFLVDLNVEKVGRVLKLDSIKQGNMWRGMDVLIFNSWHWWTHTEHIQPWDYMEDGNRLYKDMNRLVAFYKGMTTWARWVNAYVDPSKTKVFFNGVSPTHYEGKDWGEPMNSCRSQTQPFYGRKYPGGTPMAWVILNKVMRRLKKPVHWLDITGLSQLRKDAHPSAFSGNHPGNDCSHWCLPGLPDTWNLLFYSTLFSS

SEQ ID NO: 104301 - DNA, 1132 bp, Arabidopsis thaliana
  misc_feature (1)..(1132): Ceres Seq. ID no. 13614729
  misc_feature: MA Experiment ID: 108573 Result: Up-regulated in Transcription
  misc_feature: MA Experiment 108573 PARAMETER Experiment Name: At_Drought_cDNA_P Parameter: Timepoint (hr) Value: 6
  misc_feature: MA Experiment 108573 PARAMETER Experiment Name: At_Drought_cDNA_P Parameter: Tissue Value: Aerial
  misc_feature: MA Experiment 108573 PARAMETER Experiment Name: At_Drought_cDNA_P Parameter: Treatment Value: Drought vs. No Drought
  misc_feature: MA Experiment ID: 20000224 Result: Down-regulated in Transcription
ttctttcttcgtcttcaacttcttctaccgagattgattctatttcttccggatcttacgcaaccattactctcacctcaggcagaaatgtttctatgttgaagaagaaggaaatggttataagtcttggaagttttagtatcatcagttgtgtcttagaaaactgggaacggctcttttcctctgttaccatagctgagttagcttgagaaacttttgaattggattcagatcatgccttactttgctcagaggctttacaatacttgcaaggcgtctttctcttcagacggaccaataacagaagatgctctggagaaggttcgcaatgtcttggagaaaatcaagccatctgatgttggaattgagcaggatgctcaattggcacggtccaggtctggtcctctcaatgaacgcaatggaagtaatcagtctcccccagcaataaagtatcttcatttgcatgagtgtgacagtttctctataggaatcttctgtatgccaccttcttctatgatacctcttcataaccatccgggcatgaccgtgctaagcaagctcgtttatggttcaatgcatgtgaagtcatatgattggctagagcctcaactgaccgaaccagaggatccatcacaagcaagacctgctaaactggtgaaggatactgagatgacggctcaaagcccagtaacaacattatatccgaaaagtggtggcaacattcactgtttcaaagccatcacccattgtgctattcttgacatcttagctccaccttactcttcagagcatgatcggcattgcacttacttccggaaatccagaagagaagacttaccaggtgaattagaagtggatggagaagtggtcacagacgtgacatggcttgaggaatttcaaccgcctgatgactttgtgatacgacgaattccgtacagaggtcctgtcattagaacttgatgatgatctaatctttacttgtcacataatttgggcggcttcgggtttttattttttatttatattcctttcggaaataatttggggggtctttttatattgcaaacgggattgtacatactaatttgtgatacaccgtgtgtctccgtttcattatattgcaaaagacttc

SEQ ID NO: 104302 - protein, 241 aa, Arabidopsis thaliana [sequence omitted]

SEQ ID NO: 104303 - protein, 153 aa, Arabidopsis thaliana; identical to SEQ ID NO: 40249
  peptide (1)..(153): Ceres Seq. ID no. 13614731
  misc_feature (1)..(153): Homolog of NCBI NO: 18406030 NR Description: expressed protein [Arabidopsis thaliana] expressed protein [Arabidopsis thaliana]
  misc_feature (1)..(153): Homolog of NCBI NO: 25370572 NR Description: hypothetical protein At2g42670 [imported] -
  misc_feature (1)..(153): Homolog of NCBI NO: 21536850 NR Description: unknown [Arabidopsis thaliana]
  misc_feature (1)..(152): Homolog of NCBI NO: 15231104 NR Description: expressed protein [Arabidopsis thaliana]
  misc_feature (1)..(152): Homolog of NCBI NO: 38345647 NR Description: OSJNBb0040D15.1 [Oryza sativa (japonica
  misc_feature (1)..(151): Homolog of NCBI NO: 15242218 NR Description: expressed protein [Arabidopsis thaliana]
  misc_feature (1)..(152): Homolog of NCBI NO: 18394617 NR Description: expressed protein [Arabidopsis thaliana]
  misc_feature (1)..(152): Homolog of NCBI NO: 10176982 NR Description: contains similarity to unknown
  misc_feature (1)..(152): Homolog of NCBI NO: 15242505 NR Description: expressed protein [Arabidopsis thaliana] unknown [Arabidopsis thaliana] >gi|27808558|gb|AAO24559.1|
  misc_feature (1)..(152): Homolog of NCBI NO: 21618020 NR Description: unknown [Arabidopsis thaliana]

SEQ ID NO: 104304 - protein, 148 aa, Arabidopsis thaliana; identical to SEQ ID NO: 40250
  peptide (1)..(148): Ceres Seq. ID no. 13614732
  misc_feature (1)..(148): Homolog of NCBI NO: 18406030 NR Description: expressed protein [Arabidopsis thaliana] expressed protein [Arabidopsis thaliana]
  misc_feature (1)..(148): Homolog of NCBI NO: 25370572 NR Description: hypothetical protein At2g42670 [imported] -
  misc_feature (1)..(148): Homolog of NCBI NO: 21536850 NR Description: unknown [Arabidopsis thaliana]
  misc_feature (1)..(147): Homolog of NCBI NO: 15231104 NR Description: expressed protein [Arabidopsis thaliana]
  misc_feature (1)..(147): Homolog of NCBI NO: 38345647 NR Description: OSJNBb0040D15.1 [Oryza sativa (japonica
  misc_feature (1)..(146): Homolog of NCBI NO: 15242218 NR Description: expressed protein [Arabidopsis thaliana]
  misc_feature (1)..(147): Homolog of NCBI NO: 18394617 NR Description: expressed protein [Arabidopsis thaliana]
  misc_feature (1)..(147): Homolog of NCBI NO: 10176982 NR Description: contains similarity to unknown
  misc_feature (1)..(147): Homolog of NCBI NO: 15242505 NR Description: expressed protein [Arabidopsis thaliana] unknown [Arabidopsis thaliana] >gi|27808558|gb|AAO24559.1|
  misc_feature (1)..(147): Homolog of NCBI NO: 21618020 NR Description: unknown [Arabidopsis thaliana]

SEQ ID NO: 104305 - DNA, 1523 bp, Arabidopsis thaliana
  misc_feature (1)..(1523): Ceres Seq. ID no. 13614733
  misc_feature: MA Experiment ID: 108462 Result: Down-regulated in Transcription
  misc_feature: MA Experiment 108462 PARAMETER Experiment Name: At_Germinating_Seeds_cDNA_P Parameter: Age (day) Value: 2 vs. 0
  misc_feature: MA Experiment 108462 PARAMETER Experiment Name: At_Germinating_Seeds_cDNA_P Parameter: Tissue Value: Germinating Seeds
  misc_feature: MA Experiment ID: 108463 Result: Down-regulated in Transcription
  misc_feature: MA Experiment 108463 PARAMETER Experiment Name: At_Germinating_Seeds_cDNA_P Parameter: Age (day) Value: 3 vs. 0
  misc_feature: MA Experiment 108463 PARAMETER Experiment Name: At_Germinating_Seeds_cDNA_P Parameter: Tissue Value: Germinating Seeds
  misc_feature: MA Experiment ID: 108464 Result: Down-regulated in Transcription
  misc_feature: MA Experiment 108464 PARAMETER Experiment Name: At_Germinating_Seeds_cDNA_P Parameter: Age (day) Value: 4 vs. 0
  misc_feature: MA Experiment 108464 PARAMETER Experiment Name: At_Germinating_Seeds_cDNA_P Parameter: Tissue Value: Germinating Seeds
  misc_feature: MA Experiment ID: 108607 Result: Down-regulated in Transcription
  misc_feature: MA Experiment 108607 PARAMETER Experiment Name: At_100uM_ABA_cDNA_P Parameter: Timepoint (hr) Value: 4
  misc_feature: MA Experiment 108607 PARAMETER Experiment Name: At_100uM_ABA_cDNA_P Parameter: Tissue Value: Aerial
  misc_feature: MA Experiment 108607 PARAMETER Experiment Name: At_100uM_ABA_cDNA_P Parameter: Treatment Value: 100uM ABA vs. No Treatment
  misc_feature: MA Experiment ID: 20000087 Result: Down-regulated in Transcription
  misc_feature: MA Experiment 20000087 PARAMETER Experiment Name: At_100uM_ABA_Mutants_cDNA_P Parameter: Plant Line Value: WS
  misc_feature: MA Experiment 20000087 PARAMETER Experiment Name: At_100uM_ABA_Mutants_cDNA_P Parameter: Timepoint (hr) Value: 6
  misc_feature: MA Experiment 20000087 PARAMETER Experiment Name: At_100uM_ABA_Mutants_cDNA_P Parameter: Tissue Value: Aerial
  misc_feature: MA Experiment 20000087 PARAMETER Experiment Name: At_100uM_ABA_Mutants_cDNA_P Parameter: Treatment Value: 100uM ABA vs. No Treatment
  misc_feature: MA Experiment ID: 20000089 Result: Up-regulated in Transcription
  misc_feature: MA Experiment ID: 20000227 Result: Up-regulated in Transcription
  misc_feature: MA Experiment 20000227 PARAMETER Experiment Name: At_Root-Tips-vs-Tops_P Parameter: Tissue Value: Root Tips vs. Root Tops
  misc_feature: MA Experiment ID: 20000437 Result: Down-regulated in Transcription
  misc_feature: MA Experiment 20000437 PARAMETER Experiment Name: At_Drought_P Parameter: Age (day) Value: 8
  misc_feature: MA Experiment 20000437 PARAMETER Experiment Name: At_Drought_P Parameter: Organism Value: A. thaliana
  misc_feature: MA Experiment 20000437 PARAMETER Experiment Name: At_Drought_P Parameter: Plant Line Value: WS
  misc_feature: MA Experiment 20000437 PARAMETER Experiment Name: At_Drought_P Parameter: Timepoint (hr) Value: 24
  misc_feature: MA Experiment 20000437 PARAMETER Experiment Name: At_Drought_P Parameter: Tissue Value: Whole Plant
  misc_feature: MA Experiment 20000437 PARAMETER Experiment Name: At_Drought_P Parameter: Treatment Value: Drought vs. No Drought
  misc_feature: MA Experiment ID: 20000495 Result: Down-regulated in Transcription
  misc_feature: MA Experiment 20000495 PARAMETER Experiment Name: At_Guard_Cells_P Parameter: Harvest Date Value: 8/2/2002
  misc_feature: MA Experiment 20000495 PARAMETER Experiment Name: At_Guard_Cells_P Parameter: Organism Value: A. thaliana
  misc_feature: MA Experiment 20000495 PARAMETER Experiment Name: At_Guard_Cells_P Parameter: Tissue Value: Guard Cells vs. Leaves
  misc_feature: MA Experiment ID: 20000496 Result: Down-regulated in Transcription
  misc_feature: MA Experiment 20000496 PARAMETER Experiment Name: At_Guard_Cells_P Parameter: Harvest Date Value: 7/19/2002
  misc_feature: MA Experiment 20000496 PARAMETER Experiment Name: At_Guard_Cells_P Parameter: Organism Value: Canola
  misc_feature: MA Experiment 20000496 PARAMETER Experiment Name: At_Guard_Cells_P Parameter: Tissue Value: Guard Cells vs. Leaves
  misc_feature: MA Experiment ID: 20001451 Result: Down-regulated in Transcription
  misc_feature: MA Experiment 20001451 PARAMETER Experiment Name: At_Far-red-induction_P Parameter: Age (day) Value: 7
  misc_feature: MA Experiment 20001451 PARAMETER Experiment Name: At_Far-red-induction_P Parameter: Light Value: Far-red vs. White
  misc_feature: MA Experiment 20001451 PARAMETER Experiment Name: At_Far-red-induction_P Parameter: Organism Value: A. thaliana
  misc_feature: MA Experiment 20001451 PARAMETER Experiment Name: At_Far-red-induction_P Parameter: Plant Line Value: Columbia
  misc_feature: MA Experiment 20001451 PARAMETER Experiment Name: At_Far-red-induction_P Parameter: Timepoint (hr) Value: 24
  misc_feature: MA Experiment 20001451 PARAMETER Experiment Name: At_Far-red-induction_P Parameter: Tissue Value: Whole Plant
  misc_feature: MA Experiment ID: 20001558 Result: Up-regulated in Transcription
  misc_feature: MA Experiment 20001558 PARAMETER Experiment Name: At_Drought_Soil_Dry_P Parameter: Age (day) Value: 27
  misc_feature: MA Experiment 20001558 PARAMETER Experiment Name: At_Drought_Soil_Dry_P Parameter: Organism Value: A. thaliana
  misc_feature: MA Experiment 20001558 PARAMETER Experiment Name: At_Drought_Soil_Dry_P Parameter: Plant Line Value: WS
  misc_feature: MA Experiment 20001558 PARAMETER Experiment Name: At_Drought_Soil_Dry_P Parameter: Post Timepoint (hr) Value: 6
  misc_feature: MA Experiment 20001558 PARAMETER Experiment Name: At_Drought_Soil_Dry_P Parameter: Post-Treatment Value: Re-Water vs. No Drought
  misc_feature: MA Experiment 20001558 PARAMETER Experiment Name: At_Drought_Soil_Dry_P Parameter: Timepoint (day) Value: 13
  misc_feature: MA Experiment 20001558 PARAMETER Experiment Name: At_Drought_Soil_Dry_P Parameter: Treatment Value: Drought vs. No Drought
  misc_feature: MA Experiment ID: 20001757 Result: Up-regulated in Transcription
  misc_feature: MA Experiment 20001757 PARAMETER Experiment Name: At_50mM_NH4NO3_L-to-H_P Parameter: Timepoint (hr) Value: 6
  misc_feature: MA Experiment 20001757 PARAMETER Experiment Name: At_50mM_NH4NO3_L-to-H_P Parameter: Tissue Value: Leaf
  misc_feature: MA Experiment 20001757 PARAMETER Experiment Name: At_50mM_NH4NO3_L-to-H_P Parameter: Treatment Value: 50mM NH4NO3 vs 100mM Mannitol
aaaatcacatttcacacgaaaaacctcgagtgagtgaagaaacaatggcagctatgaagctcctactctctcaagctcgccgccaaggtctaatcaaacccttttcgtctccatttcaacaaatcccaagactcttctcttcatcttcatcttcatcttcatcttcatcttcatcatccgattcgaatccatctcccgattcaaacgaatctcgcaaaaaggctgttacaatcgagccagtatcgtacgcggccaaacccaaggatcagaaatctgaaccgaaaaatgttgaatcgacggagaaccttcagtctccagaatcagcgaactggactcgtgaagaaatccgatatgtgaaagactctccttcgatcaatccggtttcttacgctcagcgtgtggctccacttccggaggatcgtgtcgccggtgagaatgaaggagatagaactccagaggagatggagagggagaggaagaggattgaattagagaatcgagctagaagaaggtttttaagagctaatgctgttgaagaagatacttcttcacttcctttgccaactttgcttaaaccagagttgaagcatggaaagaaacctattttcgatctcatggaggccattagagagattaagggcaatgccaaggcgaaatttgatgaaactcttgaggcgcatgtgagattgggcattgaaaaaggaagatctgagctgatagttcgtggtactttggctctaccccactctgttaagaaggatgtgaaagtggctttctttgccgagggagctgatgcagaggatgcaaaagctgcaggagctgatgtcgttggtggtcttgagcttattgaagagatcttgaaaagtggcaagattgactttgatagatgtcttgcaactccaaaaatgatgccccgtgtttacaagatatcaagaattcttaacaatcatggtttgatgccaaaccccaaacaaggtagtgtgaccaaggatgttacgaaagcagtcaaagacgcaaaagctggacataccaaatttagaatggataaaacgtctattcttcatgtgccacttggaaagatgagcttttctgaagaggctttacgagagaatgttggtgcgtttatgaacgcccttttgctagcgaagcctgctggattgaaaaagacttcaaaatatgctggttatgtgaatgcattccacttatgcagtacgatgggaaagggttatccagtatcgatacagtcgttatccagagcagcggacctccataccaaattgcagctcaagtgagctagtggagtccaaaagattaatcttaatcatcccgtaaaagttttttttactgttttccaaatgctgaatctttgaaaacattatgatttgttgtctcttaggtagtctattgctcaattgatcgaattggcttctgtccttttctcctttgtttttgttgtttgagagcttatcatccactttccatagaggcccttcacttgaataaaacatcataaatttttgtcc

SEQ ID NO: 104306 - protein, 429 aa, Arabidopsis thaliana; identical to SEQ ID NO: 26234
  peptide (1)..(429): Ceres Seq. ID no. 13614734
  misc_feature (198)..(408): Pfam Name: Ribosomal protein L1p/L10e family Pfam Description: Ribosomal protein L1p/L10e family
  misc_feature (15)..(429): Homolog of NCBI NO: 30689119 NR Description: ribosomal protein L1p family [Arabidopsis >gi|20268740|gb|AAM14073.1| unknown protein [Arabidopsis >gi|21280899|gb|AAM45043.1| unknown protein [Arabidopsis
  misc_feature (15)..(288): Homolog of NCBI NO: 25408807 NR Description: hypothetical protein At2g42710 [imported] - thaliana >gi|4512681|gb|AAD21735.1| hypothetical protein thaliana] >gi|20198079|gb|AAM15388.1| hypothetical protein
  misc_feature (195)..(419): Homolog of NCBI NO: 15965098 NR Description: PROBABLE 50S RIBOSOMAL PROTEIN L1 [Sinorhizobium >gi|15074278|emb|CAC45924.1| PROBABLE 50S RIBOSOMAL PROTEIN L1
  misc_feature (198)..(420): Homolog of NCBI NO: 22966133 NR Description: hypothetical protein [Rhodospirillum rubrum]
  misc_feature (198)..(411): Homolog of NCBI NO: 27380525 NR Description: 50S ribosomal protein L1 [Bradyrhizobium >gi|27353689|dbj|BAC50679.1| 50S ribosomal protein L1
  misc_feature (193)..(417): Homolog of NCBI NO: 15889253 NR Description: AGR_C_3573p [Agrobacterium tumefaciens]
  misc_feature (193)..(417): Homolog of NCBI NO: 17935849 NR Description: 50S ribosomal protein L1 [Agrobacterium
  misc_feature (199)..(415): Homolog of NCBI NO: 22957081 NR Description: hypothetical protein [Rhodobacter sphaeroides]
  misc_feature (202)..(417): Homolog of NCBI NO: 9957210 NR Description: L1 [EDTA-degrading bacterium BNC1]
  misc_feature (202)..(417): Homolog of NCBI NO: 13470539 NR Description: 50S ribosomal protein L1 [Mesorhizobium loti]

SEQ ID NO: 104307 - protein, 415 aa, Arabidopsis thaliana; identical to SEQ ID NO: 26235
  peptide (1)..(415): Ceres Seq. ID no. 13614735
  misc_feature (184)..(394): Pfam Name: Ribosomal protein L1p/L10e family Pfam Description: Ribosomal protein L1p/L10e family
  misc_feature (1)..(415): Homolog of NCBI NO: 30689119 NR Description: ribosomal protein L1p family [Arabidopsis >gi|20268740|gb|AAM14073.1| unknown protein [Arabidopsis >gi|21280899|gb|AAM45043.1| unknown protein [Arabidopsis
  misc_feature (1)..(274): Homolog of NCBI NO: 25408807 NR Description: hypothetical protein At2g42710 [imported] - thaliana >gi|4512681|gb|AAD21735.1| hypothetical protein thaliana] >gi|20198079|gb|AAM15388.1| hypothetical protein
  misc_feature (181)..(405): Homolog of NCBI NO: 15965098 NR Description: PROBABLE 50S RIBOSOMAL PROTEIN L1 [Sinorhizobium >gi|15074278|emb|CAC45924.1| PROBABLE 50S RIBOSOMAL PROTEIN L1
  misc_feature (184)..(406): Homolog of NCBI NO: 22966133 NR Description: hypothetical protein [Rhodospirillum rubrum]
  misc_feature (184)..(397): Homolog of NCBI NO: 27380525 NR Description: 50S ribosomal protein L1 [Bradyrhizobium >gi|27353689|dbj|BAC50679.1| 50S ribosomal protein L1
  misc_feature (179)..(403): Homolog of NCBI NO: 15889253 NR Description: AGR_C_3573p [Agrobacterium tumefaciens]
  misc_feature (179)..(403): Homolog of NCBI NO: 17935849 NR Description: 50S ribosomal protein L1 [Agrobacterium
  misc_feature (185)..(401): Homolog of NCBI NO: 22957081 NR Description: hypothetical protein [Rhodobacter sphaeroides]
  misc_feature (188)..(403): Homolog of NCBI NO: 9957210 NR Description: L1 [EDTA-degrading bacterium BNC1]
  misc_feature (188)..(403): Homolog of NCBI NO: 13470539 NR Description: 50S ribosomal protein L1 [Mesorhizobium loti]

SEQ ID NO: 104308 - protein, 412 aa, Arabidopsis thaliana; identical to SEQ ID NO: 26236
  peptide (1)..(412): Ceres Seq. ID no. 13614736
  misc_feature (181)..(391): Pfam Name: Ribosomal protein L1p/L10e family Pfam Description: Ribosomal protein L1p/L10e family
  misc_feature (1)..(412): Homolog of NCBI NO: 30689119 NR Description: ribosomal protein L1p family [Arabidopsis >gi|20268740|gb|AAM14073.1| unknown protein [Arabidopsis >gi|21280899|gb|AAM45043.1| unknown protein [Arabidopsis
  misc_feature (1)..(271): Homolog of NCBI NO: 25408807 NR Description: hypothetical protein At2g42710 [imported] - thaliana >gi|4512681|gb|AAD21735.1| hypothetical protein thaliana] >gi|20198079|gb|AAM15388.1| hypothetical protein
  misc_feature (178)..(402): Homolog of NCBI NO: 15965098 NR Description: PROBABLE 50S RIBOSOMAL PROTEIN L1 [Sinorhizobium >gi|15074278|emb|CAC45924.1| PROBABLE 50S RIBOSOMAL PROTEIN L1
  misc_feature (181)..(403): Homolog of NCBI NO: 22966133 NR Description: hypothetical protein [Rhodospirillum rubrum]
  misc_feature (181)..(394): Homolog of NCBI NO: 27380525 NR Description: 50S ribosomal protein L1 [Bradyrhizobium >gi|27353689|dbj|BAC50679.1| 50S ribosomal protein L1
  misc_feature (176)..(400): Homolog of NCBI NO: 15889253 NR Description: AGR_C_3573p [Agrobacterium tumefaciens]
  misc_feature (176)..(400): Homolog of NCBI NO: 17935849 NR Description: 50S ribosomal protein L1 [Agrobacterium
  misc_feature (182)..(398): Homolog of NCBI NO: 22957081 NR Description: hypothetical protein [Rhodobacter sphaeroides]
  misc_feature (185)..(400): Homolog of NCBI NO: 9957210 NR Description: L1 [EDTA-degrading bacterium BNC1]
  misc_feature (185)..(400): Homolog of NCBI NO: 13470539 NR Description: 50S ribosomal protein L1 [Mesorhizobium loti]

SEQ ID NO: 104309 - DNA, 850 bp, Arabidopsis thaliana
  misc_feature (1)..(850): Ceres Seq. ID no. 13614744
  misc_feature: MA Experiment ID: 108434 Result: Down-regulated in Transcription
  misc_feature: MA Experiment 108434 PARAMETER Experiment Name: At_Root_Tips_cDNA_P Parameter: Tissue Value: Root Tips
  misc_feature: MA Experiment ID: 108464 Result: Up-regulated in Transcription
  misc_feature: MA Experiment 108464 PARAMETER Experiment Name: At_Germinating_Seeds_cDNA_P Parameter: Age (day) Value: 4 vs. 0
  misc_feature: MA Experiment 108464 PARAMETER Experiment Name: At_Germinating_Seeds_cDNA_P Parameter: Tissue Value: Germinating Seeds
  misc_feature: MA Experiment ID: 108574 Result: Up-regulated in Transcription
  misc_feature: MA Experiment 108574 PARAMETER Experiment Name: At_Wounding__cDNA_P Parameter: Timepoint (hr) Value: 1
  misc_feature: MA Experiment 108574 PARAMETER Experiment Name: At_Wounding__cDNA_P Parameter: Tissue Value: Aerial
  misc_feature: MA Experiment 108574 PARAMETER Experiment Name: At_Wounding__cDNA_P Parameter: Treatment Value: Wounding vs. No Wounding
  misc_feature: MA Experiment ID: 108595 Result: Up-regulated in Transcription
  misc_feature: MA Experiment 108595 PARAMETER Experiment Name: At_Ler-pi_Ovule_cDNA_P Parameter: Plant Line Value: null
  misc_feature: MA Experiment ID: 108607 Result: Up-regulated in Transcription
  misc_feature: MA Experiment 108607 PARAMETER Experiment Name: At_100uM_ABA_cDNA_P Parameter: Timepoint (hr) Value: 4
  misc_feature: MA Experiment 108607 PARAMETER Experiment Name: At_100uM_ABA_cDNA_P Parameter: Tissue Value: Aerial
  misc_feature: MA Experiment 108607 PARAMETER Experiment Name: At_100uM_ABA_cDNA_P Parameter: Treatment Value: 100uM ABA vs. No Treatment
  misc_feature: MA Experiment ID: 20000144 Result: Down-regulated in Transcription
  misc_feature: MA Experiment 20000144 PARAMETER Experiment Name: At_42deg_Heat_cDNA_P Parameter: Temperature (deg C) Value: 42 vs. 22
  misc_feature: MA Experiment 20000144 PARAMETER Experiment Name: At_42deg_Heat_cDNA_P Parameter: Timepoint (hr) Value: 1
  misc_feature: MA Experiment 20000144 PARAMETER Experiment Name: At_42deg_Heat_cDNA_P Parameter: Tissue Value: Aerial
  misc_feature: MA Experiment ID: 20000171 Result: Down-regulated in Transcription
  misc_feature: MA Experiment 20000171 PARAMETER Experiment Name: At_42deg_Heat_P Parameter: Age (day) Value: 14
  misc_feature: MA Experiment 20000171 PARAMETER Experiment Name: At_42deg_Heat_P Parameter: Organism Value: A. thaliana
  misc_feature: MA Experiment 20000171 PARAMETER Experiment Name: At_42deg_Heat_P Parameter: Plant Line Value: WS
  misc_feature: MA Experiment 20000171 PARAMETER Experiment Name: At_42deg_Heat_P Parameter: Temperature (deg C) Value: 42 vs. 22
  misc_feature: MA Experiment 20000171 PARAMETER Experiment Name: At_42deg_Heat_P Parameter: Timepoint (hr) Value: 1
  misc_feature: MA Experiment 20000171 PARAMETER Experiment Name: At_42deg_Heat_P Parameter: Tissue Value: Aerial
  misc_feature: MA Experiment ID: 20000184 Result: Down-regulated in Transcription
  misc_feature: MA Experiment 20000184 PARAMETER Experiment Name: At_Shoots__P Parameter: Age (day) Value: 7
  misc_feature: MA Experiment 20000184 PARAMETER Experiment Name: At_Shoots__P Parameter: Tissue Value: Shoots vs. Whole Plant
  misc_feature: MA Experiment ID: 20000185 Result: Down-regulated in Transcription
  misc_feature: MA Experiment 20000185 PARAMETER Experiment Name: At_Roots__P Parameter: Age (day) Value: 7 vs. 21
  misc_feature: MA Experiment 20000185 PARAMETER Experiment Name: At_Roots__P Parameter: Organism Value: A. thaliana
  misc_feature: MA Experiment 20000185 PARAMETER Experiment Name: At_Roots__P Parameter: Tissue Value: Roots vs. Whole Plant
  misc_feature: MA Experiment ID: 20000211 Result: Up-regulated in Transcription
  misc_feature: MA Experiment 20000211 PARAMETER Experiment Name: At_0.001percent_MeJA__P Parameter: Age (day) Value: 14
  misc_feature: MA Experiment 20000211 PARAMETER Experiment Name: At_0.001percent_MeJA__P Parameter: Organism Value: A. thaliana
  misc_feature: MA Experiment 20000211 PARAMETER Experiment Name: At_0.001percent_MeJA__P Parameter: Plant Line Value: WS
  misc_feature: MA Experiment 20000211 PARAMETER Experiment Name: At_0.001percent_MeJA__P Parameter: Timepoint (hr) Value: 1
  misc_feature: MA Experiment 20000211 PARAMETER Experiment Name: At_0.001percent_MeJA__P Parameter: Tissue Value: Aerial
  misc_feature: MA Experiment 20000211 PARAMETER Experiment Name: At_0.001percent_MeJA__P Parameter: Treatment Value: 0.001percent MeJA vs. No Treatment
  misc_feature: MA Experiment ID: 20000264 Result: Down-regulated in Transcription
  misc_feature: MA Experiment 20000264 PARAMETER Experiment Name: At_Open_Flower_P Parameter: Age (day) Value: 21
  misc_feature: MA Experiment 20000264 PARAMETER Experiment Name: At_Open_Flower_P Parameter: Plant Line Value: WS
  misc_feature: MA Experiment 20000264 PARAMETER Experiment Name: At_Open_Flower_P Parameter: Tissue Value: Open Flower vs. Whole Plant
  misc_feature: MA Experiment ID: 20000265 Result: Down-regulated in Transcription
  misc_feature: MA Experiment 20000265 PARAMETER Experiment Name: At_Open_Flower_P Parameter: Age (day) Value: 21
  misc_feature: MA Experiment 20000265 PARAMETER Experiment Name: At_Open_Flower_P Parameter: Plant Line Value: WS
  misc_feature: MA Experiment 20000265 PARAMETER Experiment Name: At_Open_Flower_P Parameter: Tissue Value: Closed Flower vs. Whole Plant
  misc_feature: MA Experiment ID: 20000267 Result: Up-regulated in Transcription
  misc_feature: MA Experiment 20000267 PARAMETER Experiment Name: At_Drought_P Parameter: Age (day) Value: 7
  misc_feature: MA Experiment 20000267 PARAMETER Experiment Name: At_Drought_P Parameter: Organism Value: A. thaliana
  misc_feature: MA Experiment 20000267 PARAMETER Experiment Name: At_Drought_P Parameter: Plant Line Value: WS
  misc_feature: MA Experiment 20000267 PARAMETER Experiment Name: At_Drought_P Parameter: Timepoint (hr) Value: 6
  misc_feature: MA Experiment 20000267 PARAMETER Experiment Name: At_Drought_P Parameter: Tissue Value: Whole Plant
  misc_feature: MA Experiment 20000267 PARAMETER Experiment Name: At_Drought_P Parameter: Treatment Value: Drought vs. No Drought
  misc_feature: MA Experiment ID: 20000286 Result: Down-regulated in Transcription
  misc_feature: MA Experiment 20000286 PARAMETER Experiment Name: At_Open_Flower_P Parameter: Age (day) Value: 21
  misc_feature: MA Experiment 20000286 PARAMETER Experiment Name: At_Open_Flower_P Parameter: Plant Line Value: WS
  misc_feature: MA Experiment 20000286 PARAMETER Experiment Name: At_Open_Flower_P Parameter: Tissue Value: Half Open vs. Whole Plant
  misc_feature: MA Experiment ID: 20000438 Result: Down-regulated in Transcription
  misc_feature: MA Experiment 20000438 PARAMETER Experiment Name: At_Shoots__P Parameter: Age (day) Value: 14
  misc_feature: MA Experiment 20000438 PARAMETER Experiment Name: At_Shoots__P Parameter: Tissue Value: Shoots vs. Whole Plant
  misc_feature: MA Experiment ID: 20000495 Result: Down-regulated in Transcription
  misc_feature: MA Experiment 20000495 PARAMETER Experiment Name: At_Guard_Cells_P Parameter: Harvest Date Value: 8/2/2002
  misc_feature: MA Experiment 20000495 PARAMETER Experiment Name: At_Guard_Cells_P Parameter: Organism Value: A. thaliana
  misc_feature: MA Experiment 20000495 PARAMETER Experiment Name: At_Guard_Cells_P Parameter: Tissue Value: Guard Cells vs. Leaves
  misc_feature: MA Experiment ID: 20000794 Result: Down-regulated in Transcription
  misc_feature: MA Experiment 20000794 PARAMETER Experiment Name: At_Petals_P Parameter: Age (day) Value: 23-25 days
  misc_feature: MA Experiment 20000794 PARAMETER Experiment Name: At_Petals_P Parameter: Plant Line Value: WS
  misc_feature: MA Experiment 20000794 PARAMETER Experiment Name: At_Petals_P Parameter: Tissue Value: Petals vs. Whole plant
  misc_feature: MA Experiment ID: 20001248 Result: Down-regulated in Transcription
  misc_feature: MA Experiment 20001248 PARAMETER Experiment Name: At_Far-red-induction_P Parameter: Age (day) Value: 7
  misc_feature: MA Experiment 20001248 PARAMETER Experiment Name: At_Far-red-induction_P Parameter: Light Value: Far-red vs. White
  misc_feature: MA Experiment 20001248 PARAMETER Experiment Name: At_Far-red-induction_P Parameter: Organism Value: A. thaliana
  misc_feature: MA Experiment 20001248 PARAMETER Experiment Name: At_Far-red-induction_P Parameter: Plant Line Value: Columbia
  misc_feature: MA Experiment 20001248 PARAMETER Experiment Name: At_Far-red-induction_P Parameter: Timepoint (hr) Value: 4
  misc_feature: MA Experiment 20001248 PARAMETER Experiment Name: At_Far-red-induction_P Parameter: Tissue Value: Whole Plant
  misc_feature: MA Experiment ID: 20001450 Result: Down-regulated in Transcription
  misc_feature: MA Experiment 20001450 PARAMETER Experiment Name: At_Far-red-induction_P Parameter: Age (day) Value: 7
  misc_feature: MA Experiment 20001450 PARAMETER Experiment Name: At_Far-red-induction_P Parameter: Light Value: Far-red vs. White
  misc_feature: MA Experiment 20001450 PARAMETER Experiment Name: At_Far-red-induction_P Parameter: Organism Value: A. thaliana
  misc_feature: MA Experiment 20001450 PARAMETER Experiment Name: At_Far-red-induction_P Parameter: Plant Line Value: Columbia
  misc_feature: MA Experiment 20001450 PARAMETER Experiment Name: At_Far-red-induction_P Parameter: Timepoint (hr) Value: 8
  misc_feature: MA Experiment 20001450 PARAMETER Experiment Name: At_Far-red-induction_P Parameter: Tissue Value: Whole Plant
  misc_feature: MA Experiment ID: 20001911 Result: Up-regulated in Transcription
  misc_feature: MA Experiment 20001911 PARAMETER Experiment Name: At_Drought_Reproduction_P Parameter: Age (day) Value: 40
  misc_feature: MA Experiment 20001911 PARAMETER Experiment Name: At_Drought_Reproduction_P Parameter: Organism Value: A. thaliana
  misc_feature: MA Experiment 20001911 PARAMETER Experiment Name: At_Drought_Reproduction_P Parameter: Plant Line Value: WS
  misc_feature: MA Experiment 20001911 PARAMETER Experiment Name: At_Drought_Reproduction_P Parameter: Timepoint (day) Value: 10
  misc_feature: MA Experiment 20001911 PARAMETER Experiment Name: At_Drought_Reproduction_P Parameter: Tissue Value: Flowers
  misc_feature: MA Experiment 20001911 PARAMETER Experiment Name: At_Drought_Reproduction_P Parameter: Treatment Value: Drought vs. No Drought
atcttctaacaaacaccaaaaaaacagagaaaacaaactttaaacaatggctggagaggagttgttgaaactgttcgagcaaaactggtcagagaggccaatcttcaagaaagacaaagagaatctgaatggaaaaagtagagagaagcgtggagaaaaagagattctagaggaacgacgagaagaagaagcactgaagaattttccggtgagctttcttgtagagagggctatgagtgacgagacgatgatgacgacgagttccaagacaagtttgtttagttcttcatcagatgatttgttcttgtctcctagatcggtcttacccgttaaaccaacgccgatgaagcttcagacgatcctctccggaaaagaagtcaacgcgttcacgattgcggaaagagagagactactttcagagaaggaagagcagaggaagaagaagaagaagaagagtaatgtgagaacaagaaagggaaagagtatgtcggatttggagtacgaggagcttaaagggtttatggatctaggttttgtcttttccgaggatgaccataaagactccgatctagtttcgattcttcctgggttacagagattggtgaagaaagatgatggagtaacaaaagaagaagaagaagaagaagaagaagacaaaatcggtggaaacagagcagcgagaccgtatttgtcggaagcgtgggatcattgtggaggaagaaaaggaaaaaaacaaatcacgccggagattaagtggagagttccggcgccggcggcggctagcgaagttgacttaaaagataatctaaggctttgggctcatgctgtggcctcgactattcgaagttaa

SEQ ID NO: 104310 - protein, 267 aa, Arabidopsis thaliana
  peptide (1)..(267): Ceres Seq. ID no. 13614745
  misc_feature (15)..(202): Pfam Name: Caldesmon Pfam Description: Caldesmon
  misc_feature (1)..(267): Homolog of NCBI NO: 15227995 NR Description: expressed protein [Arabidopsis thaliana]
  misc_feature (119)..(266): Homolog of NCBI NO: 34904512 NR Description: OSJNBa0010K01.19 [Oryza sativa (japonica
MAGEELLKLFEQNWSERPIFKKDKENLNGKSREKRGEKEILEERREEEALKNFPVSFLVERAMSDETMMTTSSKTSLFSSSSDDLFLSPRSVLPVKPTPMKLQTILSGKEVNAFTIAERERLLSEKEEQRKKKKKKSNVRTRKGKSMSDLEYEELKGFMDLGFVFSEDDHKDSDLVSILPGLQRLVKKDDGVTKEEEEEEEEDKIGGNRAARPYLSEAWDHCGGRKGKKQITPEIKWRVPAPAAASEVDLKDNLRLWAHAVASTIRS

SEQ ID NO: 104311 - protein, 205 aa, Arabidopsis thaliana
  peptide (1)..(205): Ceres Seq. ID no. 13614746
  misc_feature (1)..(140): Pfam Name: Caldesmon Pfam Description: Caldesmon
  misc_feature (1)..(205): Homolog of NCBI NO: 15227995 NR Description: expressed protein [Arabidopsis thaliana]
  misc_feature (57)..(204): Homolog of NCBI NO: 34904512 NR Description: OSJNBa0010K01.19 [Oryza sativa (japonica
MSDETMMTTSSKTSLFSSSSDDLFLSPRSVLPVKPTPMKLQTILSGKEVNAFTIAERERLLSEKEEQRKKKKKKSNVRTRKGKSMSDLEYEELKGFMDLGFVFSEDDHKDSDLVSILPGLQRLVKKDDGVTKEEEEEEEEDKIGGNRAARPYLSEAWDHCGGRKGKKQITPEIKWRVPAPAAASEVDLKDNLRLWAHAVASTIRS

SEQ ID NO: 104312 - protein, 200 aa, Arabidopsis thaliana
  peptide (1)..(200): Ceres Seq. ID no. 13614747
  misc_feature (1)..(135): Pfam Name: Caldesmon Pfam Description: Caldesmon
  misc_feature (1)..(200): Homolog of NCBI NO: 15227995 NR Description: expressed protein [Arabidopsis thaliana]
  misc_feature (52)..(199): Homolog of NCBI NO: 34904512 NR Description: OSJNBa0010K01.19 [Oryza sativa (japonica
MMTTSSKTSLFSSSSDDLFLSPRSVLPVKPTPMKLQTILSGKEVNAFTIAERERLLSEKEEQRKKKKKKSNVRTRKGKSMSDLEYEELKGFMDLGFVFSEDDHKDSDLVSILPGLQRLVKKDDGVTKEEEEEEEEDKIGGNRAARPYLSEAWDHCGGRKGKKQITPEIKWRVPAPAAASEVDLKDNLRLWAHAVASTIRS

SEQ ID NO: 104313 - DNA, 802 bp, Arabidopsis thaliana
  misc_feature (1)..(802): Ceres Seq. ID no. 13614752
  misc_feature: MA Experiment ID: 20000265 Result: Up-regulated in Transcription
  misc_feature: MA Experiment 20000265 PARAMETER Experiment Name: At_Open_Flower_P Parameter: Age (day) Value: 21
  misc_feature: MA Experiment 20000265 PARAMETER Experiment Name: At_Open_Flower_P Parameter: Plant Line Value: WS
  misc_feature: MA Experiment 20000265 PARAMETER Experiment Name: At_Open_Flower_P Parameter: Tissue Value: Closed Flower vs. Whole Plant
  misc_feature: MA Experiment ID: 20000286 Result: Up-regulated in Transcription
  misc_feature: MA Experiment 20000286 PARAMETER Experiment Name: At_Open_Flower_P Parameter: Age (day) Value: 21
  misc_feature: MA Experiment 20000286 PARAMETER Experiment Name: At_Open_Flower_P Parameter: Plant Line Value: WS
  misc_feature: MA Experiment 20000286 PARAMETER Experiment Name: At_Open_Flower_P Parameter: Tissue Value: Half Open vs. Whole Plant
agttgaacatataacaacattcataacaatggctggaggtacagctctaactccaacctctgtaggatccaagtctgttccaatgaggaaccatgaagcaacagagagaggcaacaccaacaacaacctgagagcattacccaaagccgtccaaccggtttcatcaatcgaaggagagatggctaagaggccacgtggcagacccgctggctccaagaacaaacccaaaccaccaatcattgtgactcacgacagtccaaattccctcagagctaacgccgttgagatcagctcaggttgtgacatctgtgagactttatcggattttgcaagaaggaaacagagaggtctctgcattctcagtgccaatggttgtgtcaccaatgtgacattaaggcaaccagcttcatcaggagcaattgtcacattacacggacgttacgagatcctctcattgcttggatcaatcttgcctccaccagcaccacttggaataactggtctgaccatttacttagccggacctcaaggacaggttgttggtggaggagtggttggtgggctaatcgcatctggtcctgttgttctcatggctgcatctttcatgaatgctgtttttgatcgtcttcctatggatgatgatgaagctgcctctatgcagaaccagcagtactaccagaatggaagatcccgtcctttagatgacattcatggactgcctcaaaatctgctcactaatggaaactcggcttctgatatctactcttgggggcctgcgcagcgtgtcatgtcgaaaccttaa

SEQ ID NO: 104314 - protein, 266 aa, Arabidopsis thaliana
  peptide (1)..(266): Ceres Seq. ID no. 13614753
  misc_feature (10)..(266): Homolog of NCBI NO: 15228036 NR Description: DNA binding protein -related [Arabidopsis
  misc_feature (60)..(223): Homolog of NCBI NO: 38346718 NR Description: OSJNBa0086O06.16 [Oryza sativa (japonica
  misc_feature (57)..(215): Homolog of NCBI NO: 15225475 NR Description: AT-hook DNA-binding protein -related [Arabidopsis
  misc_feature (59)..(215): Homolog of NCBI NO: 15234404 NR Description: DNA-binding protein -related [Arabidopsis
  misc_feature (59)..(215): Homolog of NCBI NO: 15235815 NR Description: DNA binding protein -related [Arabidopsis
  misc_feature (58)..(215): Homolog of NCBI NO: 15226945 NR Description: hypothetical protein [Arabidopsis thaliana]
  misc_feature (23)..(215): Homolog of NCBI NO: 30690333 NR Description: expressed protein [Arabidopsis thaliana]
  misc_feature (62)..(215): Homolog of NCBI NO: 7486025 NR Description: hypothetical protein F23E12.50 - Arabidopsis >gi|3080411|emb|CAA18730.1| putative protein [Arabidopsis >gi|7270491|emb|CAB80256.1| putative protein [Arabidopsis
  misc_feature (30)..(217): Homolog of NCBI NO: 18396925 NR Description: expressed protein [Arabidopsis thaliana]
  misc_feature (29)..(261): Homolog of NCBI NO: 15232970 NR Description: hypothetical protein [Arabidopsis thaliana]
VEHITTFITMAGGTALTPTSVGSKSVPMRNHEATERGNTNNNLRALPKAVQPVSSIEGEMAKRPRGRPAGSKNKPKPPIIVTHDSPNSLRANAVEISSGCDICETLSDFARRKQRGLCILSANGCVTNVTLRQPASSGAIVTLHGRYEILSLLGSILPPPAPLGITGLTIYLAGPQGQVVGGGVVGGLIASGPVVLMAASFMNAVFDRLPMDDDEAASMQNQQYYQNGRSRPLDDIHGLPQNLLTNGNSASDIYSWGPAQRVMSKP

SEQ ID NO: 104315 - protein, 257 aa, Arabidopsis thaliana
  peptide (1)..(257): Ceres Seq. ID no. 13614754
  misc_feature (1)..(257): Homolog of NCBI NO: 15228036 NR Description: DNA binding protein -related [Arabidopsis
  misc_feature (51)..(214): Homolog of NCBI NO: 38346718 NR Description: OSJNBa0086O06.16 [Oryza sativa (japonica
  misc_feature (48)..(206): Homolog of NCBI NO: 15225475 NR Description: AT-hook DNA-binding protein -related [Arabidopsis
  misc_feature (50)..(206): Homolog of NCBI NO: 15234404 NR Description: DNA-binding protein -related [Arabidopsis
  misc_feature (50)..(206): Homolog of NCBI NO: 15235815 NR Description: DNA binding protein -related [Arabidopsis
  misc_feature (49)..(206): Homolog of NCBI NO: 15226945 NR Description: hypothetical protein [Arabidopsis thaliana]
  misc_feature (14)..(206): Homolog of NCBI NO: 30690333 NR Description: expressed protein [Arabidopsis thaliana]
  misc_feature (53)..(206): Homolog of NCBI NO: 7486025 NR Description: hypothetical protein F23E12.50 - Arabidopsis >gi|3080411|emb|CAA18730.1| putative protein [Arabidopsis >gi|7270491|emb|CAB80256.1| putative protein [Arabidopsis
  misc_feature (21)..(208): Homolog of NCBI NO: 18396925 NR Description: expressed protein [Arabidopsis thaliana]
  misc_feature (20)..(252): Homolog of NCBI NO: 15232970 NR Description: hypothetical protein [Arabidopsis thaliana]
MAGGTALTPTSVGSKSVPMRNHEATERGNTNNNLRALPKAVQPVSSIEGEMAKRPRGRPAGSKNKPKPPIIVTHDSPNSLRANAVEISSGCDICETLSDFARRKQRGLCILSANGCVTNVTLRQPASSGAIVTLHGRYEILSLLGSILPPPAPLGITGLTIYLAGPQGQVVGGGVVGGLIASGPVVLMAASFMNAVFDRLPMDDDEAASMQNQQYYQNGRSRPLDDIHGLPQNLLTNGNSASDIYSWGPAQRVMSKP

SEQ ID NO: 104316 - protein, 239 aa, Arabidopsis thaliana
  peptide (1)..(239): Ceres Seq. ID no. 13614755
  misc_feature (1)..(239): Homolog of NCBI NO: 15228036 NR Description: DNA binding protein -related [Arabidopsis
  misc_feature (33)..(196): Homolog of NCBI NO: 38346718 NR Description: OSJNBa0086O06.16 [Oryza sativa (japonica
  misc_feature (30)..(188): Homolog of NCBI NO: 15225475 NR Description: AT-hook DNA-binding protein -related [Arabidopsis
  misc_feature (32)..(188): Homolog of NCBI NO: 15234404 NR Description: DNA-binding protein -related [Arabidopsis
  misc_feature (32)..(188): Homolog of NCBI NO: 15235815 NR Description: DNA binding protein -related [Arabidopsis
  misc_feature (31)..(188): Homolog of NCBI NO: 15226945 NR Description: hypothetical protein [Arabidopsis thaliana]
  misc_feature (1)..(188): Homolog of NCBI NO: 30690333 NR Description: expressed protein [Arabidopsis thaliana]
  misc_feature (35)..(188): Homolog of NCBI NO: 7486025 NR Description: hypothetical protein F23E12.50 - Arabidopsis >gi|3080411|emb|CAA18730.1| putative protein [Arabidopsis >gi|7270491|emb|CAB80256.1| putative protein [Arabidopsis
  misc_feature (3)..(190): Homolog of NCBI NO: 18396925 NR Description: expressed protein [Arabidopsis thaliana]
  misc_feature (2)..(234): Homolog of NCBI NO: 15232970 NR Description: hypothetical protein [Arabidopsis thaliana]
MRNHEATERGNTNNNLRALPKAVQPVSSIEGEMAKRPRGRPAGSKNKPKPPIIVTHDSPNSLRANAVEISSGCDICETLSDFARRKQRGLCILSANGCVTNVTLRQPASSGAIVTLHGRYEILSLLGSILPPPAPLGITGLTIYLAGPQGQVVGGGVVGGLIASGPVVLMAASFMNAVFDRLPMDDDEAASMQNQQYYQNGRSRPLDDIHGLPQNLLTNGNSASDIYSWGPAQRVMSKP

SEQ ID NO: 104317 - DNA, 940 bp, Arabidopsis thaliana
  misc_feature (1)..(940): Ceres Seq. ID no. 13614760
  misc_feature: MA Experiment ID: 108434 Result: Up-regulated in Transcription
  misc_feature: MA Experiment 108434 PARAMETER Experiment Name: At_Root_Tips_cDNA_P Parameter: Tissue Value: Root Tips
  misc_feature: MA Experiment ID: 108488 Result: Up-regulated in Transcription
  misc_feature: MA Experiment ID: 108573 Result: Down-regulated in Transcription
  misc_feature: MA Experiment 108573 PARAMETER Experiment Name: At_Drought_cDNA_P Parameter: Timepoint (hr) Value: 6
  misc_feature: MA Experiment 108573 PARAMETER Experiment Name: At_Drought_cDNA_P Parameter: Tissue Value: Aerial
  misc_feature: MA Experiment 108573 PARAMETER Experiment Name: At_Drought_cDNA_P Parameter: Treatment Value: Drought vs. No Drought
  misc_feature: MA Experiment ID: 108595 Result: Down-regulated in Transcription
  misc_feature: MA Experiment 108595 PARAMETER Experiment Name: At_Ler-pi_Ovule_cDNA_P Parameter: Plant Line Value: null
  misc_feature: MA Experiment ID: 20000087 Result: Down-regulated in Transcription
  misc_feature: MA Experiment 20000087 PARAMETER Experiment Name: At_100uM_ABA_Mutants_cDNA_P Parameter: Plant Line Value: WS
  misc_feature: MA Experiment 20000087 PARAMETER Experiment Name: At_100uM_ABA_Mutants_cDNA_P Parameter: Timepoint (hr) Value: 6
  misc_feature: MA Experiment 20000087 PARAMETER Experiment Name: At_100uM_ABA_Mutants_cDNA_P Parameter: Tissue Value: Aerial
  misc_feature: MA Experiment 20000087 PARAMETER Experiment Name: At_100uM_ABA_Mutants_cDNA_P Parameter: Treatment Value: 100uM ABA vs. No Treatment
  misc_feature: MA Experiment ID: 20000117 Result: Down-regulated in Transcription
  misc_feature: MA Experiment 20000117 PARAMETER Experiment Name: At_100uM_ABA_Mutants_cDNA_P Parameter: Plant Line Value: Columbia
  misc_feature: MA Experiment 20000117 PARAMETER Experiment Name: At_100uM_ABA_Mutants_cDNA_P Parameter: Timepoint (hr) Value: 6
  misc_feature: MA Experiment 20000117 PARAMETER Experiment Name: At_100uM_ABA_Mutants_cDNA_P Parameter: Tissue Value: Aerial
  misc_feature: MA Experiment 20000117 PARAMETER Experiment Name: At_100uM_ABA_Mutants_cDNA_P Parameter: Treatment Value: 100uM ABA vs. No Treatment
  misc_feature: MA Experiment ID: 20000185 Result: Down-regulated in Transcription
  misc_feature: MA Experiment 20000185 PARAMETER Experiment Name: At_Roots__P Parameter: Age (day) Value: 7 vs. 21
  misc_feature: MA Experiment 20000185 PARAMETER Experiment Name: At_Roots__P Parameter: Organism Value: A. thaliana
  misc_feature: MA Experiment 20000185 PARAMETER Experiment Name: At_Roots__P Parameter: Tissue Value: Roots vs. Whole Plant
  misc_feature: MA Experiment ID: 20000437 Result: Down-regulated in Transcription
  misc_feature: MA Experiment 20000437 PARAMETER Experiment Name: At_Drought_P Parameter: Age (day) Value: 8
  misc_feature: MA Experiment 20000437 PARAMETER Experiment Name: At_Drought_P Parameter: Organism Value: A. thaliana
  misc_feature: MA Experiment 20000437 PARAMETER Experiment Name: At_Drought_P Parameter: Plant Line Value: WS
  misc_feature: MA Experiment 20000437 PARAMETER Experiment Name: At_Drought_P Parameter: Timepoint (hr) Value: 24
  misc_feature: MA Experiment 20000437 PARAMETER Experiment Name: At_Drought_P Parameter: Tissue Value: Whole Plant
  misc_feature: MA Experiment 20000437 PARAMETER Experiment Name: At_Drought_P Parameter: Treatment Value: Drought vs. No Drought
  misc_feature: MA Experiment ID: 20000438 Result: Up-regulated in Transcription
  misc_feature: MA Experiment 20000438 PARAMETER Experiment Name: At_Shoots__P Parameter: Age (day) Value: 14
  misc_feature: MA Experiment 20000438 PARAMETER Experiment Name: At_Shoots__P Parameter: Tissue Value: Shoots vs. Whole Plant
  misc_feature: MA Experiment ID: 20000439 Result: Down-regulated in Transcription
  misc_feature: MA Experiment 20000439 PARAMETER Experiment Name: At_Roots__P Parameter: Age (day) Value: 14 vs. 21
  misc_feature: MA Experiment 20000439 PARAMETER Experiment Name: At_Roots__P Parameter: Organism Value: A. thaliana
  misc_feature: MA Experiment 20000439 PARAMETER Experiment Name: At_Roots__P Parameter: Tissue Value: Roots vs. Whole Plant
  misc_feature: MA Experiment ID: 20000794 Result: Down-regulated in Transcription
  misc_feature: MA Experiment 20000794 PARAMETER Experiment Name: At_Petals_P Parameter: Age (day) Value: 23-25 days
  misc_feature: MA Experiment 20000794 PARAMETER Experiment Name: At_Petals_P Parameter: Plant Line Value: WS
  misc_feature: MA Experiment 20000794 PARAMETER Experiment Name: At_Petals_P Parameter: Tissue Value: Petals vs. Whole plant
  misc_feature: MA Experiment ID: 20001757 Result: Up-regulated in Transcription
  misc_feature: MA Experiment 20001757 PARAMETER Experiment Name: At_50mM_NH4NO3_L-to-H_P Parameter: Timepoint (hr) Value: 6
  misc_feature: MA Experiment 20001757 PARAMETER Experiment Name: At_50mM_NH4NO3_L-to-H_P Parameter: Tissue Value: Leaf
  misc_feature: MA Experiment 20001757 PARAMETER Experiment Name: At_50mM_NH4NO3_L-to-H_P Parameter: Treatment Value: 50mM NH4NO3 vs 100mM Mannitol
  misc_feature: MA Experiment ID: 20001905 Result: Down-regulated in Transcription
  misc_feature: MA Experiment 20001905 PARAMETER Experiment Name: At_Drought_Reproduction_P Parameter: Age (day) Value: 40
  misc_feature: MA Experiment 20001905 PARAMETER Experiment Name: At_Drought_Reproduction_P Parameter: Organism Value: A. thaliana
  misc_feature: MA Experiment 20001905 PARAMETER Experiment Name: At_Drought_Reproduction_P Parameter: Plant Line Value: WS
  misc_feature: MA Experiment 20001905 PARAMETER Experiment Name: At_Drought_Reproduction_P Parameter: Timepoint (day) Value: 10
  misc_feature: MA Experiment 20001905 PARAMETER Experiment Name: At_Drought_Reproduction_P Parameter: Tissue Value: Rosettes
  misc_feature: MA Experiment 20001905 PARAMETER Experiment Name: At_Drought_Reproduction_P Parameter: Treatment Value: Drought vs. No Drought
  misc_feature: MA Experiment ID: 20001906 Result: Down-regulated in Transcription
  misc_feature: MA Experiment 20001906 PARAMETER Experiment Name: At_Drought_Reproduction_P Parameter: Age (day) Value: 35
  misc_feature: MA Experiment 20001906 PARAMETER Experiment Name: At_Drought_Reproduction_P Parameter: Organism Value: A. thaliana
  misc_feature: MA Experiment 20001906 PARAMETER Experiment Name: At_Drought_Reproduction_P Parameter: Plant Line Value: WS
  misc_feature: MA Experiment 20001906 PARAMETER Experiment Name: At_Drought_Reproduction_P Parameter: Timepoint (day) Value: 5
  misc_feature: MA Experiment 20001906 PARAMETER Experiment Name: At_Drought_Reproduction_P Parameter: Tissue Value: Siliques
  misc_feature: MA Experiment 20001906 PARAMETER Experiment Name: At_Drought_Reproduction_P Parameter: Treatment Value: Drought vs. No Drought
  misc_feature: MA Experiment ID: 20001911 Result: Down-regulated in Transcription
  misc_feature: MA Experiment 20001911 PARAMETER Experiment Name: At_Drought_Reproduction_P Parameter: Age (day) Value: 40
  misc_feature: MA Experiment 20001911 PARAMETER Experiment Name: At_Drought_Reproduction_P Parameter: Organism Value: A. thaliana
  misc_feature: MA Experiment 20001911 PARAMETER Experiment Name: At_Drought_Reproduction_P Parameter: Plant Line Value: WS
  misc_feature: MA Experiment 20001911 PARAMETER Experiment Name: At_Drought_Reproduction_P Parameter: Timepoint (day) Value: 10
  misc_feature: MA Experiment 20001911 PARAMETER Experiment Name: At_Drought_Reproduction_P Parameter: Tissue Value: Flowers
  misc_feature: MA Experiment 20001911 PARAMETER Experiment Name: At_Drought_Reproduction_P Parameter: Treatment Value: Drought vs. No Drought
ctcagagtttcttctcctctgtgaatctccgacaatggcgatagctatggcggttgtttctttcccatctctgctcaacaaaacaaccttatcctcttcactcttcactcccactttcctcccggcgaaatcctcttcacttctcatcaaatcatcaccaaaaaccagattcgtggtttcatcatccatggaagctggaatcggagtaatggggtcaaaactcgggatgatgagtttcttcgaagaagacggcacagtagttccagtaacagtcgtcggattccgcgaaggtaacatcgtaacccaaatcaaaaccctagccacagacggttacgacgcggttcaaatcggttaccgtcgtgtacgcgacaaaaagctaactaaaccggaaaccggtcatctccaaaaagccggtacaatcccaatgagacatctccaagagttcagattaacaaacatcgaaggattcgaaccgaaccagaagcttgtgttcgatgagatattcaaagaaggtgatctcgttgatgtagctggaaccacaattggtaaagggtttcaaggaggaatcaaaaggcatcatttcaagagaggtcagatgactcatggttccaagagtcatcgagctttgggttcgattggtgctggtactactccgggaagagtttataaagggaagaagatgcctggaagaatgggagggacgaggacaaagattaggaagcttaagattgttaaagttgataaggagcttaatgttgtcatgatcaaaggtgctttgcctggtaagcctgggaatcttcttcgtattactcccgctaaaatcgtcggagttaacattcccaagaactagtagagaagagactctgttttgttttgtaatgttgacttgtgtttatccattccttgaaaatttgtatcgaattgctaaatcacagtttct

SEQ ID NO: 104318 - protein, 282 aa, Arabidopsis thaliana
  peptide (1)..(282): Ceres Seq. ID no. 13614761
  misc_feature (73)..(270): Pfam Name: Ribosomal protein L3 Pfam Description: Ribosomal protein L3
  misc_feature (12)..(282): Homolog of NCBI NO: 15224205 NR Description: ribosomal protein L3p family [Arabidopsis
  misc_feature (12)..(282): Homolog of NCBI NO: 21553426 NR Description: 50S ribosomal protein L3 [Arabidopsis thaliana]
  misc_feature (59)..(282): Homolog of NCBI NO: 7440606 NR Description: ribosomal protein L3 precursor, chloroplast - tobacco (fragment) >gi|3298437|dbj|BAA31509.1| chloroplast
  misc_feature (67)..(276): Homolog of NCBI NO: 22297625 NR Description: 50S ribosomal protein L3 [Thermosynechococcus BP- 1] >gi|22293802|dbj|BAC07634.1| 50S ribosomal protein L3
  misc_feature (67)..(276): Homolog of NCBI NO: 16329941 NR Description: 50S ribosomal protein L3 [Synechocystis sp. PCC >gi|2500229|sp|P73320|RL3_SYNY3 50S ribosomal protein L3
  misc_feature (67)..(276): Homolog of NCBI NO: 37519654 NR Description: 50S ribosomal protein L3 [Gloeobacter violaceus]
  misc_feature (67)..(276): Homolog of NCBI NO: 3122742 NR Description: 50S ribosomal protein L3
  misc_feature (67)..(276): Homolog of NCBI NO: 17231707 NR Description: 50S ribosomal protein L3 [Nostoc sp. PCC 7120]
  misc_feature (67)..(276): Homolog of NCBI NO: 32307490 NR Description: ribosomal protein rpL3 [Bigelowiella natans]
  misc_feature (67)..(276): Homolog of NCBI NO: 23124126 NR Description: hypothetical protein [Nostoc punctiforme]
SEFLLLCESPTMAIAMAVVSFPSLLNKTTLSSSLFTPTFLPAKSSSLLIKSSPKTRFVVSSSMEAGIGVMGSKLGMMSFFEEDGTVVPVTVVGFREGNIVTQIKTLATDGYDAVQIGYRRVRDKKLTKPETGHLQKAGTIPMRHLQEFRLTNIEGFEPNQKLVFDEIFKEGDLVDVAGTTIGKGFQGGIKRHHFKRGQMTHGSKSHRALGSIGAGTTPGRVYKGKKMPGRMGGTRTKIRKLKIVKVDKELNVVMIKGALPGKPGNLLRITPAKIVGVNIPKN

SEQ ID NO: 104319 - protein, 271 aa, Arabidopsis thaliana
  peptide (1)..(271): Ceres Seq. ID no. 13614762
  misc_feature (62)..(259): Pfam Name: Ribosomal protein L3 Pfam Description: Ribosomal protein L3
  misc_feature (1)..(271): Homolog of NCBI NO: 15224205 NR Description: ribosomal protein L3p family [Arabidopsis
  misc_feature (1)..(271): Homolog of NCBI NO: 21553426 NR Description: 50S ribosomal protein L3 [Arabidopsis thaliana]
  misc_feature (48)..(271): Homolog of NCBI NO: 7440606 NR Description: ribosomal protein L3 precursor, chloroplast - tobacco (fragment) >gi|3298437|dbj|BAA31509.1| chloroplast
  misc_feature (56)..(265): Homolog of NCBI NO: 22297625 NR Description: 50S ribosomal protein L3 [Thermosynechococcus BP- 1] >gi|22293802|dbj|BAC07634.1| 50S ribosomal protein L3
  misc_feature (56)..(265): Homolog of NCBI NO: 16329941 NR Description: 50S ribosomal protein L3 [Synechocystis sp. PCC >gi|2500229|sp|P73320|RL3_SYNY3 50S ribosomal protein L3
  misc_feature (56)..(265): Homolog of NCBI NO: 37519654 NR Description: 50S ribosomal protein L3 [Gloeobacter violaceus]
  misc_feature (56)..(265): Homolog of NCBI NO: 3122742 NR Description: 50S ribosomal protein L3
  misc_feature (56)..(265): Homolog of NCBI NO: 17231707 NR Description: 50S ribosomal protein L3 [Nostoc sp. PCC 7120]
  misc_feature (56)..(265): Homolog of NCBI NO: 32307490 NR Description: ribosomal protein rpL3 [Bigelowiella natans]
  misc_feature (56)..(265): Homolog of NCBI NO: 23124126 NR Description: hypothetical protein [Nostoc punctiforme]
MAIAMAVVSFPSLLNKTTLSSSLFTPTFLPAKSSSLLIKSSPKTRFVVSSSMEAGIGVMGSKLGMMSFFEEDGTVVPVTVVGFREGNIVTQIKTLATDGYDAVQIGYRRVRDKKLTKPETGHLQKAGTIPMRHLQEFRLTNIEGFEPNQKLVFDEIFKEGDLVDVAGTTIGKGFQGGIKRHHFKRGQMTHGSKSHRALGSIGAGTTPGRVYKGKKMPGRMGGTRTKIRKLKIVKVDKELNVVMIKGALPGKPGNLLRITPAKIVGVNIPKN

SEQ ID NO: 104320 - protein, 267 aa, Arabidopsis thaliana
  peptide (1)..(267): Ceres Seq. ID no. 13614763
  misc_feature (58)..(255): Pfam Name: Ribosomal protein L3 Pfam Description: Ribosomal protein L3
  misc_feature (1)..(267): Homolog of NCBI NO: 15224205 NR Description: ribosomal protein L3p family [Arabidopsis
  misc_feature (1)..(267): Homolog of NCBI NO: 21553426 NR Description: 50S ribosomal protein L3 [Arabidopsis thaliana]
  misc_feature (44)..(267): Homolog of NCBI NO: 7440606 NR Description: ribosomal protein L3 precursor, chloroplast - tobacco (fragment) >gi|3298437|dbj|BAA31509.1| chloroplast
  misc_feature (52)..(261): Homolog of NCBI NO: 22297625 NR Description: 50S ribosomal protein L3 [Thermosynechococcus BP- 1] >gi|22293802|dbj|BAC07634.1| 50S ribosomal protein L3
  misc_feature (52)..(261): Homolog of NCBI NO: 16329941 NR Description: 50S ribosomal protein L3 [Synechocystis sp. PCC >gi|2500229|sp|P73320|RL3_SYNY3 50S ribosomal protein L3
  misc_feature (52)..(261): Homolog of NCBI NO: 37519654 NR Description: 50S ribosomal protein L3 [Gloeobacter violaceus]
  misc_feature (52)..(261): Homolog of NCBI NO: 3122742 NR Description: 50S ribosomal protein L3
  misc_feature (52)..(261): Homolog of NCBI NO: 17231707 NR Description: 50S ribosomal protein L3 [Nostoc sp. PCC 7120]
  misc_feature (52)..(261): Homolog of NCBI NO: 32307490 NR Description: ribosomal protein rpL3 [Bigelowiella natans]
  misc_feature (52)..(261): Homolog of NCBI NO: 23124126 NR Description: hypothetical protein [Nostoc punctiforme]
MAVVSFPSLLNKTTLSSSLFTPTFLPAKSSSLLIKSSPKTRFVVSSSMEAGIGVMGSKLGMMSFFEEDGTVVPVTVVGFREGNIVTQIKTLATDGYDAVQIGYRRVRDKKLTKPETGHLQKAGTIPMRHLQEFRLTNIEGFEPNQKLVFDEIFKEGDLVDVAGTTIGKGFQGGIKRHHFKRGQMTHGSKSHRALGSIGAGTTPGRVYKGKKMPGRMGGTRTKIRKLKIVKVDKELNVVMIKGALPGKPGNLLRITPAKIVGVNIPKN

SEQ ID NO: 104321 - DNA, 891 bp, Arabidopsis thaliana
  misc_feature (1)..(891): Ceres Seq. ID no. 13614767
  misc_feature: MA Experiment ID: 108462 Result: Down-regulated in Transcription
  misc_feature: MA Experiment 108462 PARAMETER Experiment Name: At_Germinating_Seeds_cDNA_P Parameter: Age (day) Value: 2 vs. 0
  misc_feature: MA Experiment 108462 PARAMETER Experiment Name: At_Germinating_Seeds_cDNA_P Parameter: Tissue Value: Germinating Seeds
  misc_feature: MA Experiment ID: 108463 Result: Down-regulated in Transcription
  misc_feature: MA Experiment 108463 PARAMETER Experiment Name: At_Germinating_Seeds_cDNA_P Parameter: Age (day) Value: 3 vs. 0
  misc_feature: MA Experiment 108463 PARAMETER Experiment Name: At_Germinating_Seeds_cDNA_P Parameter: Tissue Value: Germinating Seeds
  misc_feature: MA Experiment ID: 108464 Result: Down-regulated in Transcription
  misc_feature: MA Experiment 108464 PARAMETER Experiment Name: At_Germinating_Seeds_cDNA_P Parameter: Age (day) Value: 4 vs. 0
  misc_feature: MA Experiment 108464 PARAMETER Experiment Name: At_Germinating_Seeds_cDNA_P Parameter: Tissue Value: Germinating Seeds
  misc_feature: MA Experiment ID: 20000235 Result: Up-regulated in Transcription
  misc_feature: MA Experiment 20000235 PARAMETER Experiment Name: At_Siliques_P Parameter: Age (day) Value: 21
  misc_feature: MA Experiment 20000235 PARAMETER Experiment Name: At_Siliques_P Parameter: Organism Value: A. thaliana
  misc_feature: MA Experiment 20000235 PARAMETER Experiment Name: At_Siliques_P Parameter: Plant Line Value: WS
  misc_feature: MA Experiment 20000235 PARAMETER Experiment Name: At_Siliques_P Parameter: Tissue Value: 5-10mm Siliques vs. Whole Plant
gaaatgtcagacgacgacgagagaggcgaagagtacctcttcaagattgttatcatcggtgattccgccgtcggcaaatccaatctcctcactcgctacgcccgtaacgagttcaatcccaattccaaagccactatcggcgtcgagtttcagactcagagcatgctcatcgacggcaaagaggtcaaagctcagatttgggataccgccggtcaggaacgcttccgcgccgttacatctgcttattaccgtggcgccgttggagccctcgtcgtctacgatatcactcgtagctccactttcgaaaacgtcggtcgctggctcgatgagctcaacactcattctgatacaacagtagcaaaaatgcttattgggaacaaatgtgatctcgagagcataagagcggtgagtgttgaggaaggcaagagtcttgctgagtctgaaggtttgtttttcatggagacctctgcgttggactcgaccaatgtaaagacggctttcgagatggttattcgggagatctatagcaacattagtcgaaagcaattgaactctgattcttacaaagaggagctgactgtgaatcgtgttagcttggttaagaacgagaacgaagggacaaagacattctcttgctgttcgaggtaacatctttgtaacggtttctctttgtcctgaggattggtttcgggttgaattgtgttcctggtaaacttatagaaaggcagagatatattcttatagttctcagttaaagtaaaagaagaagagagaaagatgttttgagtttctttgttacgcatacagaaaaagtttggttagtgtataagttatgttctcatttgtaacttttgtaaacttatgattgttaaatcaattttgatattttcc

SEQ ID NO: 104322 - protein, 215 aa, Arabidopsis thaliana
  peptide (1)..(215): Ceres Seq. ID no. 13614768
  misc_feature (15)..(176): Pfam Name: Ras family Pfam Description: Ras family
  misc_feature (2)..(215): Homolog of NCBI NO: 15224226 NR Description: Ras-related GTP-binding protein (ARA-4)
  misc_feature (2)..(214): Homolog of NCBI NO: 15225121 NR Description: GTP-binding protein, putative [Arabidopsis
  misc_feature (2)..(214): Homolog of NCBI NO: 18390575 NR Description: RAS-related GTP-binding protein (ARA-1)
  misc_feature (2)..(214): Homolog of NCBI NO: 29893534 NR Description: putative RAS-related protein ARA-1 [Arabidopsis
  misc_feature (2)..(214): Homolog of NCBI NO: 17380746 NR Description: putative RAS-related protein ARA-1 [Arabidopsis
  misc_feature (2)..(214): Homolog of NCBI NO: 21553627 NR Description: putative RAS superfamily GTP-binding protein
  misc_feature (2)..(214): Homolog of NCBI NO: 1076457 NR Description: GTP-binding protein bra - rape
  misc_feature (3)..(214): Homolog of NCBI NO: 1370154 NR Description: RAB11G [Lotus japonicus]
EMSDDDERGEEYLFKIVIIGDSAVGKSNLLTRYARNEFNPNSKATIGVEFQTQSMLIDGKEVKAQIWDTAGQERFRAVTSAYYRGAVGALVVYDITRSSTFENVGRWLDELNTHSDTTVAKMLIGNKCDLESIRAVSVEEGKSLAESEGLFFMETSALDSTNVKTAFEMVIREIYSNISRKQLNSDSYKEELTVNRVSLVKNENEGTKTFSCCSR

SEQ ID NO: 104323 - protein, 214 aa, Arabidopsis thaliana; identical to SEQ ID NO: 24892
  peptide (1)..(214): Ceres Seq. ID no. 13614769
  misc_feature (14)..(175): Pfam Name: Ras family Pfam Description: Ras family
  misc_feature (1)..(214): Homolog of NCBI NO: 15224226 NR Description: Ras-related GTP-binding protein (ARA-4)
  misc_feature (1)..(213): Homolog of NCBI NO: 15225121 NR Description: GTP-binding protein, putative [Arabidopsis
  misc_feature (1)..(213): Homolog of NCBI NO: 18390575 NR Description: RAS-related GTP-binding protein (ARA-1)
  misc_feature (1)..(213): Homolog of NCBI NO: 29893534 NR Description: putative RAS-related protein ARA-1 [Arabidopsis
  misc_feature (1)..(213): Homolog of NCBI NO: 17380746 NR Description: putative RAS-related protein ARA-1 [Arabidopsis
  misc_feature (1)..(213): Homolog of NCBI NO: 21553627 NR Description: putative RAS superfamily GTP-binding protein
  misc_feature (1)..(213): Homolog of NCBI NO: 1076457 NR Description: GTP-binding protein bra - rape
  misc_feature (2)..(213): Homolog of NCBI NO: 1370154 NR Description: RAB11G [Lotus japonicus]

SEQ ID NO: 104324 - protein, 161 aa, Arabidopsis thaliana; identical to SEQ ID NO: 24893
  peptide (1)..(161): Ceres Seq. ID no. 13614770
  misc_feature (1)..(122): Pfam Name: Ras family Pfam Description: Ras family
  misc_feature (1)..(161): Homolog of NCBI NO: 15224226 NR Description: Ras-related GTP-binding protein (ARA-4)
  misc_feature (1)..(160): Homolog of NCBI NO: 15225121 NR Description: GTP-binding protein, putative [Arabidopsis
  misc_feature (1)..(160): Homolog of NCBI NO: 18390575 NR Description: RAS-related GTP-binding protein (ARA-1)
  misc_feature (1)..(160): Homolog of NCBI NO: 29893534 NR Description: putative RAS-related protein ARA-1 [Arabidopsis
  misc_feature (1)..(160): Homolog of NCBI NO: 17380746 NR Description: putative RAS-related protein ARA-1 [Arabidopsis
  misc_feature (1)..(160): Homolog of NCBI NO: 21553627 NR Description: putative RAS superfamily GTP-binding protein
  misc_feature (1)..(160): Homolog of NCBI NO: 1076457 NR Description: GTP-binding protein bra - rape
  misc_feature (1)..(160): Homolog of NCBI NO: 1370154 NR Description: RAB11G [Lotus japonicus]

SEQ ID NO: 104325 - DNA, 1721 bp, Arabidopsis thaliana
  misc_feature (1)..(1721): Ceres Seq. ID no. 13614771
  misc_feature: MA Experiment ID: 20000437 Result: Up-regulated in Transcription
  misc_feature: MA Experiment 20000437 PARAMETER Experiment Name: At_Drought_P Parameter: Age (day) Value: 8
  misc_feature: MA Experiment 20000437 PARAMETER Experiment Name: At_Drought_P Parameter: Organism Value: A. thaliana
  misc_feature: MA Experiment 20000437 PARAMETER Experiment Name: At_Drought_P Parameter: Plant Line Value: WS
  misc_feature: MA Experiment 20000437 PARAMETER Experiment Name: At_Drought_P Parameter: Timepoint (hr) Value: 24
  misc_feature: MA Experiment 20000437 PARAMETER Experiment Name: At_Drought_P Parameter: Tissue Value: Whole Plant
  misc_feature: MA Experiment 20000437 PARAMETER Experiment Name: At_Drought_P Parameter: Treatment Value: Drought vs. No Drought
  misc_feature: MA Experiment ID: 20000445 Result: Up-regulated in Transcription
  misc_feature: MA Experiment 20000445 PARAMETER Experiment Name: At_100uM_NAA__P Parameter: Age (day) Value: 14
  misc_feature: MA Experiment 20000445 PARAMETER Experiment Name: At_100uM_NAA__P Parameter: Organism Value: A. thaliana
  misc_feature: MA Experiment 20000445 PARAMETER Experiment Name: At_100uM_NAA__P Parameter: Plant Line Value: WS
  misc_feature: MA Experiment 20000445 PARAMETER Experiment Name: At_100uM_NAA__P Parameter: Timepoint (hr) Value: 6
  misc_feature: MA Experiment 20000445 PARAMETER Experiment Name: At_100uM_NAA__P Parameter: Tissue Value: Aerial
  misc_feature: MA Experiment 20000445 PARAMETER Experiment Name: At_100uM_NAA__P Parameter: Treatment Value: 100uM NAA vs. No Treatment
  misc_feature: MA Experiment ID: 20001451 Result: Down-regulated in Transcription
  misc_feature: MA Experiment 20001451 PARAMETER Experiment Name: At_Far-red-induction_P Parameter: Age (day) Value: 7
  misc_feature: MA Experiment 20001451 PARAMETER Experiment Name: At_Far-red-induction_P Parameter: Light Value: Far-red vs. White
  misc_feature: MA Experiment 20001451 PARAMETER Experiment Name: At_Far-red-induction_P Parameter: Organism Value: A. thaliana
  misc_feature: MA Experiment 20001451 PARAMETER Experiment Name: At_Far-red-induction_P Parameter: Plant Line Value: Columbia
  misc_feature: MA Experiment 20001451 PARAMETER Experiment Name: At_Far-red-induction_P Parameter: Timepoint (hr) Value: 24
  misc_feature: MA Experiment 20001451 PARAMETER Experiment Name: At_Far-red-induction_P Parameter: Tissue Value: Whole Plant
ataccctcttcttcctcatctctctctgcttagtttctgaatgtgaagcttgaggagagttctatatccttttgaattgctgtaatttggatcttacatagacgagagcagtccttctggatctacgcggtttaggcgggaggaggttttggtattgggaatgcgtttttgagctgatcttatacgtctattcaggtttagctcagtctagaattggttggcttgggaaaggtcgatgaagaacgggatggctgagtgcagcgtatgtcgttcaaggttggtttctcccagtagcaaagctatttcaagggcttatgacaactacaactacaagattagagtatcctcaaaacaacgagctctcaatgtctttttggtagtcggtgactgcatgctagttggtctacagcccgtcttagtgtacatgtctaaagtggatggaaagttcaactttagtcctattagcgtcaacttcttgacagaaatcgcgaaagttattttcgcgatggtcatgctattattccaggccaggcaccaaaaagttggagagaaacctctactatctctttccacgtttgtccaggcagctcggaacaatatgcttctcgctgttccagcagggttgtatgccattaataactatcttaagttcacaatgcagctatatttcaatcctgctactgtgaagatgctcagcaatctaaaagttctggtgattgctgtactactgaagatgataatgaagcgtcggttttccatcatacagtgggaagcacttgctttgttgctgatagggattagtataaatcagctgcgttctcttcctgaaggagctacaactgtggctgttccaattgctacgggtgcatacatatgtacctttatctttgttactgtcccatctttggcatctgtctacaacgagtatgctctaaagagtcagtatgacacaagcatttatctccagaacttatttctttatggttatggtgcgatattcaacttcctcggaatactaggaactgttatatataaaggtcctggcagttttgacatcctacaaggacattctagggctactatgtttctgatactgaacaacgcagcacaagggattctatcctcctttttcttcaaatatgcagatacaatcttgaagaaatattcgtccacagtagccacaatatttactggcatagcatctgcagcactctttggacatatattaacaatgaattttcttctgggaatttctatagttttcatttcaatgcatcagttcttttcacccctttcaaaagcaaaagacgaacaacaaaacggaaacatagagttagttgacgcaaaggatggccatagggctaaagactcattcatcaacatggcagcaggagcaactgaagaggctagtcaccgcattgaatcagatgacagagtgccacttcttcccagataaaaactttctcagcgatttagcttcaaaagaattcttttggccaaagattatttttagagatcagggaatttcgatcttatactacccgtacccgccggattcagcgcaataaacttcgtgagattgggtccttctctcaaagagtcagttaagttcgttaagaaacatctttaaagcctaaaacctgtattctttttcagatagaacaaaacaactctacacattacatgtaattttaaaataaatatatgtcacttaaaagcct

SEQ ID NO: 104326 - protein, 406 aa, Arabidopsis thaliana
  peptide (1)..(406): Ceres Seq. ID no. 13614772
  misc_feature (106)..(342): Pfam Name: Nucleotide-sugar transporter Pfam Description: Nucleotide-sugar transporter
  misc_feature (1)..(406): Homolog of NCBI NO: 26450627 NR Description: unknown protein [Arabidopsis thaliana]
  misc_feature (1)..(406): Homolog of NCBI NO: 18411150 NR Description: transporter-related protein [Arabidopsis thaliana]
  misc_feature (5)..(244): Homolog of NCBI NO: 25408848 NR Description: hypothetical protein At2g43240 [imported] - thaliana >gi|3763933|gb|AAC64313.1| unknown protein [Arabidopsis
  misc_feature (218)..(392): Homolog of NCBI NO: 25408848 NR Description: hypothetical protein At2g43240 [imported] - thaliana >gi|3763933|gb|AAC64313.1| unknown protein [Arabidopsis
  misc_feature (2)..(405): Homolog of NCBI NO: 38345234 NR Description: OSJNBa0084K20.12 [Oryza sativa (japonica
  misc_feature (218)..(392): Homolog of NCBI NO: 30689311 NR Description: expressed protein [Arabidopsis thaliana]
  misc_feature (116)..(244): Homolog of NCBI NO: 30689311 NR Description: expressed protein [Arabidopsis thaliana]
  misc_feature (5)..(98): Homolog of NCBI NO: 30689311 NR Description: expressed protein [Arabidopsis thaliana]
  misc_feature (47)..(389): Homolog of NCBI NO: 34907666 NR Description: putative transporter-like protein [Oryza sativa
  misc_feature (3)..(58): Homolog of NCBI NO: 34907666 NR Description: putative transporter-like protein [Oryza sativa
MKNGMAECSVCRSRLVSPSSKAISRAYDNYNYKIRVSSKQRALNVFLVVGDCMLVGLQPVLVYMSKVDGKFNFSPISVNFLTEIAKVIFAMVMLLFQARHQKVGEKPLLSLSTFVQAARNNMLLAVPAGLYAINNYLKFTMQLYFNPATVKMLSNLKVLVIAVLLKMIMKRRFSIIQWEALALLLIGISINQLRSLPEGATTVAVPIATGAYICTFIFVTVPSLASVYNEYALKSQYDTSIYLQNLFLYGYGAIFNFLGILGTVIYKGPGSFDILQGHSRATMFLILNNAAQGILSSFFFKYADTILKKYSSTVATIFTGIASAALFGHILTMNFLLGISIVFISMHQFFSPLSKAKDEQQNGNIELVDAKDGHRAKDSFINMAAGATEEASHRIESDDRVPLLPR

SEQ ID NO: 104327 - protein, 402 aa, Arabidopsis thaliana
  peptide (1)..(402): Ceres Seq. ID no. 13614773
  misc_feature (102)..(338): Pfam Name: Nucleotide-sugar transporter Pfam Description: Nucleotide-sugar transporter
  misc_feature (1)..(402): Homolog of NCBI NO: 26450627 NR Description: unknown protein [Arabidopsis thaliana]
  misc_feature (1)..(402): Homolog of NCBI NO: 18411150 NR Description: transporter-related protein [Arabidopsis thaliana]
  misc_feature (1)..(240): Homolog of NCBI NO: 25408848 NR Description: hypothetical protein At2g43240 [imported] - thaliana >gi|3763933|gb|AAC64313.1| unknown protein [Arabidopsis
  misc_feature (214)..(388): Homolog of NCBI NO: 25408848 NR Description: hypothetical protein At2g43240 [imported] - thaliana >gi|3763933|gb|AAC64313.1| unknown protein [Arabidopsis
  misc_feature (1)..(401): Homolog of NCBI NO: 38345234 NR Description: OSJNBa0084K20.12 [Oryza sativa (japonica
  misc_feature (214)..(388): Homolog of NCBI NO: 30689311 NR Description: expressed protein [Arabidopsis thaliana]
  misc_feature (112)..(240): Homolog of NCBI NO: 30689311 NR Description: expressed protein [Arabidopsis thaliana]
  misc_feature (1)..(94): Homolog of NCBI NO: 30689311 NR Description: expressed protein [Arabidopsis thaliana]
  misc_feature (43)..(385): Homolog of NCBI NO: 34907666 NR Description: putative transporter-like protein [Oryza sativa
  misc_feature (1)..(54): Homolog of NCBI NO: 34907666 NR Description: putative transporter-like protein [Oryza sativa
MAECSVCRSRLVSPSSKAISRAYDNYNYKIRVSSKQRALNVFLVVGDCMLVGLQPVLVYMSKVDGKFNFSPISVNFLTEIAKVIFAMVMLLFQARHQKVGEKPLLSLSTFVQAARNNMLLAVPAGLYAINNYLKFTMQLYFNPATVKMLSNLKVLVIAVLLKMIMKRRFSIIQWEALALLLIGISINQLRSLPEGATTVAVPIATGAYICTFIFVTVPSLASVYNEYALKSQYDTSIYLQNLFLYGYGAIFNFLGILGTVIYKGPGSFDILQGHSRATMFLILNNAAQGILSSFFFKYADTILKKYSSTVATIFTGIASAALFGHILTMNFLLGISIVFISMHQFFSPLSKAKDEQQNGNIELVDAKDGHRAKDSFINMAAGATEEASHRIESDDRVPLLPR

SEQ ID NO: 104328 - protein, 354 aa, Arabidopsis thaliana
  peptide (1)..(354): Ceres Seq. ID no. 13614774
  misc_feature (54)..(290): Pfam Name: Nucleotide-sugar transporter Pfam Description: Nucleotide-sugar transporter
  misc_feature (1)..(354): Homolog of NCBI NO: 26450627 NR Description: unknown protein [Arabidopsis thaliana]
  misc_feature (1)..(354): Homolog of NCBI NO: 18411150 NR Description: transporter-related protein [Arabidopsis thaliana]
  misc_feature (1)..(192): Homolog of NCBI NO: 25408848 NR Description: hypothetical protein At2g43240 [imported] - thaliana >gi|3763933|gb|AAC64313.1| unknown protein [Arabidopsis
  misc_feature (166)..(340): Homolog of NCBI NO: 25408848 NR Description: hypothetical protein At2g43240 [imported] - thaliana >gi|3763933|gb|AAC64313.1| unknown protein [Arabidopsis
  misc_feature (1)..(353): Homolog of NCBI NO: 38345234 NR Description: OSJNBa0084K20.12 [Oryza sativa (japonica
  misc_feature (166)..(340): Homolog of NCBI NO: 30689311 NR Description: expressed protein [Arabidopsis thaliana]
  misc_feature (64)..(192): Homolog of NCBI NO: 30689311 NR Description: expressed protein [Arabidopsis thaliana]
  misc_feature (1)..(46): Homolog of NCBI NO: 30689311 NR Description: expressed protein [Arabidopsis thaliana]
  misc_feature (1)..(337): Homolog of NCBI NO: 34907666 NR Description: putative transporter-like protein [Oryza sativa
  misc_feature (1)..(285): Homolog of NCBI NO: 11358902 NR Description: transporter-like protein - Arabidopsis thaliana
MLVGLQPVLVYMSKVDGKFNFSPISVNFLTEIAKVIFAMVMLLFQARHQKVGEKPLLSLSTFVQAARNNMLLAVPAGLYAINNYLKFTMQLYFNPATVKMLSNLKVLVIAVLLKMIMKRRFSIIQWEALALLLIGISINQLRSLPEGATTVAVPIATGAYICTFIFVTVPSLASVYNEYALKSQYDTSIYLQNLFLYGYGAIFNFLGILGTVIYKGPGSFDILQGHSRATMFLILNNAAQGILSSFFFKYADTILKKYSSTVATIFTGIASAALFGHILTMNFLLGISIVFISMHQFFSPLSKAKDEQQNGNIELVDAKDGHRAKDSFINMAAGATEEASHRIESDDRVPLLPR

SEQ ID NO: 104329 - DNA, 1357 bp, Arabidopsis thaliana
  misc_feature (1)..(1357): Ceres Seq. ID no. 13614779
  misc_feature: MA Experiment ID: 108433 Result: Down-regulated in Transcription
  misc_feature: MA Experiment 108433 PARAMETER Experiment Name: At_rhl_Mutant2_cDNA_P Parameter: Age (day) Value: 7
  misc_feature: MA Experiment 108433 PARAMETER Experiment Name: At_rhl_Mutant2_cDNA_P Parameter: Organism Value: A. thaliana
  misc_feature: MA Experiment 108433 PARAMETER Experiment Name: At_rhl_Mutant2_cDNA_P Parameter: Plant Line Value: rhl Mutant vs. wt landsburg
  misc_feature: MA Experiment 108433 PARAMETER Experiment Name: At_rhl_Mutant2_cDNA_P Parameter: Tissue Value: Roots
  misc_feature: MA Experiment ID: 108434 Result: Up-regulated in Transcription
  misc_feature: MA Experiment 108434 PARAMETER Experiment Name: At_Root_Tips_cDNA_P Parameter: Tissue Value: Root Tips
  misc_feature: MA Experiment ID: 108561 Result: Down-regulated in Transcription
  misc_feature: MA Experiment 108561 PARAMETER Experiment Name: At_100uM_ABA_cDNA_P Parameter: Timepoint (hr) Value: 6
  misc_feature: MA Experiment 108561 PARAMETER Experiment Name: At_100uM_ABA_cDNA_P Parameter: Tissue Value: Aerial
  misc_feature: MA Experiment 108561 PARAMETER Experiment Name: At_100uM_ABA_cDNA_P Parameter: Treatment Value: 100uM ABA vs. No Treatment
  misc_feature: MA Experiment ID: 108573 Result: Down-regulated in Transcription
  misc_feature: MA Experiment 108573 PARAMETER Experiment Name: At_Drought_cDNA_P Parameter: Timepoint (hr) Value: 6
  misc_feature: MA Experiment 108573 PARAMETER Experiment Name: At_Drought_cDNA_P Parameter: Tissue Value: Aerial
  misc_feature: MA Experiment 108573 PARAMETER Experiment Name: At_Drought_cDNA_P Parameter: Treatment Value: Drought vs. No Drought
  misc_feature: MA Experiment ID: 108576 Result: Down-regulated in Transcription
  misc_feature: MA Experiment 108576 PARAMETER Experiment Name: At_42deg_Heat_cDNA_P Parameter: Temperature (deg C) Value: 42 vs. 22
  misc_feature: MA Experiment 108576 PARAMETER Experiment Name: At_42deg_Heat_cDNA_P Parameter: Timepoint (hr) Value: 1
  misc_feature: MA Experiment 108576 PARAMETER Experiment Name: At_42deg_Heat_cDNA_P Parameter: Tissue Value: Aerial
  misc_feature: MA Experiment ID: 108577 Result: Down-regulated in Transcription
  misc_feature: MA Experiment 108577 PARAMETER Experiment Name: At_42deg_Heat_cDNA_P Parameter: Temperature (deg C) Value: 42 vs. 22
  misc_feature: MA Experiment 108577 PARAMETER Experiment Name: At_42deg_Heat_cDNA_P Parameter: Timepoint (hr) Value: 6
  misc_feature: MA Experiment 108577 PARAMETER Experiment Name: At_42deg_Heat_cDNA_P Parameter: Tissue Value: Aerial
  misc_feature: MA Experiment ID: 108605 Result: Down-regulated in Transcription
  misc_feature: MA Experiment 108605 PARAMETER Experiment Name: At_100uM_ABA_cDNA_P Parameter: Timepoint (hr) Value: 6
  misc_feature: MA Experiment 108605 PARAMETER Experiment Name: At_100uM_ABA_cDNA_P Parameter: Tissue Value: Aerial
  misc_feature: MA Experiment 108605 PARAMETER Experiment Name: At_100uM_ABA_cDNA_P Parameter: Treatment Value: 100uM ABA vs. No Treatment
  misc_feature: MA Experiment ID: 108607 Result: Down-regulated in Transcription
  misc_feature: MA Experiment 108607 PARAMETER Experiment Name: At_100uM_ABA_cDNA_P Parameter: Timepoint (hr) Value: 4
  misc_feature: MA Experiment 108607 PARAMETER Experiment Name: At_100uM_ABA_cDNA_P Parameter: Tissue Value: Aerial
  misc_feature: MA Experiment 108607 PARAMETER Experiment Name: At_100uM_ABA_cDNA_P Parameter: Treatment Value: 100uM ABA vs. No Treatment
  misc_feature: MA Experiment ID: 108668 Result: Down-regulated in Transcription
  misc_feature: MA Experiment 108668 PARAMETER Experiment Name: At_2mM_SA_cDNA_P Parameter: Plant Line Value: WS
  misc_feature: MA Experiment 108668 PARAMETER Experiment Name: At_2mM_SA_cDNA_P Parameter: Timepoint (hr) Value: 6
  misc_feature: MA Experiment 108668 PARAMETER Experiment Name: At_2mM_SA_cDNA_P Parameter: Treatment Value: 2mM SA vs. No Treatment
  misc_feature: MA Experiment ID: 20000173 Result: Down-regulated in Transcription
  misc_feature: MA Experiment 20000173 PARAMETER Experiment Name: At_42deg_Heat_P Parameter: Age (day) Value: 14
  misc_feature: MA Experiment 20000173 PARAMETER Experiment Name: At_42deg_Heat_P Parameter: Organism Value: A. thaliana
  misc_feature: MA Experiment 20000173 PARAMETER Experiment Name: At_42deg_Heat_P Parameter: Plant Line Value: WS
  misc_feature: MA Experiment 20000173 PARAMETER Experiment Name: At_42deg_Heat_P Parameter: Temperature (deg C) Value: 42 vs. 22
  misc_feature: MA Experiment 20000173 PARAMETER Experiment Name: At_42deg_Heat_P Parameter: Timepoint (hr) Value: 6
  misc_feature: MA Experiment 20000173 PARAMETER Experiment Name: At_42deg_Heat_P Parameter: Tissue Value: Aerial
  misc_feature: MA Experiment ID: 20000182 Result: Down-regulated in Transcription
  misc_feature: MA Experiment 20000182 PARAMETER Experiment Name: At_2mM_SA_P Parameter: Age (day) Value: 14
  misc_feature: MA Experiment 20000182 PARAMETER Experiment Name: At_2mM_SA_P Parameter: Organism Value: A. thaliana
  misc_feature: MA Experiment 20000182 PARAMETER Experiment Name: At_2mM_SA_P Parameter: Plant Line Value: WS
  misc_feature: MA Experiment 20000182 PARAMETER Experiment Name: At_2mM_SA_P Parameter: Timepoint (hr) Value: 6
  misc_feature: MA Experiment 20000182 PARAMETER Experiment Name: At_2mM_SA_P Parameter: Tissue Value: Aerial
  misc_feature: MA Experiment 20000182 PARAMETER Experiment Name: At_2mM_SA_P Parameter: Treatment Value: 2mM SA vs. No Treatment
  misc_feature: MA Experiment ID: 20000184 Result: Up-regulated in Transcription
  misc_feature: MA Experiment 20000184 PARAMETER Experiment Name: At_Shoots__P Parameter: Age (day) Value: 7
  misc_feature: MA Experiment 20000184 PARAMETER Experiment Name: At_Shoots__P Parameter: Tissue Value: Shoots vs. Whole Plant
  misc_feature: MA Experiment ID: 20000234 Result: Up-regulated in Transcription
  misc_feature: MA Experiment 20000234 PARAMETER Experiment Name: At_Siliques_P Parameter: Age (day) Value: 21
  misc_feature: MA Experiment 20000234 PARAMETER Experiment Name: At_Siliques_P Parameter: Organism Value: A. thaliana
  misc_feature: MA Experiment 20000234 PARAMETER Experiment Name: At_Siliques_P Parameter: Plant Line Value: WS
  misc_feature: MA Experiment 20000234 PARAMETER Experiment Name: At_Siliques_P Parameter: Tissue Value: Less Than 5mm Siliques vs. Whole Plant
  misc_feature: MA Experiment ID: 20000264 Result: Up-regulated in Transcription
  misc_feature: MA Experiment 20000264 PARAMETER Experiment Name: At_Open_Flower_P Parameter: Age (day) Value: 21
  misc_feature: MA Experiment 20000264 PARAMETER Experiment Name: At_Open_Flower_P Parameter: Plant Line Value: WS
  misc_feature: MA Experiment 20000264 PARAMETER Experiment Name: At_Open_Flower_P Parameter: Tissue Value: Open Flower vs. Whole Plant
  misc_feature: MA Experiment ID: 20000265 Result: Up-regulated in Transcription
  misc_feature: MA Experiment 20000265 PARAMETER Experiment Name: At_Open_Flower_P Parameter: Age (day) Value: 21
  misc_feature: MA Experiment 20000265 PARAMETER Experiment Name: At_Open_Flower_P Parameter: Plant Line Value: WS
  misc_feature: MA Experiment 20000265 PARAMETER Experiment Name: At_Open_Flower_P Parameter: Tissue Value: Closed Flower vs. Whole Plant
  misc_feature: MA Experiment ID: 20000286 Result: Up-regulated in Transcription
  misc_feature: MA Experiment 20000286 PARAMETER Experiment Name: At_Open_Flower_P Parameter: Age (day) Value: 21
  misc_feature: MA Experiment 20000286 PARAMETER Experiment Name: At_Open_Flower_P Parameter: Plant Line Value: WS
  misc_feature: MA Experiment 20000286 PARAMETER Experiment Name: At_Open_Flower_P Parameter: Tissue Value: Half Open vs. Whole Plant
  misc_feature: MA Experiment ID: 20000437 Result: Down-regulated in Transcription
  misc_feature: MA Experiment 20000437 PARAMETER Experiment Name: At_Drought_P Parameter: Age (day) Value: 8
  misc_feature: MA Experiment 20000437 PARAMETER Experiment Name: At_Drought_P Parameter: Organism Value: A. thaliana
  misc_feature: MA Experiment 20000437 PARAMETER Experiment Name: At_Drought_P Parameter: Plant Line Value: WS
  misc_feature: MA Experiment 20000437 PARAMETER Experiment Name: At_Drought_P Parameter: Timepoint (hr) Value: 24
  misc_feature: MA Experiment 20000437 PARAMETER Experiment Name: At_Drought_P Parameter: Tissue Value: Whole Plant
  misc_feature: MA Experiment 20000437 PARAMETER Experiment Name: At_Drought_P Parameter: Treatment Value: Drought vs. No Drought
  misc_feature: MA Experiment ID: 20000438 Result: Up-regulated in Transcription
  misc_feature: MA Experiment 20000438 PARAMETER Experiment Name: At_Shoots__P Parameter: Age (day) Value: 14
  misc_feature: MA Experiment 20000438 PARAMETER Experiment Name: At_Shoots__P Parameter: Tissue Value: Shoots vs. Whole Plant
  misc_feature: MA Experiment ID: 20000794 Result: Down-regulated in Transcription
  misc_feature: MA Experiment 20000794 PARAMETER Experiment Name: At_Petals_P Parameter: Age (day) Value: 23-25 days
  misc_feature: MA Experiment 20000794 PARAMETER Experiment Name: At_Petals_P Parameter: Plant Line Value: WS
  misc_feature: MA Experiment 20000794 PARAMETER Experiment Name: At_Petals_P Parameter: Tissue Value: Petals vs. Whole plant
  misc_feature: MA Experiment ID: 20001560 Result: Up-regulated in Transcription
  misc_feature: MA Experiment 20001560 PARAMETER Experiment Name: At_Drought_Soil_Dry_P Parameter: Age (day) Value: 28
  misc_feature: MA Experiment 20001560 PARAMETER Experiment Name: At_Drought_Soil_Dry_P Parameter: Organism Value: A. thaliana
  misc_feature: MA Experiment 20001560 PARAMETER Experiment Name: At_Drought_Soil_Dry_P Parameter: Plant Line Value: WS
  misc_feature: MA Experiment 20001560 PARAMETER Experiment Name: At_Drought_Soil_Dry_P Parameter: Post Timepoint (hr) Value: None
  misc_feature: MA Experiment 20001560 PARAMETER Experiment Name: At_Drought_Soil_Dry_P Parameter: Post-Treatment Value: None
  misc_feature: MA Experiment 20001560 PARAMETER Experiment Name: At_Drought_Soil_Dry_P Parameter: Timepoint (day) Value: 14
  misc_feature: MA Experiment 20001560 PARAMETER Experiment Name: At_Drought_Soil_Dry_P Parameter: Treatment Value: Drought vs. No Drought
  misc_feature: MA Experiment ID: 20001757 Result: Up-regulated in Transcription
  misc_feature: MA Experiment 20001757 PARAMETER Experiment Name: At_50mM_NH4NO3_L-to-H_P Parameter: Timepoint (hr) Value: 6
  misc_feature: MA Experiment 20001757 PARAMETER Experiment Name: At_50mM_NH4NO3_L-to-H_P Parameter: Tissue Value: Leaf
  misc_feature: MA Experiment 20001757 PARAMETER Experiment Name: At_50mM_NH4NO3_L-to-H_P Parameter: Treatment Value: 50mM NH4NO3 vs 100mM Mannitol
  misc_feature: MA Experiment ID: 20001911 Result: Down-regulated in Transcription
  misc_feature: MA Experiment 20001911 PARAMETER Experiment Name: At_Drought_Reproduction_P Parameter: Age (day) Value: 40
  misc_feature: MA Experiment 20001911 PARAMETER Experiment Name: At_Drought_Reproduction_P Parameter: Organism Value: A. thaliana
  misc_feature: MA Experiment 20001911 PARAMETER Experiment Name: At_Drought_Reproduction_P Parameter: Plant Line Value: WS
  misc_feature: MA Experiment 20001911 PARAMETER Experiment Name: At_Drought_Reproduction_P Parameter: Timepoint (day) Value: 10
  misc_feature: MA Experiment 20001911 PARAMETER Experiment Name: At_Drought_Reproduction_P Parameter: Tissue Value: Flowers
  misc_feature: MA Experiment 20001911 PARAMETER Experiment Name: At_Drought_Reproduction_P Parameter: Treatment Value: Drought vs. No Drought
gaaaagctctagcacaaaccaaacaccaaatctcatttcttcttcttcttctttttccacattttctgattagcagatcaaatgatgcttgttcgatctgtatttcgatctcagttgcgaccctctgtctcgggtggtctgcaatctgcttcttgctattcttcattatctgctgcttcagctgaagctgagaggactatcagagaaggtcccagaaacgattggagtagagatgaaatcaagtctgtttatgattctcctcttcttgacctcctcttccatggagctcaggttcatagacatgttcataacttcagggaggtacaacaatgtaccctcctctccataaagactggtggctgtagtgaagactgttcatattgtcctcagtcttcgagatatagcactggagttaaggcacaaagactcatgtctaaggacgctgtcattgatgctgctaagaaggcaaaagaagctgggagcacacgtttttgcatgggtgctgcttggcgagatacaattggacggaaaaccaacttcagccagattcttgaatacatcaaagaaataagaggcatggggatggaagtttgctgcaccttaggcatgattgagaaacaacaagcactagagctaaagaaggctggcctcactgcttataaccacaatcttgatacttcaagagagtactacccaaacgtcatcactactagaagttatgacgatcgccttgaaactcttagccatgttcgtgatgctggaatcaacgtttgttcaggaggaatcatagggcttggtgaggcagaggaagacagaataggtttattacacacgctggcaacacttccttctcaccctgagagtgttcccattaatgctctacttgcagtgaaaggcactcctcttgaagaccagaagccagttgagatatgggagatgatcaggatgattggaaccgcacgtattgtaatgccaaaagcgatggtgagactgtctgctggtagagtccggttctcaatgtccgaacaagctctctgtttccttgctggtgcaaactctatcttcaccggagagaagcttttaaccacaccaaacaatgattttgacgctgaccagctcatgttcaagacattaggcctcattcctaaaccgccaagtttctctgaagatgattctgaatcagaaaactgcgagaaagttgcttccgcttctcactaatatcattatccactttttttttttgtttggagtcgggacactatagagcagtcccttttactatgtagcatggtttgacgattttgtgatatcatttttcgttaatcgttattcgaagatgtctagatttctcatctga

SEQ ID NO: 104330 - protein, 378 aa, Arabidopsis thaliana; identical to SEQ ID NO: 37655
  peptide (1)..(378): Ceres Seq. ID no. 13614780
  misc_feature (88)..(252): Pfam Name: Radical SAM superfamily Pfam Description: Radical SAM superfamily
  misc_feature (1)..(378): Homolog of NCBI NO: 15224273 NR Description: biotin synthase (BioB) (BIO2) [Arabidopsis >gi|1705463|sp|P54967|BIOB_ARATH Biotin synthase (Biotin
  misc_feature (1)..(378): Homolog of NCBI NO: 28392925 NR Description: putative biotin synthase (Bio B) [Arabidopsis
  misc_feature (1)..(375): Homolog of NCBI NO: 38175566 NR Description: putative biotin synthase [Oryza sativa (japonica
  misc_feature (45)..(376): Homolog of NCBI NO: 23135112 NR Description: hypothetical protein [Cytophaga hutchinsonii]
  misc_feature (18)..(378): Homolog of NCBI NO: 40738982 NR Description: hypothetical protein AN6643.2 [Aspergillus
  misc_feature (45)..(353): Homolog of NCBI NO: 19075228 NR Description: biotin synthase (EC 2.8.1.6) [Schizosaccharomyces >gi|12643615|sp|O59778|BIOB_SCHPO Biotin synthase (Biotin
  misc_feature (28)..(358): Homolog of NCBI NO: 32405370 NR Description: hypothetical protein [Neurospora crassa]
  misc_feature (45)..(353): Homolog of NCBI NO: 2961328 NR Description: Biotin synthase [Schizosaccharomyces pombe]
  misc_feature (45)..(359): Homolog of NCBI NO: 17229413 NR Description: biotin synthase [Nostoc sp. PCC 7120]
  misc_feature (43)..(359): Homolog of NCBI NO: 23127772 NR Description: hypothetical protein [Nostoc punctiforme]

SEQ ID NO: 104331 - protein, 377 aa, Arabidopsis thaliana; identical to SEQ ID NO: 37656
  peptide (1)..(377): Ceres Seq. ID no. 13614781
  misc_feature (87)..(251): Pfam Name: Radical SAM superfamily Pfam Description: Radical SAM superfamily
  misc_feature (1)..(377): Homolog of NCBI NO: 15224273 NR Description: biotin synthase (BioB) (BIO2) [Arabidopsis >gi|1705463|sp|P54967|BIOB_ARATH Biotin synthase (Biotin
  misc_feature (1)..(377): Homolog of NCBI NO: 28392925 NR Description: putative biotin synthase (Bio B) [Arabidopsis
  misc_feature (1)..(374): Homolog of NCBI NO: 38175566 NR Description: putative biotin synthase [Oryza sativa (japonica
  misc_feature (44)..(375): Homolog of NCBI NO: 23135112 NR Description: hypothetical protein [Cytophaga hutchinsonii]
  misc_feature (17)..(377): Homolog of NCBI NO: 40738982 NR Description: hypothetical protein AN6643.2 [Aspergillus
  misc_feature (44)..(352): Homolog of NCBI NO: 19075228 NR Description: biotin synthase (EC 2.8.1.6) [Schizosaccharomyces >gi|12643615|sp|O59778|BIOB_SCHPO Biotin synthase (Biotin
  misc_feature (27)..(357): Homolog of NCBI NO: 32405370 NR Description: hypothetical protein [Neurospora crassa]
  misc_feature (44)..(352): Homolog of NCBI NO: 2961328 NR Description: Biotin synthase [Schizosaccharomyces pombe]
  misc_feature (44)..(358): Homolog of NCBI NO: 17229413 NR Description: biotin synthase [Nostoc sp. PCC 7120]
  misc_feature (42)..(358): Homolog of NCBI NO: 23127772 NR Description: hypothetical protein [Nostoc punctiforme]

SEQ ID NO: 104332 - protein, 262 aa, Arabidopsis thaliana; identical to SEQ ID NO: 37657
  peptide (1)..(262): Ceres Seq. ID no. 13614782
  misc_feature (1)..(136): Pfam Name: Radical SAM superfamily Pfam Description: Radical SAM superfamily
  misc_feature (1)..(262): Homolog of NCBI NO: 15224273 NR Description: biotin synthase (BioB) (BIO2) [Arabidopsis >gi|1705463|sp|P54967|BIOB_ARATH Biotin synthase (Biotin
  misc_feature (1)..(262): Homolog of NCBI NO: 28392925 NR Description: putative biotin synthase (Bio B) [Arabidopsis
  misc_feature (1)..(259): Homolog of NCBI NO: 38175566 NR Description: putative biotin synthase [Oryza sativa (japonica
  misc_feature (1)..(260): Homolog of NCBI NO: 23135112 NR Description: hypothetical protein [Cytophaga hutchinsonii]
  misc_feature (1)..(262): Homolog of NCBI NO: 40738982 NR Description: hypothetical protein AN6643.2 [Aspergillus
  misc_feature (1)..(237): Homolog of NCBI NO: 19075228 NR Description: biotin synthase (EC 2.8.1.6) [Schizosaccharomyces >gi|12643615|sp|O59778|BIOB_SCHPO Biotin synthase (Biotin
  misc_feature (1)..(242): Homolog of NCBI NO: 32405370 NR Description: hypothetical protein [Neurospora crassa]
  misc_feature (1)..(237): Homolog of NCBI NO: 2961328 NR Description: Biotin synthase [Schizosaccharomyces pombe]
  misc_feature (1)..(243): Homolog of NCBI NO: 17229413 NR Description: biotin synthase [Nostoc sp. PCC 7120]
  misc_feature (1)..(243): Homolog of NCBI NO: 23127772 NR Description: hypothetical protein [Nostoc punctiforme]

SEQ ID NO: 104333 - DNA, 1302 bp, Arabidopsis thaliana
  misc_feature (1)..(1302): Ceres Seq. ID no. 13614793
  misc_feature: MA Experiment ID: 108488 Result: Down-regulated in Transcription
  misc_feature: MA Experiment ID: 108573 Result: Up-regulated in Transcription
  misc_feature: MA Experiment 108573 PARAMETER Experiment Name: At_Drought_cDNA_P Parameter: Timepoint (hr) Value: 6
  misc_feature: MA Experiment 108573 PARAMETER Experiment Name: At_Drought_cDNA_P Parameter: Tissue Value: Aerial
  misc_feature: MA Experiment 108573 PARAMETER Experiment Name: At_Drought_cDNA_P Parameter: Treatment Value: Drought vs. No Drought
  misc_feature: MA Experiment ID: 108577 Result: Down-regulated in Transcription
  misc_feature: MA Experiment 108577 PARAMETER Experiment Name: At_42deg_Heat_cDNA_P Parameter: Temperature (deg C) Value: 42 vs. 22
  misc_feature: MA Experiment 108577 PARAMETER Experiment Name: At_42deg_Heat_cDNA_P Parameter: Timepoint (hr) Value: 6
  misc_feature: MA Experiment 108577 PARAMETER Experiment Name: At_42deg_Heat_cDNA_P Parameter: Tissue Value: Aerial
  misc_feature: MA Experiment ID: 108595 Result: Down-regulated in Transcription
  misc_feature: MA Experiment 108595 PARAMETER Experiment Name: At_Ler-pi_Ovule_cDNA_P Parameter: Plant Line Value: null
  misc_feature: MA Experiment ID: 108668 Result: Up-regulated in Transcription
  misc_feature: MA Experiment 108668 PARAMETER Experiment Name: At_2mM_SA_cDNA_P Parameter: Plant Line Value: WS
  misc_feature: MA Experiment 108668 PARAMETER Experiment Name: At_2mM_SA_cDNA_P Parameter: Timepoint (hr) Value: 6
  misc_feature: MA Experiment 108668 PARAMETER Experiment Name: At_2mM_SA_cDNA_P Parameter: Treatment Value: 2mM SA vs. No Treatment
  misc_feature: MA Experiment ID: 20000069 Result: Up-regulated in Transcription
  misc_feature: MA Experiment 20000069 PARAMETER Experiment Name: At_100uM_ABA_Mutants_cDNA_P Parameter: Plant Line Value: CS23
  misc_feature: MA Experiment 20000069 PARAMETER Experiment Name: At_100uM_ABA_Mutants_cDNA_P Parameter: Timepoint (hr) Value: 6
  misc_feature: MA Experiment 20000069 PARAMETER Experiment Name: At_100uM_ABA_Mutants_cDNA_P Parameter: Tissue Value: Aerial
  misc_feature: MA Experiment 20000069 PARAMETER Experiment Name: At_100uM_ABA_Mutants_cDNA_P Parameter: Treatment Value: 100uM ABA vs. No Treatment
  misc_feature: MA Experiment ID: 20000070 Result: Up-regulated in Transcription
  misc_feature: MA Experiment 20000070 PARAMETER Experiment Name: At_100uM_ABA_Mutants_cDNA_P Parameter: Plant Line Value: CS24
  misc_feature: MA Experiment 20000070 PARAMETER Experiment Name: At_100uM_ABA_Mutants_cDNA_P Parameter: Timepoint (hr) Value: 6
  misc_feature: MA Experiment 20000070 PARAMETER Experiment Name: At_100uM_ABA_Mutants_cDNA_P Parameter: Tissue Value: Aerial
  misc_feature: MA Experiment 20000070 PARAMETER Experiment Name: At_100uM_ABA_Mutants_cDNA_P Parameter: Treatment Value: 100uM ABA vs. No Treatment
  misc_feature: MA Experiment ID: 20000071 Result: Up-regulated in Transcription
  misc_feature: MA Experiment 20000071 PARAMETER Experiment Name: At_100uM_ABA_Mutants_cDNA_P Parameter: Plant Line Value: CS8104
  misc_feature: MA Experiment 20000071 PARAMETER Experiment Name: At_100uM_ABA_Mutants_cDNA_P Parameter: Timepoint (hr) Value: 6
  misc_feature: MA Experiment 20000071 PARAMETER Experiment Name: At_100uM_ABA_Mutants_cDNA_P Parameter: Tissue Value: Aerial
  misc_feature: MA Experiment 20000071 PARAMETER Experiment Name: At_100uM_ABA_Mutants_cDNA_P Parameter: Treatment Value: 100uM ABA vs. No Treatment
  misc_feature: MA Experiment ID: 20000088 Result: Up-regulated in Transcription
  misc_feature: MA Experiment 20000088 PARAMETER Experiment Name: At_100uM_ABA_Mutants_cDNA_P Parameter: Plant Line Value: Landsberg
  misc_feature: MA Experiment 20000088 PARAMETER Experiment Name: At_100uM_ABA_Mutants_cDNA_P Parameter: Timepoint (hr) Value: 6
  misc_feature: MA Experiment 20000088 PARAMETER Experiment Name: At_100uM_ABA_Mutants_cDNA_P Parameter: Tissue Value: Aerial
  misc_feature: MA Experiment 20000088 PARAMETER Experiment Name: At_100uM_ABA_Mutants_cDNA_P Parameter: Treatment Value: 100uM ABA vs. No Treatment
  misc_feature: MA Experiment ID: 20000111 Result: Down-regulated in Transcription
  misc_feature: MA Experiment 20000111 PARAMETER Experiment Name: At_42deg_Heat_cDNA_P Parameter: Temperature (deg C) Value: 42 vs. 22
  misc_feature: MA Experiment 20000111 PARAMETER Experiment Name: At_42deg_Heat_cDNA_P Parameter: Timepoint (hr) Value: 6
  misc_feature: MA Experiment 20000111 PARAMETER Experiment Name: At_42deg_Heat_cDNA_P Parameter: Tissue Value: Aerial
  misc_feature: MA Experiment ID: 20000113 Result: Down-regulated in Transcription
  misc_feature: MA Experiment 20000113 PARAMETER Experiment Name: At_42deg_Heat_cDNA_P Parameter: Temperature (deg C) Value: 42 vs. 22
  misc_feature: MA Experiment 20000113 PARAMETER Experiment Name: At_42deg_Heat_cDNA_P Parameter: Timepoint (hr) Value: 8
  misc_feature: MA Experiment 20000113 PARAMETER Experiment Name: At_42deg_Heat_cDNA_P Parameter: Tissue Value: Aerial
  misc_feature: MA Experiment ID: 20000117 Result: Up-regulated in Transcription
  misc_feature: MA Experiment 20000117 PARAMETER Experiment Name: At_100uM_ABA_Mutants_cDNA_P Parameter: Plant Line Value: Columbia
  misc_feature: MA Experiment 20000117 PARAMETER Experiment Name: At_100uM_ABA_Mutants_cDNA_P Parameter: Timepoint (hr) Value: 6
  misc_feature: MA Experiment 20000117 PARAMETER Experiment Name: At_100uM_ABA_Mutants_cDNA_P Parameter: Tissue Value: Aerial
  misc_feature: MA Experiment 20000117 PARAMETER Experiment Name: At_100uM_ABA_Mutants_cDNA_P Parameter: Treatment Value: 100uM ABA vs. No Treatment
  misc_feature: MA Experiment ID: 20000182 Result: Up-regulated in Transcription
  misc_feature: MA Experiment 20000182 PARAMETER Experiment Name: At_2mM_SA_P Parameter: Age (day) Value: 14
  misc_feature: MA Experiment 20000182 PARAMETER Experiment Name: At_2mM_SA_P Parameter: Organism Value: A. thaliana
  misc_feature: MA Experiment 20000182 PARAMETER Experiment Name: At_2mM_SA_P Parameter: Plant Line Value: WS
  misc_feature: MA Experiment 20000182 PARAMETER Experiment Name: At_2mM_SA_P Parameter: Timepoint (hr) Value: 6
  misc_feature: MA Experiment 20000182 PARAMETER Experiment Name: At_2mM_SA_P Parameter: Tissue Value: Aerial
  misc_feature: MA Experiment 20000182 PARAMETER Experiment Name: At_2mM_SA_P Parameter: Treatment Value: 2mM SA vs. No Treatment
  misc_feature: MA Experiment ID: 20000184 Result: Down-regulated in Transcription
  misc_feature: MA Experiment 20000184 PARAMETER Experiment Name: At_Shoots__P Parameter: Age (day) Value: 7
  misc_feature: MA Experiment 20000184 PARAMETER Experiment Name: At_Shoots__P Parameter: Tissue Value: Shoots vs. Whole Plant
  misc_feature: MA Experiment ID: 20000794 Result: Up-regulated in Transcription
  misc_feature: MA Experiment 20000794 PARAMETER Experiment Name: At_Petals_P Parameter: Age (day) Value: 23-25 days
  misc_feature: MA Experiment 20000794 PARAMETER Experiment Name: At_Petals_P Parameter: Plant Line Value: WS
  misc_feature: MA Experiment 20000794 PARAMETER Experiment Name: At_Petals_P Parameter: Tissue Value: Petals vs. Whole plant
  misc_feature: MA Experiment ID: 20001451 Result: Down-regulated in Transcription
  misc_feature: MA Experiment 20001451 PARAMETER Experiment Name: At_Far-red-induction_P Parameter: Age (day) Value: 7
  misc_feature: MA Experiment 20001451 PARAMETER Experiment Name: At_Far-red-induction_P Parameter: Light Value: Far-red vs. White
  misc_feature: MA Experiment 20001451 PARAMETER Experiment Name: At_Far-red-induction_P Parameter: Organism Value: A. thaliana
  misc_feature: MA Experiment 20001451 PARAMETER Experiment Name: At_Far-red-induction_P Parameter: Plant Line Value: Columbia
  misc_feature: MA Experiment 20001451 PARAMETER Experiment Name: At_Far-red-induction_P Parameter: Timepoint (hr) Value: 24
  misc_feature: MA Experiment 20001451 PARAMETER Experiment Name: At_Far-red-induction_P Parameter: Tissue Value: Whole Plant
aaaggaagtatacgtttgtttctttgctctgaggtatcttcgtttgatacaaggcgaaatcgatcttcttcttcttcttcttcatccccttgcgttttccatctccatcgtctgctgaaaccatttgatcgatctctcaggttacttagaatggcacaagaagccgatgggatcagattggaccaaagacatgggaaggctcgagtgagagttggaagagtttggcgtcatgctcatgatggatctcatcactttgttgaatggaatgttagcatcagtcttctctctcactgtctctcttcttaccgtcttgatgataactctgatattgtcgccacagataccattaaaaacactgtttatgtgaaagccaaggaatgtggagatcggctctcggtggaggaatttgccatacttattgggaaacacttttgctcattttatccacaggtatttactgctatcgtgaatatcattgagaagccctgggagcgtgtctccatcgatggaaaaccacatttacatggttttaagcttgggtcagagaaccatactacagaggcaagagtagaaaagtctggtgcattaaacttaacttccggtattggaggactagctctactgaagacaacccagtcaggatttgagaggtttgtcagagacaaatacaccattctgcctgaaactcgtgagcgaatgctggccacagaggttaatgcatcttggaggtactcgtatgagtcagttgcaagcattccaacaaaaggactctactttagcgagaagttcatggacgttaagaaagttctgatggatactttctttggtccaccagaaactggtgtgtatagcccttctgtccaacgcactctctacctcatgggaagcgccgtactgaaaaggttcgctgatgtatcatcgattcacctaaaaatgccaaatattcattttctaccagtaaatctttcaacgaaggaaaacccttcaatggtgaagtttaaagatgatgtgtacctgccaaccgatgaacctcatggatctatagaagcaactctaagccgtataacctcgaaactatgaggttttaagacaatacatcatacatggaaatatcaaacacaatttcacaggttctgcaacttttggcgtttgcctcgtttatgaaataacaatttaaatgaagtgtgtaaggtcaacttttggcttttgttgcaagaataatactgtaactgcaaacagtttcacataaaaatgtagcttacatatattatcactgattcgcagtcatgttacatttttacc

SEQ ID NO: 104334 - protein, 359 aa, Arabidopsis thaliana; identical to SEQ ID NO: 24323
  peptide (1)..(359): Ceres Seq. ID no. 13614794
  misc_feature (197)..(350): Pfam Name: Uricase Pfam Description: Uricase
  misc_feature (51)..(359): Homolog of NCBI NO: 15225267 NR Description: uricase subunit -related [Arabidopsis thaliana]
  misc_feature (51)..(359): Homolog of NCBI NO: 6175090 NR Description: Uricase (Urate oxidase) (Nodulin 35 homolog)
  misc_feature (51)..(359): Homolog of NCBI NO: 11414898 NR Description: uricase [Lotus japonicus]
  misc_feature (51)..(359): Homolog of NCBI NO: 4996846 NR Description: uricase (Nod-35) [Medicago sativa]
  misc_feature (51)..(359): Homolog of NCBI NO: 7242493 NR Description: urate oxidase [Cicer arietinum]
  misc_feature (51)..(359): Homolog of NCBI NO: 4996848 NR Description: uricase (Nod-35) [Medicago sativa]
  misc_feature (51)..(359): Homolog of NCBI NO: 6175091 NR Description: Uricase II (Urate oxidase) (Nodule specific
  misc_feature (51)..(359): Homolog of NCBI NO: 549169 NR Description: Uricase II isozyme 1 (Urate oxidase) (Nodulin 35)

SEQ ID NO: 104335 - protein, 309 aa, Arabidopsis thaliana; identical to SEQ ID NO: 24324
  peptide (1)..(309): Ceres Seq. ID no. 13614795
  misc_feature (147)..(300): Pfam Name: Uricase Pfam Description: Uricase
  misc_feature (1)..(309): Homolog of NCBI NO: 15225267 NR Description: uricase subunit -related [Arabidopsis thaliana]
  misc_feature (1)..(309): Homolog of NCBI NO: 6175090 NR Description: Uricase (Urate oxidase) (Nodulin 35 homolog)
  misc_feature (1)..(309): Homolog of NCBI NO: 11414898 NR Description: uricase [Lotus japonicus]
  misc_feature (1)..(309): Homolog of NCBI NO: 4996846 NR Description: uricase (Nod-35) [Medicago sativa]
  misc_feature (1)..(309): Homolog of NCBI NO: 7242493 NR Description: urate oxidase [Cicer arietinum]
  misc_feature (1)..(309): Homolog of NCBI NO: 4996848 NR Description: uricase (Nod-35) [Medicago sativa]
  misc_feature (1)..(309): Homolog of NCBI NO: 6175091 NR Description: Uricase II (Urate oxidase) (Nodule specific
  misc_feature (1)..(309): Homolog of NCBI NO: 549169 NR Description: Uricase II isozyme 1 (Urate oxidase) (Nodulin 35)

SEQ ID NO: 104336 - DNA, 1351 bp, Arabidopsis thaliana
  misc_feature (1)..(1351): Ceres Seq. ID no. 13614806
  misc_feature: MA Experiment ID: 108489 Result: Up-regulated in Transcription
  misc_feature: MA Experiment ID: 20000234 Result: Up-regulated in Transcription
  misc_feature: MA Experiment 20000234 PARAMETER Experiment Name: At_Siliques_P Parameter: Age (day) Value: 21
  misc_feature: MA Experiment 20000234 PARAMETER Experiment Name: At_Siliques_P Parameter: Organism Value: A. thaliana
  misc_feature: MA Experiment 20000234 PARAMETER Experiment Name: At_Siliques_P Parameter: Plant Line Value: WS
  misc_feature: MA Experiment 20000234 PARAMETER Experiment Name: At_Siliques_P Parameter: Tissue Value: Less Than 5mm Siliques vs. Whole Plant
  misc_feature: MA Experiment ID: 20000264 Result: Up-regulated in Transcription
  misc_feature: MA Experiment 20000264 PARAMETER Experiment Name: At_Open_Flower_P Parameter: Age (day) Value: 21
  misc_feature: MA Experiment 20000264 PARAMETER Experiment Name: At_Open_Flower_P Parameter: Plant Line Value: WS
  misc_feature: MA Experiment 20000264 PARAMETER Experiment Name: At_Open_Flower_P Parameter: Tissue Value: Open Flower vs. Whole Plant
  misc_feature: MA Experiment ID: 20000265 Result: Up-regulated in Transcription
  misc_feature: MA Experiment 20000265 PARAMETER Experiment Name: At_Open_Flower_P Parameter: Age (day) Value: 21
  misc_feature: MA Experiment 20000265 PARAMETER Experiment Name: At_Open_Flower_P Parameter: Plant Line Value: WS
  misc_feature: MA Experiment 20000265 PARAMETER Experiment Name: At_Open_Flower_P Parameter: Tissue Value: Closed Flower vs. Whole Plant
  misc_feature: MA Experiment ID: 20000286 Result: Up-regulated in Transcription
  misc_feature: MA Experiment 20000286 PARAMETER Experiment Name: At_Open_Flower_P Parameter: Age (day) Value: 21
  misc_feature: MA Experiment 20000286 PARAMETER Experiment Name: At_Open_Flower_P Parameter: Plant Line Value: WS
  misc_feature: MA Experiment 20000286 PARAMETER Experiment Name: At_Open_Flower_P Parameter: Tissue Value: Half Open vs. Whole Plant
  misc_feature: MA Experiment ID: 20000794 Result: Up-regulated in Transcription
  misc_feature: MA Experiment 20000794 PARAMETER Experiment Name: At_Petals_P Parameter: Age (day) Value: 23-25 days
  misc_feature: MA Experiment 20000794 PARAMETER Experiment Name: At_Petals_P Parameter: Plant Line Value: WS
  misc_feature: MA Experiment 20000794 PARAMETER Experiment Name: At_Petals_P Parameter: Tissue Value: Petals vs. Whole plant
  misc_feature: MA Experiment ID: 20001757 Result: Down-regulated in Transcription
  misc_feature: MA Experiment 20001757 PARAMETER Experiment Name: At_50mM_NH4NO3_L-to-H_P Parameter: Timepoint (hr) Value: 6
  misc_feature: MA Experiment 20001757 PARAMETER Experiment Name: At_50mM_NH4NO3_L-to-H_P Parameter: Tissue Value: Leaf
  misc_feature: MA Experiment 20001757 PARAMETER Experiment Name: At_50mM_NH4NO3_L-to-H_P Parameter: Treatment Value: 50mM NH4NO3 vs 100mM Mannitol
  misc_feature: MA Experiment ID: 20001910 Result: Up-regulated in Transcription
  misc_feature: MA Experiment 20001910 PARAMETER Experiment Name: At_Drought_Reproduction_P Parameter: Age (day) Value: 37
  misc_feature: MA Experiment 20001910 PARAMETER Experiment Name: At_Drought_Reproduction_P Parameter: Organism Value: A. thaliana
  misc_feature: MA Experiment 20001910 PARAMETER Experiment Name: At_Drought_Reproduction_P Parameter: Plant Line Value: WS
  misc_feature: MA Experiment 20001910 PARAMETER Experiment Name: At_Drought_Reproduction_P Parameter: Timepoint (day) Value: 7
  misc_feature: MA Experiment 20001910 PARAMETER Experiment Name: At_Drought_Reproduction_P Parameter: Tissue Value: Flowers
  misc_feature: MA Experiment 20001910 PARAMETER Experiment Name: At_Drought_Reproduction_P Parameter: Treatment Value: Drought vs. No Drought
aaaagaaaagtagaaaccccaagaaaaaataaaaaaaataatgggtcatcgaacaagaatgatccttgtcctaaccctagttgtaatgtccatatggggttcggacgcatcagcaatgcaaaagacgaaattcgacgccccacttttgactgaaaaaatcgcgacaaatagatcgataattgtagatatcgaaggcaaaggagactacacttcggttcagaaagccatcgatgctgtccctgttggtaactctaattggattattgtccatgtccgtaaaggaatctacaaggagagagtgcacattccggagaacaagccgttcatattcatgaggggtaatggaaaaggaaaaacggtgatcgaatcttcgcaaagttcggtcgacaatgttgcttcagctactttcaaagtcgaggctaatcactttgtcgcttttggtatcagcatccgaaatgatgcacctgtcggaatggcattcacatctgagaaccaatcggtggcagcgtttgtggctgctgacaaagtagcgttttaccattgtgcgttctacagcttacacaacactttgtttgataacaaaggtagacattactaccatgagtgttacatccaaggctccatagacttcatcttcggtcgcgcaacttccattttcaacaattgtgagatatttgtgatatcagacaagagggtgaaaccgtatgggtcaatcacagcacaccatagggaaagcgcagaggaaaaaacgggttacgtgttcataagaggcaaagtgtacggaattgatgaggtttacttgggccgagccaaaggaccttattctcgagtcatctttgccaagacttacttgtccaagaccgttgtgcctgatggttggacaaactggagttaccatggctcgacccagaatctataccatggggagtataaatgtcatggaccaggagctgagaggcaaaagagatctgactgggccaaagatcttaccaaacaagaagttgagtctttcttgtccattgattttattgatggcacttcttggctccctgtttggcttcaggaaaagttttagagttccttatgctgtcgcgtttggcttttgacatttcgcgttttggtgtggcttggaaaaaaaacatatgaagaaagaagagtacttcatcctttcttcgacggtatactatacgaaatagttttctctcttttttttttgtgtacttctactctaaaatgttcttagagtgattggaaactcttatgttgtttgcaaacattatataagattgtttccatcttaataatatatgtaacctaaatttaaatcctataaatttaaaatattttcccg

SEQ ID NO: 104337 - protein, 344 aa, Arabidopsis thaliana; identical to SEQ ID NO: 29383
  peptide (1)..(344): Ceres Seq. ID no. 13614807
  misc_feature (45)..(333): Pfam Name: Pectinesterase Pfam Description: Pectinesterase
  misc_feature (1)..(344): Homolog of NCBI NO: 15228955 NR Description: pectinesterase family [Arabidopsis thaliana]
  misc_feature (4)..(339): Homolog of NCBI NO: 39653369 NR Description: putative pectinesterase [Oryza sativa (indica
  misc_feature (53)..(336): Homolog of NCBI NO: 15241163 NR Description: pectinesterase family [Arabidopsis thaliana] putative pectin methylesterase [Arabidopsis thaliana]
  misc_feature (45)..(336): Homolog of NCBI NO: 34909402 NR Description: putative pectin methylesterase [Oryza sativa
  misc_feature (36)..(336): Homolog of NCBI NO: 15228023 NR Description: pectinesterase family [Arabidopsis thaliana]
  misc_feature (36)..(336): Homolog of NCBI NO: 27754550 NR Description: putative pectinesterase family protein
  misc_feature (1)..(336): Homolog of NCBI NO: 15226598 NR Description: pectinesterase family [Arabidopsis thaliana]
  misc_feature (41)..(336): Homolog of NCBI NO: 15240544 NR Description: pectinesterase family [Arabidopsis thaliana] contains similarity to pectin methylesterase~gene_id:MDF20.3
  misc_feature (31)..(336): Homolog of NCBI NO: 15239623 NR Description: pectinesterase family [Arabidopsis thaliana]
  misc_feature (43)..(336): Homolog of NCBI NO: 15238111 NR Description: pectinesterase family [Arabidopsis thaliana] AT5g47500/MNJ7_9 [Arabidopsis thaliana]

SEQ ID NO: 104338 - protein, 338 aa, Arabidopsis thaliana; identical to SEQ ID NO: 29384
  peptide (1)..(338): Ceres Seq. ID no. 13614808
  misc_feature (39)..(327): Pfam Name: Pectinesterase Pfam Description: Pectinesterase
  misc_feature (1)..(338): Homolog of NCBI NO: 15228955 NR Description: pectinesterase family [Arabidopsis thaliana]
  misc_feature (1)..(333): Homolog of NCBI NO: 39653369 NR Description: putative pectinesterase [Oryza sativa (indica
  misc_feature (47)..(330): Homolog of NCBI NO: 15241163 NR Description: pectinesterase family [Arabidopsis thaliana] putative pectin methylesterase [Arabidopsis thaliana]
  misc_feature (39)..(330): Homolog of NCBI NO: 34909402 NR Description: putative pectin methylesterase [Oryza sativa
  misc_feature (30)..(330): Homolog of NCBI NO: 15228023 NR Description: pectinesterase family [Arabidopsis thaliana]
  misc_feature (30)..(330): Homolog of NCBI NO: 27754550 NR Description: putative pectinesterase family protein
  misc_feature (1)..(330): Homolog of NCBI NO: 15226598 NR Description: pectinesterase family [Arabidopsis thaliana]
  misc_feature (35)..(330): Homolog of NCBI NO: 15240544 NR Description: pectinesterase family [Arabidopsis thaliana] contains similarity to pectin methylesterase~gene_id:MDF20.3
  misc_feature (25)..(330): Homolog of NCBI NO: 15239623 NR Description: pectinesterase family [Arabidopsis thaliana]
  misc_feature (37)..(330): Homolog of NCBI NO: 15238111 NR Description: pectinesterase family [Arabidopsis thaliana] AT5g47500/MNJ7_9 [Arabidopsis thaliana]

SEQ ID NO: 104339 - protein, 329 aa, Arabidopsis thaliana; identical to SEQ ID NO: 29385
  peptide (1)..(329): Ceres Seq. ID no. 13614809
  misc_feature (30)..(318): Pfam Name: Pectinesterase Pfam Description: Pectinesterase
  misc_feature (1)..(329): Homolog of NCBI NO: 15228955 NR Description: pectinesterase family [Arabidopsis thaliana]
  misc_feature (1)..(324): Homolog of NCBI NO: 39653369 NR Description: putative pectinesterase [Oryza sativa (indica
  misc_feature (38)..(321): Homolog of NCBI NO: 15241163 NR Description: pectinesterase family [Arabidopsis thaliana] putative pectin methylesterase [Arabidopsis thaliana]
  misc_feature (30)..(321): Homolog of NCBI NO: 34909402 NR Description: putative pectin methylesterase [Oryza sativa
  misc_feature (21)..(321): Homolog of NCBI NO: 15228023 NR Description: pectinesterase family [Arabidopsis thaliana]
  misc_feature (21)..(321): Homolog of NCBI NO: 27754550 NR Description: putative pectinesterase family protein
  misc_feature (1)..(321): Homolog of NCBI NO: 15226598 NR Description: pectinesterase family [Arabidopsis thaliana]
  misc_feature (26)..(321): Homolog of NCBI NO: 15240544 NR Description: pectinesterase family [Arabidopsis thaliana] contains similarity to pectin methylesterase~gene_id:MDF20.3
  misc_feature (16)..(321): Homolog of NCBI NO: 15239623 NR Description: pectinesterase family [Arabidopsis thaliana]
  misc_feature (28)..(321): Homolog of NCBI NO: 15238111 NR Description: pectinesterase family [Arabidopsis thaliana] AT5g47500/MNJ7_9 [Arabidopsis thaliana]

SEQ ID NO: 104340 - DNA, 1141 bp, Arabidopsis thaliana
  misc_feature (1)..(1141): Ceres Seq. ID no. 13614810
  misc_feature: MA Experiment ID: 108435 Result: Down-regulated in Transcription
  misc_feature: MA Experiment 108435 PARAMETER Experiment Name: At_stm_Mutants_cDNA_P Parameter: Plant Line Value: wt Landsburg vs stm
  misc_feature: MA Experiment 108435 PARAMETER Experiment Name: At_stm_Mutants_cDNA_P Parameter: Tissue Value: Shoot Apical Meristem Region
  misc_feature: MA Experiment ID: 108462 Result: Up-regulated in Transcription
  misc_feature: MA Experiment 108462 PARAMETER Experiment Name: At_Germinating_Seeds_cDNA_P Parameter: Age (day) Value: 2 vs. 0
  misc_feature: MA Experiment 108462 PARAMETER Experiment Name: At_Germinating_Seeds_cDNA_P Parameter: Tissue Value: Germinating Seeds
  misc_feature: MA Experiment ID: 108463 Result: Up-regulated in Transcription
  misc_feature: MA Experiment 108463 PARAMETER Experiment Name: At_Germinating_Seeds_cDNA_P Parameter: Age (day) Value: 3 vs. 0
  misc_feature: MA Experiment 108463 PARAMETER Experiment Name: At_Germinating_Seeds_cDNA_P Parameter: Tissue Value: Germinating Seeds
  misc_feature: MA Experiment ID: 108464 Result: Up-regulated in Transcription
  misc_feature: MA Experiment 108464 PARAMETER Experiment Name: At_Germinating_Seeds_cDNA_P Parameter: Age (day) Value: 4 vs. 0
  misc_feature: MA Experiment 108464 PARAMETER Experiment Name: At_Germinating_Seeds_cDNA_P Parameter: Tissue Value: Germinating Seeds
  misc_feature: MA Experiment ID: 108501 Result: Up-regulated in Transcription
  misc_feature: MA Experiment 108501 PARAMETER Experiment Name: At_ap2_floral_buds_cDNA_P Parameter: Plant Line Value: ap2 (Ler.)
  misc_feature: MA Experiment 108501 PARAMETER Experiment Name: At_ap2_floral_buds_cDNA_P Parameter: Tissue Value: Closed Flower
  misc_feature: MA Experiment ID: 108577 Result: Down-regulated in Transcription
  misc_feature: MA Experiment 108577 PARAMETER Experiment Name: At_42deg_Heat_cDNA_P Parameter: Temperature (deg C) Value: 42 vs. 22
  misc_feature: MA Experiment 108577 PARAMETER Experiment Name: At_42deg_Heat_cDNA_P Parameter: Timepoint (hr) Value: 6
  misc_feature: MA Experiment 108577 PARAMETER Experiment Name: At_42deg_Heat_cDNA_P Parameter: Tissue Value: Aerial
  misc_feature: MA Experiment ID: 20000089 Result: Down-regulated in Transcription
  misc_feature: MA Experiment ID: 20000111 Result: Down-regulated in Transcription
  misc_feature: MA Experiment 20000111 PARAMETER Experiment Name: At_42deg_Heat_cDNA_P Parameter: Temperature (deg C) Value: 42 vs. 22
  misc_feature: MA Experiment 20000111 PARAMETER Experiment Name: At_42deg_Heat_cDNA_P Parameter: Timepoint (hr) Value: 6
  misc_feature: MA Experiment 20000111 PARAMETER Experiment Name: At_42deg_Heat_cDNA_P Parameter: Tissue Value: Aerial
  misc_feature: MA Experiment ID: 20000112 Result: Down-regulated in Transcription
  misc_feature: MA Experiment 20000112 PARAMETER Experiment Name: At_42deg_Heat_cDNA_P Parameter: Temperature (deg C) Value: 42 vs. 22
  misc_feature: MA Experiment 20000112 PARAMETER Experiment Name: At_42deg_Heat_cDNA_P Parameter: Timepoint (hr) Value: 2
  misc_feature: MA Experiment 20000112 PARAMETER Experiment Name: At_42deg_Heat_cDNA_P Parameter: Tissue Value: Aerial
  misc_feature: MA Experiment ID: 20000113 Result: Down-regulated in Transcription
  misc_feature: MA Experiment 20000113 PARAMETER Experiment Name: At_42deg_Heat_cDNA_P Parameter: Temperature (deg C) Value: 42 vs. 22
  misc_feature: MA Experiment 20000113 PARAMETER Experiment Name: At_42deg_Heat_cDNA_P Parameter: Timepoint (hr) Value: 8
  misc_feature: MA Experiment 20000113 PARAMETER Experiment Name: At_42deg_Heat_cDNA_P Parameter: Tissue Value: Aerial
  misc_feature: MA Experiment ID: 20000144 Result: Down-regulated in Transcription
  misc_feature: MA Experiment 20000144 PARAMETER Experiment Name: At_42deg_Heat_cDNA_P Parameter: Temperature (deg C) Value: 42 vs. 22
  misc_feature: MA Experiment 20000144 PARAMETER Experiment Name: At_42deg_Heat_cDNA_P Parameter: Timepoint (hr) Value: 1
  misc_feature: MA Experiment 20000144 PARAMETER Experiment Name: At_42deg_Heat_cDNA_P Parameter: Tissue Value: Aerial
  misc_feature: MA Experiment ID: 20000171 Result: Down-regulated in Transcription
  misc_feature: MA Experiment 20000171 PARAMETER Experiment Name: At_42deg_Heat_P Parameter: Age (day) Value: 14
  misc_feature: MA Experiment 20000171 PARAMETER Experiment Name: At_42deg_Heat_P Parameter: Organism Value: A. thaliana
  misc_feature: MA Experiment 20000171 PARAMETER Experiment Name: At_42deg_Heat_P Parameter: Plant Line Value: WS
  misc_feature: MA Experiment 20000171 PARAMETER Experiment Name: At_42deg_Heat_P Parameter: Temperature (deg C) Value: 42 vs. 22
  misc_feature: MA Experiment 20000171 PARAMETER Experiment Name: At_42deg_Heat_P Parameter: Timepoint (hr) Value: 1
  misc_feature: MA Experiment 20000171 PARAMETER Experiment Name: At_42deg_Heat_P Parameter: Tissue Value: Aerial
  misc_feature: MA Experiment ID: 20000173 Result: Down-regulated in Transcription
  misc_feature: MA Experiment 20000173 PARAMETER Experiment Name: At_42deg_Heat_P Parameter: Age (day) Value: 14
  misc_feature: MA Experiment 20000173 PARAMETER Experiment Name: At_42deg_Heat_P Parameter: Organism Value: A. thaliana
  misc_feature: MA Experiment 20000173 PARAMETER Experiment Name: At_42deg_Heat_P Parameter: Plant Line Value: WS
  misc_feature: MA Experiment 20000173 PARAMETER Experiment Name: At_42deg_Heat_P Parameter: Temperature (deg C) Value: 42 vs. 22
  misc_feature: MA Experiment 20000173 PARAMETER Experiment Name: At_42deg_Heat_P Parameter: Timepoint (hr) Value: 6
  misc_feature: MA Experiment 20000173 PARAMETER Experiment Name: At_42deg_Heat_P Parameter: Tissue Value: Aerial
  misc_feature: MA Experiment ID: 20000184 Result: Up-regulated in Transcription
  misc_feature: MA Experiment 20000184 PARAMETER Experiment Name: At_Shoots__P Parameter: Age (day) Value: 7
  misc_feature: MA Experiment 20000184 PARAMETER Experiment Name: At_Shoots__P Parameter: Tissue Value: Shoots vs. Whole Plant
  misc_feature: MA Experiment ID: 20000438 Result: Up-regulated in Transcription
  misc_feature: MA Experiment 20000438 PARAMETER Experiment Name: At_Shoots__P Parameter: Age (day) Value: 14
  misc_feature: MA Experiment 20000438 PARAMETER Experiment Name: At_Shoots__P Parameter: Tissue Value: Shoots vs. Whole Plant
  misc_feature: MA Experiment ID: 20000439 Result: Down-regulated in Transcription
  misc_feature: MA Experiment 20000439 PARAMETER Experiment Name: At_Roots__P Parameter: Age (day) Value: 14 vs. 21
  misc_feature: MA Experiment 20000439 PARAMETER Experiment Name: At_Roots__P Parameter: Organism Value: A. thaliana
  misc_feature: MA Experiment 20000439 PARAMETER Experiment Name: At_Roots__P Parameter: Tissue Value: Roots vs. Whole Plant
  misc_feature: MA Experiment ID: 20000455 Result: Up-regulated in Transcription
  misc_feature: MA Experiment 20000455 PARAMETER Experiment Name: At_100uM_ABA_P Parameter: Age (day) Value: 16
  misc_feature: MA Experiment 20000455 PARAMETER Experiment Name: At_100uM_ABA_P Parameter: Organism Value: A. thaliana
  misc_feature: MA Experiment 20000455 PARAMETER Experiment Name: At_100uM_ABA_P Parameter: Plant Line Value: WS
  misc_feature: MA Experiment 20000455 PARAMETER Experiment Name: At_100uM_ABA_P Parameter: Timepoint (hr) Value: 48
  misc_feature: MA Experiment 20000455 PARAMETER Experiment Name: At_100uM_ABA_P Parameter: Tissue Value: Aerial
  misc_feature: MA Experiment 20000455 PARAMETER Experiment Name: At_100uM_ABA_P Parameter: Treatment Value: 100uM ABA vs. No Treatment
  misc_feature: MA Experiment ID: 20000496 Result: Up-regulated in Transcription
  misc_feature: MA Experiment 20000496 PARAMETER Experiment Name: At_Guard_Cells_P Parameter: Harvest Date Value: 7/19/2002
  misc_feature: MA Experiment 20000496 PARAMETER Experiment Name: At_Guard_Cells_P Parameter: Organism Value: Canola
  misc_feature: MA Experiment 20000496 PARAMETER Experiment Name: At_Guard_Cells_P Parameter: Tissue Value: Guard Cells vs. Leaves
  misc_feature: MA Experiment ID: 20001554 Result: Up-regulated in Transcription
  misc_feature: MA Experiment 20001554 PARAMETER Experiment Name: At_Drought_Soil_Dry_P Parameter: Age (day) Value: 21
  misc_feature: MA Experiment 20001554 PARAMETER Experiment Name: At_Drought_Soil_Dry_P Parameter: Organism Value: A. thaliana
  misc_feature: MA Experiment 20001554 PARAMETER Experiment Name: At_Drought_Soil_Dry_P Parameter: Plant Line Value: WS
  misc_feature: MA Experiment 20001554 PARAMETER Experiment Name: At_Drought_Soil_Dry_P Parameter: Post Timepoint (hr) Value: None
  misc_feature: MA Experiment 20001554 PARAMETER Experiment Name: At_Drought_Soil_Dry_P Parameter: Post-Treatment Value: None
  misc_feature: MA Experiment 20001554 PARAMETER Experiment Name: At_Drought_Soil_Dry_P Parameter: Timepoint (day) Value: 7
  misc_feature: MA Experiment 20001554 PARAMETER Experiment Name: At_Drought_Soil_Dry_P Parameter: Treatment Value: Drought vs. No Drought
  misc_feature: MA Experiment ID: 20001905 Result: Down-regulated in Transcription
  misc_feature: MA Experiment 20001905 PARAMETER Experiment Name: At_Drought_Reproduction_P Parameter: Age (day) Value: 40
  misc_feature: MA Experiment 20001905 PARAMETER Experiment Name: At_Drought_Reproduction_P Parameter: Organism Value: A. thaliana
  misc_feature: MA Experiment 20001905 PARAMETER Experiment Name: At_Drought_Reproduction_P Parameter: Plant Line Value: WS
  misc_feature: MA Experiment 20001905 PARAMETER Experiment Name: At_Drought_Reproduction_P Parameter: Timepoint (day) Value: 10
  misc_feature: MA Experiment 20001905 PARAMETER Experiment Name: At_Drought_Reproduction_P Parameter: Tissue Value: Rosettes
  misc_feature: MA Experiment 20001905 PARAMETER Experiment Name: At_Drought_Reproduction_P Parameter: Treatment Value: Drought vs. No Drought
aagtcatcttctctctctttttttagtgtgtgcaaagtcatcttctcttttaatatttacctaaaattccaaacaaaagagaaagttatgaaaccaaagagcaaagttgcagaatctacagctgcatcatgttttctcgtcatgagcttgttatgcagctgcattattggtgaccaaatggagactaataatgaaggcttgtcttacagttactacgagaaaacttgtcccaaagtcgaagagatagtgagatcttcactttcatcaatgtttatacttgatcctacttctcctgcagccttgctaaggcttatgtttcatgactgccaagttcagggatgtgacgcatcaatcctactcgagccaattagagaccaacagttcaccgagcttgattcagccaagaacttcggaatcagaaagagggacctggttggctctatcaaaacctcactagagcttgagtgtcccaagcaagtctcatgctctgacgtcatcatcctcgccgccagagacgccgtggctctcacgggaggcccactcatctccgtgccattaggacgaaaagactccctctccactccaagcaaacacgtggcagactctgagcttcctccctccactgctgacgttgacactaccttaagcctattcgctaacaaaggcatgaccatcgaagagtccgtggccatcatgggtgcacatacgataggagtcacacattgcaacaacgtattatcgcgtttcgataacgcaaacgcgacaagcgagaacatggatccacgttttcaaacgttcttgcgtgttgcttgtccagagttttctccaacttctcaagctgcggaagccacatttgtccccaacgatcaaacttcggtgatcttcgatacagcttattacgatgatgccatcgcgggacgtggcaatcttaggattgactcggagattggagctgatccacgtacacgtccatttgtggaagcgtttgcagctgatcaagaccgtttcttcaacgccttctcttccgcgtttgtaaaattgtcgtcttacaaagtgttaaccgggaatgaaggagtaattagaagcgtgtgtgacaaggttgattgatgtatatttataattatcaaatgttaaaaatatt

SEQ ID NO: 104341 - protein, 368 aa, Arabidopsis thaliana
  peptide (1)..(368): Ceres Seq. ID no. 13614811
  misc_feature (30)..(368): Homolog of NCBI NO: 18401360 NR Description: peroxidase, putative [Arabidopsis thaliana] Peroxidase 29 precursor (Atperox P29) (ATP40)
  misc_feature (48)..(368): Homolog of NCBI NO: 7670031 NR Description: peroxidase-like protein [Arabidopsis thaliana]
  misc_feature (35)..(368): Homolog of NCBI NO: 23821326 NR Description: peroxidase 1 [Marchantia polymorpha]
  misc_feature (46)..(368): Homolog of NCBI NO: 15242580 NR Description: peroxidase, putative [Arabidopsis thaliana] Peroxidase 63 precursor (Atperox P63) (ATP26a) peroxidase ATP26a homolog [Arabidopsis thaliana]
KSSSLSFFSVCKVIFSFNIYLKFQTKEKVMKPKSKVAESTAASCFLVMSLLCSCIIGDQMETNNEGLSYSYYEKTCPKVEEIVRSSLSSMFILDPTSPAALLRLMFHDCQVQGCDASILLEPIRDQQFTELDSAKNFGIRKRDLVGSIKTSLELECPKQVSCSDVIILAARDAVALTGGPLISVPLGRKDSLSTPSKHVADSELPPSTADVDTTLSLFANKGMTIEESVAIMGAHTIGVTHCNNVLSRFDNANATSENMDPRFQTFLRVACPEFSPTSQAAEATFVPNDQTSVIFDTAYYDDAIAGRGNLRIDSEIGADPRTRPFVEAFAADQDRFFNAFSSAFVKLSSYKVLTGNEGVIRSVCDKVD

SEQ ID NO: 104342 - protein, 339 aa, Arabidopsis thaliana; identical to SEQ ID NO: 43049
  peptide (1)..(339): Ceres Seq. ID no. 13614812
  misc_feature (1)..(339): Homolog of NCBI NO: 18401360 NR Description: peroxidase, putative [Arabidopsis thaliana] Peroxidase 29 precursor (Atperox P29) (ATP40)
  misc_feature (19)..(339): Homolog of NCBI NO: 7670031 NR Description: peroxidase-like protein [Arabidopsis thaliana]
  misc_feature (6)..(339): Homolog of NCBI NO: 23821326 NR Description: peroxidase 1 [Marchantia polymorpha]
  misc_feature (17)..(339): Homolog of NCBI NO: 15242580 NR Description: peroxidase, putative [Arabidopsis thaliana] Peroxidase 63 precursor (Atperox P63) (ATP26a) peroxidase ATP26a homolog [Arabidopsis thaliana]

SEQ ID NO: 104343 - protein, 321 aa, Arabidopsis thaliana; identical to SEQ ID NO: 43050
  peptide (1)..(321): Ceres Seq. ID no. 13614813
  misc_feature (1)..(321): Homolog of NCBI NO: 18401360 NR Description: peroxidase, putative [Arabidopsis thaliana] Peroxidase 29 precursor (Atperox P29) (ATP40)
  misc_feature (1)..(321): Homolog of NCBI NO: 7670031 NR Description: peroxidase-like protein [Arabidopsis thaliana]
  misc_feature (1)..(321): Homolog of NCBI NO: 23821326 NR Description: peroxidase 1 [Marchantia polymorpha]
  misc_feature (1)..(321): Homolog of NCBI NO: 15242580 NR Description: peroxidase, putative [Arabidopsis thaliana] Peroxidase 63 precursor (Atperox P63) (ATP26a) peroxidase ATP26a homolog [Arabidopsis thaliana]

SEQ ID NO: 104344 - DNA, 1422 bp, Arabidopsis thaliana
  misc_feature (1)..(1422): Ceres Seq. ID no. 13614818
  misc_feature: MA Experiment ID: 108573 Result: Up-regulated in Transcription
  misc_feature: MA Experiment 108573 PARAMETER Experiment Name: At_Drought_cDNA_P Parameter: Timepoint (hr) Value: 6
  misc_feature: MA Experiment 108573 PARAMETER Experiment Name: At_Drought_cDNA_P Parameter: Tissue Value: Aerial
  misc_feature: MA Experiment 108573 PARAMETER Experiment Name: At_Drought_cDNA_P Parameter: Treatment Value: Drought vs. No Drought
  misc_feature: MA Experiment ID: 108579 Result: Down-regulated in Transcription
  misc_feature: MA Experiment 108579 PARAMETER Experiment Name: At_4deg_Cold_cDNA_P Parameter: Temperature (deg C) Value: 4 vs. 22
  misc_feature: MA Experiment 108579 PARAMETER Experiment Name: At_4deg_Cold_cDNA_P Parameter: Timepoint (hr) Value: 6
  misc_feature: MA Experiment 108579 PARAMETER Experiment Name: At_4deg_Cold_cDNA_P Parameter: Tissue Value: Aerial
  misc_feature: MA Experiment ID: 108595 Result: Down-regulated in Transcription
  misc_feature: MA Experiment 108595 PARAMETER Experiment Name: At_Ler-pi_Ovule_cDNA_P Parameter: Plant Line Value: null
  misc_feature: MA Experiment ID: 20000445 Result: Up-regulated in Transcription
  misc_feature: MA Experiment 20000445 PARAMETER Experiment Name: At_100uM_NAA__P Parameter: Age (day) Value: 14
  misc_feature: MA Experiment 20000445 PARAMETER Experiment Name: At_100uM_NAA__P Parameter: Organism Value: A. thaliana
  misc_feature: MA Experiment 20000445 PARAMETER Experiment Name: At_100uM_NAA__P Parameter: Plant Line Value: WS
  misc_feature: MA Experiment 20000445 PARAMETER Experiment Name: At_100uM_NAA__P Parameter: Timepoint (hr) Value: 6
  misc_feature: MA Experiment 20000445 PARAMETER Experiment Name: At_100uM_NAA__P Parameter: Tissue Value: Aerial
  misc_feature: MA Experiment 20000445 PARAMETER Experiment Name: At_100uM_NAA__P Parameter: Treatment Value: 100uM NAA vs. No Treatment
  misc_feature: MA Experiment ID: 20001247 Result: Up-regulated in Transcription
  misc_feature: MA Experiment 20001247 PARAMETER Experiment Name: At_Far-red-induction_P Parameter: Age (day) Value: 7
  misc_feature: MA Experiment 20001247 PARAMETER Experiment Name: At_Far-red-induction_P Parameter: Light Value: Far-red vs. White
  misc_feature: MA Experiment 20001247 PARAMETER Experiment Name: At_Far-red-induction_P Parameter: Organism Value: A. thaliana
  misc_feature: MA Experiment 20001247 PARAMETER Experiment Name: At_Far-red-induction_P Parameter: Plant Line Value: Columbia
  misc_feature: MA Experiment 20001247 PARAMETER Experiment Name: At_Far-red-induction_P Parameter: Timepoint (hr) Value: 1
  misc_feature: MA Experiment 20001247 PARAMETER Experiment Name: At_Far-red-induction_P Parameter: Tissue Value: Whole Plant
  misc_feature: MA Experiment ID: 20001248 Result: Up-regulated in Transcription
  misc_feature: MA Experiment 20001248 PARAMETER Experiment Name: At_Far-red-induction_P Parameter: Age (day) Value: 7
  misc_feature: MA Experiment 20001248 PARAMETER Experiment Name: At_Far-red-induction_P Parameter: Light Value: Far-red vs. White
  misc_feature: MA Experiment 20001248 PARAMETER Experiment Name: At_Far-red-induction_P Parameter: Organism Value: A. thaliana
  misc_feature: MA Experiment 20001248 PARAMETER Experiment Name: At_Far-red-induction_P Parameter: Plant Line Value: Columbia
  misc_feature: MA Experiment 20001248 PARAMETER Experiment Name: At_Far-red-induction_P Parameter: Timepoint (hr) Value: 4
  misc_feature: MA Experiment 20001248 PARAMETER Experiment Name: At_Far-red-induction_P Parameter: Tissue Value: Whole Plant
  misc_feature: MA Experiment ID: 20001450 Result: Up-regulated in Transcription
  misc_feature: MA Experiment 20001450 PARAMETER Experiment Name: At_Far-red-induction_P Parameter: Age (day) Value: 7
  misc_feature: MA Experiment 20001450 PARAMETER Experiment Name: At_Far-red-induction_P Parameter: Light Value: Far-red vs. White
  misc_feature: MA Experiment 20001450 PARAMETER Experiment Name: At_Far-red-induction_P Parameter: Organism Value: A. thaliana
  misc_feature: MA Experiment 20001450 PARAMETER Experiment Name: At_Far-red-induction_P Parameter: Plant Line Value: Columbia
  misc_feature: MA Experiment 20001450 PARAMETER Experiment Name: At_Far-red-induction_P Parameter: Timepoint (hr) Value: 8
  misc_feature: MA Experiment 20001450 PARAMETER Experiment Name: At_Far-red-induction_P Parameter: Tissue Value: Whole Plant
atcatcccttccattaagacctagggttttctctctctcccatcattctcttctcccgatctcatttccattacccaatcccgctccttttctctgattttgaatcgaacccttaatacccagaaatctcacggttccgaggagtgggtttttgggggttagggttttcgagagatgttgaatgtcaggttcattgatgaatctgttttctctctgcttcaagccattcgggcacgtctgtgataattccgaagctggatcgggtggtggtggtggcgtttctggtggaaccggcggtgaaggcaaagacggattgctttggttccgtgatctcggtaaatattgcggcggagatttctccatggctgtgattcaagccaatcaggttcttgaagatcagagccaggtcgaatccggtaattttgggacttttgttggtgtttacgatggtcatggtggtcctgaagctgctcgttatgtctgtgatcatctctttaaccattttcgagaaatatcagcggaaacacaaggagttgtgacgagagagacgatagaaagagcctttcatgcgacagaagaaggattcgcttccattgtgtcagagctgtggcaagaaataccaaatttggcaactgttggcacttgttgtttggttggagtgatatatcaaaatactctttttgtggcaagtcttggagattcacgggttgttcttggaaagaaaggcaactgtggcggactctctgctattcagctgtcgactgaacacaatgctaacaatgaagatattcgttgggaactcaaggacttacatcctgatgacccgcagatcgttgtgttcaggcatggagtttggagagttaagggcatcattcaggtatcgaggtctataggagacatgtacatgaaacggcccgaatttaacaaggagccaatcagtcaaaagttcagaattgcagagccaatgaaaagacccttgatgtctgcaacaccaacaatactctctcatcctctgcaccctaatgattcgtttctcatttttgcatctgatggtctttgggagcatttgactaacgaaaaagcagttgagattgttcataaccatccccgtgctggaagcgcaaagagactgataaaggcggctcttcacgaggcagcgaggaaacgtgagatgagatattcagatctaaggaagattgacaagaaagtgagacgacattttcatgatgacatcacggttatagtggtgttcttgaaccatgacctcatatcgagaggccacatcaactcaacccaagacacaacagtctctatacggagtgctcttgaacactgagaatcccaaacattttacaacaatgtttcttcttacttgattatatgacttttgcctagaatgaataaaaaaaaggcaacatatgg

SEQ ID NO: 104345 - protein, 384 aa, Arabidopsis thaliana
  peptide (1)..(384): Ceres Seq. ID no. 13614819
  misc_feature (49)..(330): Pfam Name: Protein phosphatase 2C Pfam Description: Protein phosphatase 2C
  misc_feature (1)..(384): Homolog of NCBI NO: 18401370 NR Description: protein phosphatase-2c -related [Arabidopsis
  misc_feature (6)..(384): Homolog of NCBI NO: 7670033 NR Description: protein phosphatase 2C-like protein [Arabidopsis
  misc_feature (1)..(384): Homolog of NCBI NO: 21537406 NR Description: protein phosphatase-2c, putative [Arabidopsis
  misc_feature (1)..(384): Homolog of NCBI NO: 31249768 NR Description: putative protein phosphatase 2C [Oryza sativa
  misc_feature (1)..(381): Homolog of NCBI NO: 22329238 NR Description: protein phosphatase-2c -related [Arabidopsis
  misc_feature (1)..(384): Homolog of NCBI NO: 11282004 NR Description: protein phosphatase 2C homolog [imported] - ice plant >gi|4206122|gb|AAD11430.1| protein phosphatase 2C
  misc_feature (34)..(381): Homolog of NCBI NO: 7485891 NR Description: hypothetical protein F20M13.80 - Arabidopsis
  misc_feature (4)..(379): Homolog of NCBI NO: 18855039 NR Description: putative protein phosphatase [Oryza sativa]
  misc_feature (1)..(381): Homolog of NCBI NO: 17064756 NR Description: putative protein phosphatase-2c [Arabidopsis
  misc_feature (33)..(379): Homolog of NCBI NO: 7768153 NR Description: protein phosphatase 2C (PP2C) [Fagus sylvatica]
MSGSLMNLFSLCFKPFGHVCDNSEAGSGGGGGVSGGTGGEGKDGLLWFRDLGKYCGGDFSMAVIQANQVLEDQSQVESGNFGTFVGVYDGHGGPEAARYVCDHLFNHFREISAETQGVVTRETIERAFHATEEGFASIVSELWQEIPNLATVGTCCLVGVIYQNTLFVASLGDSRVVLGKKGNCGGLSAIQLSTEHNANNEDIRWELKDLHPDDPQIVVFRHGVWRVKGIIQVSRSIGDMYMKRPEFNKEPISQKFRIAEPMKRPLMSATPTILSHPLHPNDSFLIFASDGLWEHLTNEKAVEIVHNHPRAGSAKRLIKAALHEAARKREMRYSDLRKIDKKVRRHFHDDITVIVVFLNHDLISRGHINSTQDTTVSIRSALEH

SEQ ID NO: 104346 - protein, 379 aa, Arabidopsis thaliana
  peptide (1)..(379): Ceres Seq. ID no. 13614820
  misc_feature (44)..(325): Pfam Name: Protein phosphatase 2C Pfam Description: Protein phosphatase 2C
  misc_feature (1)..(379): Homolog of NCBI NO: 18401370 NR Description: protein phosphatase-2c -related [Arabidopsis
  misc_feature (1)..(379): Homolog of NCBI NO: 7670033 NR Description: protein phosphatase 2C-like protein [Arabidopsis
  misc_feature (1)..(379): Homolog of NCBI NO: 21537406 NR Description: protein phosphatase-2c, putative [Arabidopsis
  misc_feature (1)..(379): Homolog of NCBI NO: 31249768 NR Description: putative protein phosphatase 2C [Oryza sativa
  misc_feature (1)..(376): Homolog of NCBI NO: 22329238 NR Description: protein phosphatase-2c -related [Arabidopsis
  misc_feature (1)..(379): Homolog of NCBI NO: 11282004 NR Description: protein phosphatase 2C homolog [imported] - ice plant >gi|4206122|gb|AAD11430.1| protein phosphatase 2C
  misc_feature (29)..(376): Homolog of NCBI NO: 7485891 NR Description: hypothetical protein F20M13.80 - Arabidopsis
  misc_feature (1)..(374): Homolog of NCBI NO: 18855039 NR Description: putative protein phosphatase [Oryza sativa]
  misc_feature (1)..(376): Homolog of NCBI NO: 17064756 NR Description: putative protein phosphatase-2c [Arabidopsis
  misc_feature (28)..(374): Homolog of NCBI NO: 7768153 NR Description: protein phosphatase 2C (PP2C) [Fagus sylvatica]
MNLFSLCFKPFGHVCDNSEAGSGGGGGVSGGTGGEGKDGLLWFRDLGKYCGGDFSMAVIQANQVLEDQSQVESGNFGTFVGVYDGHGGPEAARYVCDHLFNHFREISAETQGVVTRETIERAFHATEEGFASIVSELWQEIPNLATVGTCCLVGVIYQNTLFVASLGDSRVVLGKKGNCGGLSAIQLSTEHNANNEDIRWELKDLHPDDPQIVVFRHGVWRVKGIIQVSRSIGDMYMKRPEFNKEPISQKFRIAEPMKRPLMSATPTILSHPLHPNDSFLIFASDGLWEHLTNEKAVEIVHNHPRAGSAKRLIKAALHEAARKREMRYSDLRKIDKKVRRHFHDDITVIVVFLNHDLISRGHINSTQDTTVSIRSALEH

SEQ ID NO: 104347 - protein, 324 aa, Arabidopsis thaliana; identical to SEQ ID NO: 29304
  peptide (1)..(324): Ceres Seq. ID no. 13614821
  misc_feature (1)..(270): Pfam Name: Protein phosphatase 2C Pfam Description: Protein phosphatase 2C
  misc_feature (1)..(324): Homolog of NCBI NO: 18401370 NR Description: protein phosphatase-2c -related [Arabidopsis
  misc_feature (1)..(324): Homolog of NCBI NO: 7670033 NR Description: protein phosphatase 2C-like protein [Arabidopsis
  misc_feature (1)..(324): Homolog of NCBI NO: 21537406 NR Description: protein phosphatase-2c, putative [Arabidopsis
  misc_feature (1)..(324): Homolog of NCBI NO: 31249768 NR Description: putative protein phosphatase 2C [Oryza sativa
  misc_feature (1)..(321): Homolog of NCBI NO: 22329238 NR Description: protein phosphatase-2c -related [Arabidopsis
  misc_feature (1)..(324): Homolog of NCBI NO: 11282004 NR Description: protein phosphatase 2C homolog [imported] - ice plant >gi|4206122|gb|AAD11430.1| protein phosphatase 2C
  misc_feature (1)..(321): Homolog of NCBI NO: 7485891 NR Description: hypothetical protein F20M13.80 - Arabidopsis
  misc_feature (1)..(319): Homolog of NCBI NO: 18855039 NR Description: putative protein phosphatase [Oryza sativa]
  misc_feature (1)..(321): Homolog of NCBI NO: 17064756 NR Description: putative protein phosphatase-2c [Arabidopsis
  misc_feature (1)..(319): Homolog of NCBI NO: 7768153 NR Description: protein phosphatase 2C (PP2C) [Fagus sylvatica]

SEQ ID NO: 104348 - DNA, 2304 bp, Arabidopsis thaliana
  misc_feature (1)..(2304): Ceres Seq. ID no. 13614833
  misc_feature: MA Experiment ID: 108489 Result: Down-regulated in Transcription
  misc_feature: MA Experiment ID: 108576 Result: Up-regulated in Transcription
  misc_feature: MA Experiment 108576 PARAMETER Experiment Name: At_42deg_Heat_cDNA_P Parameter: Temperature (deg C) Value: 42 vs. 22
  misc_feature: MA Experiment 108576 PARAMETER Experiment Name: At_42deg_Heat_cDNA_P Parameter: Timepoint (hr) Value: 1
  misc_feature: MA Experiment 108576 PARAMETER Experiment Name: At_42deg_Heat_cDNA_P Parameter: Tissue Value: Aerial
  misc_feature: MA Experiment ID: 108577 Result: Up-regulated in Transcription
  misc_feature: MA Experiment 108577 PARAMETER Experiment Name: At_42deg_Heat_cDNA_P Parameter: Temperature (deg C) Value: 42 vs. 22
  misc_feature: MA Experiment 108577 PARAMETER Experiment Name: At_42deg_Heat_cDNA_P Parameter: Timepoint (hr) Value: 6
  misc_feature: MA Experiment 108577 PARAMETER Experiment Name: At_42deg_Heat_cDNA_P Parameter: Tissue Value: Aerial
  misc_feature: MA Experiment ID: 108579 Result: Up-regulated in Transcription
  misc_feature: MA Experiment 108579 PARAMETER Experiment Name: At_4deg_Cold_cDNA_P Parameter: Temperature (deg C) Value: 4 vs. 22
  misc_feature: MA Experiment 108579 PARAMETER Experiment Name: At_4deg_Cold_cDNA_P Parameter: Timepoint (hr) Value: 6
  misc_feature: MA Experiment 108579 PARAMETER Experiment Name: At_4deg_Cold_cDNA_P Parameter: Tissue Value: Aerial
  misc_feature: MA Experiment ID: 20000069 Result: Down-regulated in Transcription
  misc_feature: MA Experiment 20000069 PARAMETER Experiment Name: At_100uM_ABA_Mutants_cDNA_P Parameter: Plant Line Value: CS23
  misc_feature: MA Experiment 20000069 PARAMETER Experiment Name: At_100uM_ABA_Mutants_cDNA_P Parameter: Timepoint (hr) Value: 6
  misc_feature: MA Experiment 20000069 PARAMETER Experiment Name: At_100uM_ABA_Mutants_cDNA_P Parameter: Tissue Value: Aerial
  misc_feature: MA Experiment 20000069 PARAMETER Experiment Name: At_100uM_ABA_Mutants_cDNA_P Parameter: Treatment Value: 100uM ABA vs. No Treatment
  misc_feature: MA Experiment ID: 20000070 Result: Down-regulated in Transcription
  misc_feature: MA Experiment 20000070 PARAMETER Experiment Name: At_100uM_ABA_Mutants_cDNA_P Parameter: Plant Line Value: CS24
  misc_feature: MA Experiment 20000070 PARAMETER Experiment Name: At_100uM_ABA_Mutants_cDNA_P Parameter: Timepoint (hr) Value: 6
  misc_feature: MA Experiment 20000070 PARAMETER Experiment Name: At_100uM_ABA_Mutants_cDNA_P Parameter: Tissue Value: Aerial
  misc_feature: MA Experiment 20000070 PARAMETER Experiment Name: At_100uM_ABA_Mutants_cDNA_P Parameter: Treatment Value: 100uM ABA vs. No Treatment
  misc_feature: MA Experiment ID: 20000071 Result: Down-regulated in Transcription
  misc_feature: MA Experiment 20000071 PARAMETER Experiment Name: At_100uM_ABA_Mutants_cDNA_P Parameter: Plant Line Value: CS8104
  misc_feature: MA Experiment 20000071 PARAMETER Experiment Name: At_100uM_ABA_Mutants_cDNA_P Parameter: Timepoint (hr) Value: 6
  misc_feature: MA Experiment 20000071 PARAMETER Experiment Name: At_100uM_ABA_Mutants_cDNA_P Parameter: Tissue Value: Aerial
  misc_feature: MA Experiment 20000071 PARAMETER Experiment Name: At_100uM_ABA_Mutants_cDNA_P Parameter: Treatment Value: 100uM ABA vs. No Treatment
  misc_feature: MA Experiment ID: 20000072 Result: Down-regulated in Transcription
  misc_feature: MA Experiment 20000072 PARAMETER Experiment Name: At_100uM_ABA_Mutants_cDNA_P Parameter: Plant Line Value: CS8105
  misc_feature: MA Experiment 20000072 PARAMETER Experiment Name: At_100uM_ABA_Mutants_cDNA_P Parameter: Timepoint (hr) Value: 6
  misc_feature: MA Experiment 20000072 PARAMETER Experiment Name: At_100uM_ABA_Mutants_cDNA_P Parameter: Tissue Value: Aerial
  misc_feature: MA Experiment 20000072 PARAMETER Experiment Name: At_100uM_ABA_Mutants_cDNA_P Parameter: Treatment Value: 100uM ABA vs. No Treatment
  misc_feature: MA Experiment ID: 20000087 Result: Down-regulated in Transcription
  misc_feature: MA Experiment 20000087 PARAMETER Experiment Name: At_100uM_ABA_Mutants_cDNA_P Parameter: Plant Line Value: WS
  misc_feature: MA Experiment 20000087 PARAMETER Experiment Name: At_100uM_ABA_Mutants_cDNA_P Parameter: Timepoint (hr) Value: 6
  misc_feature: MA Experiment 20000087 PARAMETER Experiment Name: At_100uM_ABA_Mutants_cDNA_P Parameter: Tissue Value: Aerial
  misc_feature: MA Experiment 20000087 PARAMETER Experiment Name: At_100uM_ABA_Mutants_cDNA_P Parameter: Treatment Value: 100uM ABA vs. No Treatment
  misc_feature: MA Experiment ID: 20000088 Result: Down-regulated in Transcription
  misc_feature: MA Experiment 20000088 PARAMETER Experiment Name: At_100uM_ABA_Mutants_cDNA_P Parameter: Plant Line Value: Landsberg
  misc_feature: MA Experiment 20000088 PARAMETER Experiment Name: At_100uM_ABA_Mutants_cDNA_P Parameter: Timepoint (hr) Value: 6
  misc_feature: MA Experiment 20000088 PARAMETER Experiment Name: At_100uM_ABA_Mutants_cDNA_P Parameter: Tissue Value: Aerial
  misc_feature: MA Experiment 20000088 PARAMETER Experiment Name: At_100uM_ABA_Mutants_cDNA_P Parameter: Treatment Value: 100uM ABA vs. No Treatment
  misc_feature: MA Experiment ID: 20000089 Result: Down-regulated in Transcription
  misc_feature: MA Experiment ID: 20000090 Result: Down-regulated in Transcription
  misc_feature: MA Experiment ID: 20000093 Result: Up-regulated in Transcription
  misc_feature: MA Experiment 20000093 PARAMETER Experiment Name: At_42deg_Heat_cDNA_P Parameter: Temperature (deg C) Value: 42 vs. 22
  misc_feature: MA Experiment 20000093 PARAMETER Experiment Name: At_42deg_Heat_cDNA_P Parameter: Timepoint (hr) Value: 0.5
  misc_feature: MA Experiment 20000093 PARAMETER Experiment Name: At_42deg_Heat_cDNA_P Parameter: Tissue Value: Aerial
  misc_feature: MA Experiment ID: 20000111 Result: Up-regulated in Transcription
  misc_feature: MA Experiment 20000111 PARAMETER Experiment Name: At_42deg_Heat_cDNA_P Parameter: Temperature (deg C) Value: 42 vs. 22
  misc_feature: MA Experiment 20000111 PARAMETER Experiment Name: At_42deg_Heat_cDNA_P Parameter: Timepoint (hr) Value: 6
  misc_feature: MA Experiment 20000111 PARAMETER Experiment Name: At_42deg_Heat_cDNA_P Parameter: Tissue Value: Aerial
  misc_feature: MA Experiment ID: 20000117 Result: Down-regulated in Transcription
  misc_feature: MA Experiment 20000117 PARAMETER Experiment Name: At_100uM_ABA_Mutants_cDNA_P Parameter: Plant Line Value: Columbia
  misc_feature: MA Experiment 20000117 PARAMETER Experiment Name: At_100uM_ABA_Mutants_cDNA_P Parameter: Timepoint (hr) Value: 6
  misc_feature: MA Experiment 20000117 PARAMETER Experiment Name: At_100uM_ABA_Mutants_cDNA_P Parameter: Tissue Value: Aerial
  misc_feature: MA Experiment 20000117 PARAMETER Experiment Name: At_100uM_ABA_Mutants_cDNA_P Parameter: Treatment Value: 100uM ABA vs. No Treatment
  misc_feature: MA Experiment ID: 20000144 Result: Up-regulated in Transcription
  misc_feature: MA Experiment 20000144 PARAMETER Experiment Name: At_42deg_Heat_cDNA_P Parameter: Temperature (deg C) Value: 42 vs. 22
  misc_feature: MA Experiment 20000144 PARAMETER Experiment Name: At_42deg_Heat_cDNA_P Parameter: Timepoint (hr) Value: 1
  misc_feature: MA Experiment 20000144 PARAMETER Experiment Name: At_42deg_Heat_cDNA_P Parameter: Tissue Value: Aerial
  misc_feature: MA Experiment ID: 20000173 Result: Up-regulated in Transcription
  misc_feature: MA Experiment 20000173 PARAMETER Experiment Name: At_42deg_Heat_P Parameter: Age (day) Value: 14
  misc_feature: MA Experiment 20000173 PARAMETER Experiment Name: At_42deg_Heat_P Parameter: Organism Value: A. thaliana
  misc_feature: MA Experiment 20000173 PARAMETER Experiment Name: At_42deg_Heat_P Parameter: Plant Line Value: WS
  misc_feature: MA Experiment 20000173 PARAMETER Experiment Name: At_42deg_Heat_P Parameter: Temperature (deg C) Value: 42 vs. 22
  misc_feature: MA Experiment 20000173 PARAMETER Experiment Name: At_42deg_Heat_P Parameter: Timepoint (hr) Value: 6
  misc_feature: MA Experiment 20000173 PARAMETER Experiment Name: At_42deg_Heat_P Parameter: Tissue Value: Aerial
  misc_feature: MA Experiment ID: 20000224 Result: Up-regulated in Transcription
  misc_feature: MA Experiment ID: 20000286 Result: Up-regulated in Transcription
  misc_feature: MA Experiment 20000286 PARAMETER Experiment Name: At_Open_Flower_P Parameter: Age (day) Value: 21
  misc_feature: MA Experiment 20000286 PARAMETER Experiment Name: At_Open_Flower_P Parameter: Plant Line Value: WS
  misc_feature: MA Experiment 20000286 PARAMETER Experiment Name: At_Open_Flower_P Parameter: Tissue Value: Half Open vs. Whole Plant
  misc_feature: MA Experiment ID: 20000438 Result: Up-regulated in Transcription
  misc_feature: MA Experiment 20000438 PARAMETER Experiment Name: At_Shoots__P Parameter: Age (day) Value: 14
  misc_feature: MA Experiment 20000438 PARAMETER Experiment Name: At_Shoots__P Parameter: Tissue Value: Shoots vs. Whole Plant
  misc_feature: MA Experiment ID: 20001248 Result: Down-regulated in Transcription
  misc_feature: MA Experiment 20001248 PARAMETER Experiment Name: At_Far-red-induction_P Parameter: Age (day) Value: 7
  misc_feature: MA Experiment 20001248 PARAMETER Experiment Name: At_Far-red-induction_P Parameter: Light Value: Far-red vs. White
  misc_feature: MA Experiment 20001248 PARAMETER Experiment Name: At_Far-red-induction_P Parameter: Organism Value: A. thaliana
  misc_feature: MA Experiment 20001248 PARAMETER Experiment Name: At_Far-red-induction_P Parameter: Plant Line Value: Columbia
  misc_feature: MA Experiment 20001248 PARAMETER Experiment Name: At_Far-red-induction_P Parameter: Timepoint (hr) Value: 4
  misc_feature: MA Experiment 20001248 PARAMETER Experiment Name: At_Far-red-induction_P Parameter: Tissue Value: Whole Plant
cttcttcgtttctctctacctcactcatcgaagtgttagggtttcttcgatttggcagaatattatttcaactatctctgctgaactcgctttcctaacttctctctctgtcactctaactctttgtcggtaccaaattcttcttcactcgaagaactgtttaggtcaagtatgacttaattctgccaaatttcnggggtttattcaaagtncaaagtcaattgaacaaaactttttatcagataaactgaagcaatgtataccgagggagcctctgattttgtcattgaccagagcatgtattatcccgcttattactcttcaggttatgattcatctgtgggtcttcagggtgggcaaaatgaaaatgctccctatatctgctatacaccaagttatggatatgcacagtctccctacaatccctacaatccttacataccaggagcttcaataggcgttgattcttcttttgttggattccaacaatattactcagaccctccgtatgaaagtgctgcgtcttcgcctacttatgttccatatgttattcagcctgatatggtctcgaatagttcaacagactctttggtagcgaatggtggtcaatctgatggaagaggatccatgcagagaaatggttcagcaattgccggactcccaaaagatgctccaaagtctaccactactggccagtataaacagccaggaatccccaagaatgtttccacaacagcttctgcacattctctccagggaaaaactgcttacgcgaacacactcttgccttatgggaaatcagacattgctaatggggtctcatcaattgcttcatatagttataaaccttgttccaagatttatgatgccagaggtgataacaacacaactggaagtacatatacgagtgaacaaaatcgaggatcgagaacgagaagatcaagaaatcaactaattgtcaaagcatatacaaccaaagctggaaatgctgatgcggaaggaaatattgtgataaatcctgatcgatataataaagaagatttcagtattgaatacagcgatgccaggttttttgtgattaagtcgtatagtgaagatgatgttcacaagagcatcaaatatggtgtctggtcatctacattgaatgggaacaagaaattgcagagtgtatatgaagatgctcagagaatagccactgagaagtctcgtgaatgtcctattttcttattcttttctgtcaattccagtggtctgttctgtggcgtggctgagatgaccggtccagtttccttcgaccgagacatggatttttggcagcaagacaaatggagtggaagctttcctgtcaagtggcacattattaaagatgttcctaatagctatttcaggcacattattttacataataacgagaataagccagtgaccaacagccgagacacacaagagataatactgaaacaaggactcgaggtgctaaaactattcaaacatcatgcggaaaagacttcactattagatgattttatgtactacgaagaccgccagagactcatgcaggaagagagagctagacttccatttaggacctttcgcaggccatttcccgtgctcaatctagatttttctgacagaagcaagaaaagctccaaggatgtcgttaagaagccttcagtgacctctgcagaaacaaaggttgtgcagttaaaaaactcagatggggatgaaaagagcaatacacaggaagcaacagacgattctactccttccactctgaagtttggctctctcgccattaaaccaactgctggtaccacctttaacccaacccaacccaagcctaaaccgaccccatctctcggctctgaccacaagtcagactcttctgaagaggttactgggtctctggctgatgacattgtcagtgtaggatcgttgcccataaaagtaaagggatctaaagaattatcctcgaagatcgcagcggtgggtacaagtcctctctcaactcaagatcagttcagaagtaaaccagggttttgacattgtctttgtctaacttgtttatgcataatagaaagcatggtcgatatggttcgagaaagagaaagagattgagtatgtatagattgggtggttttaccttttaaatggtctgattggtcgtttgagaatccttgtttatcgtctcagtttggacaaatgattgttgccagtggttgcgttttggtttgttgggtttgattaaacagttggttccgtcttttgatcgaaatttatgtgtttgtcatgctatattaatgt

SEQ ID NO: 104349 - protein, 595 aa, Arabidopsis thaliana
  peptide (1)..(595): Ceres Seq. ID no. 13614834
  misc_feature (324)..(414): Pfam Name: YT521-B-like family Pfam Description: YT521-B-like family
  misc_feature (1)..(583): Homolog of NCBI NO: 15221079 NR Description: expressed protein [Arabidopsis thaliana]
  misc_feature (1)..(399): Homolog of NCBI NO: 8778514 NR Description: F21D18.17 [Arabidopsis thaliana]
  misc_feature (398)..(583): Homolog of NCBI NO: 8778514 NR Description: F21D18.17 [Arabidopsis thaliana]
  misc_feature (3)..(440): Homolog of NCBI NO: 22773231 NR Description: Putative RNA-binding protein [Oryza sativa
  misc_feature (22)..(440): Homolog of NCBI NO: 30682679 NR Description: expressed protein [Arabidopsis thaliana] gb|AAD10646.1~gene_id:MRP15.12~strong similarity to unknown [Arabidopsis thaliana] >gi|21703124|gb|AAM74503.1|
  misc_feature (22)..(440): Homolog of NCBI NO: 30682683 NR Description: expressed protein [Arabidopsis thaliana]
  misc_feature (16)..(482): Homolog of NCBI NO: 34911170 NR Description: B1144G04.32 [Oryza sativa (japonica
  misc_feature (107)..(440): Homolog of NCBI NO: 18087662 NR Description: putative RNA-binding protein [Oryza sativa]
  misc_feature (22)..(440): Homolog of NCBI NO: 25084169 NR Description: Unknown protein [Arabidopsis thaliana]
  misc_feature (24)..(442): Homolog of NCBI NO: 7487895 NR Description: hypothetical protein YUP8H12R.13 - Arabidopsis >gi|3152559|gb|AAC17040.1| Similarity to A. thaliana gene product gb|AC000132. EST gb|Z25651 comes from this gene. [Arabidopsis
MYTEGASDFVIDQSMYYPAYYSSGYDSSVGLQGGQNENAPYICYTPSYGYAQSPYNPYNPYIPGASIGVDSSFVGFQQYYSDPPYESAASSPTYVPYVIQPDMVSNSSTDSLVANGGQSDGRGSMQRNGSAIAGLPKDAPKSTTTGQYKQPGIPKNVSTTASAHSLQGKTAYANTLLPYGKSDIANGVSSIASYSYKPCSKIYDARGDNNTTGSTYTSEQNRGSRTRRSRNQLIVKAYTTKAGNADAEGNIVINPDRYNKEDFSIEYSDARFFVIKSYSEDDVHKSIKYGVWSSTLNGNKKLQSVYEDAQRIATEKSRECPIFLFFSVNSSGLFCGVAEMTGPVSFDRDMDFWQQDKWSGSFPVKWHIIKDVPNSYFRHIILHNNENKPVTNSRDTQEIILKQGLEVLKLFKHHAEKTSLLDDFMYYEDRQRLMQEERARLPFRTFRRPFPVLNLDFSDRSKKSSKDVVKKPSVTSAETKVVQLKNSDGDEKSNTQEATDDSTPSTLKFGSLAIKPTAGTTFNPTQPKPKPTPSLGSDHKSDSSEEVTGSLADDIVSVGSLPIKVKGSKELSSKIAAVGTSPLSTQDQFRSKPGF

SEQ ID NO: 104350 - protein, 581 aa, Arabidopsis thaliana
  peptide (1)..(581): Ceres Seq. ID no. 13614835
  misc_feature (310)..(400): Pfam Name: YT521-B-like family Pfam Description: YT521-B-like family
  misc_feature (1)..(569): Homolog of NCBI NO: 15221079 NR Description: expressed protein [Arabidopsis thaliana]
  misc_feature (1)..(385): Homolog of NCBI NO: 8778514 NR Description: F21D18.17 [Arabidopsis thaliana]
  misc_feature (384)..(569): Homolog of NCBI NO: 8778514 NR Description: F21D18.17 [Arabidopsis thaliana]
  misc_feature (1)..(426): Homolog of NCBI NO: 22773231 NR Description: Putative RNA-binding protein [Oryza sativa
  misc_feature (8)..(426): Homolog of NCBI NO: 30682679 NR Description: expressed protein [Arabidopsis thaliana] gb|AAD10646.1~gene_id:MRP15.12~strong similarity to unknown [Arabidopsis thaliana] >gi|21703124|gb|AAM74503.1|
  misc_feature (8)..(426): Homolog of NCBI NO: 30682683 NR Description: expressed protein [Arabidopsis thaliana]
  misc_feature (2)..(468): Homolog of NCBI NO: 34911170 NR Description: B1144G04.32 [Oryza sativa (japonica
  misc_feature (93)..(426): Homolog of NCBI NO: 18087662 NR Description: putative RNA-binding protein [Oryza sativa]
  misc_feature (8)..(426): Homolog of NCBI NO: 25084169 NR Description: Unknown protein [Arabidopsis thaliana]
  misc_feature (10)..(428): Homolog of NCBI NO: 7487895 NR Description: hypothetical protein YUP8H12R.13 - Arabidopsis >gi|3152559|gb|AAC17040.1| Similarity to A. thaliana gene product gb|AC000132. EST gb|Z25651 comes from this gene. [Arabidopsis
MYYPAYYSSGYDSSVGLQGGQNENAPYICYTPSYGYAQSPYNPYNPYIPGASIGVDSSFVGFQQYYSDPPYESAASSPTYVPYVIQPDMVSNSSTDSLVANGGQSDGRGSMQRNGSAIAGLPKDAPKSTTTGQYKQPGIPKNVSTTASAHSLQGKTAYANTLLPYGKSDIANGVSSIASYSYKPCSKIYDARGDNNTTGSTYTSEQNRGSRTRRSRNQLIVKAYTTKAGNADAEGNIVINPDRYNKEDFSIEYSDARFFVIKSYSEDDVHKSIKYGVWSSTLNGNKKLQSVYEDAQRIATEKSRECPIFLFFSVNSSGLFCGVAEMTGPVSFDRDMDFWQQDKWSGSFPVKWHIIKDVPNSYFRHIILHNNENKPVTNSRDTQEIILKQGLEVLKLFKHHAEKTSLLDDFMYYEDRQRLMQEERARLPFRTFRRPFPVLNLDFSDRSKKSSKDVVKKPSVTSAETKVVQLKNSDGDEKSNTQEATDDSTPSTLKFGSLAIKPTAGTTFNPTQPKPKPTPSLGSDHKSDSSEEVTGSLADDIVSVGSLPIKVKGSKELSSKIAAVGTSPLSTQDQFRSKPGF

SEQ ID NO: 104351 - protein, 493 aa, Arabidopsis thaliana
  peptide (1)..(493): Ceres Seq. ID no. 13614836
  misc_feature (222)..(312): Pfam Name: YT521-B-like family Pfam Description: YT521-B-like family
  misc_feature (1)..(481): Homolog of NCBI NO: 15221079 NR Description: expressed protein [Arabidopsis thaliana]
  misc_feature (1)..(297): Homolog of NCBI NO: 8778514 NR Description: F21D18.17 [Arabidopsis thaliana]
  misc_feature (296)..(481): Homolog of NCBI NO: 8778514 NR Description: F21D18.17 [Arabidopsis thaliana]
  misc_feature (1)..(338): Homolog of NCBI NO: 22773231 NR Description: Putative RNA-binding protein [Oryza sativa
  misc_feature (1)..(338): Homolog of NCBI NO: 30682679 NR Description: expressed protein [Arabidopsis thaliana] gb|AAD10646.1~gene_id:MRP15.12~strong similarity to unknown [Arabidopsis thaliana] >gi|21703124|gb|AAM74503.1|
  misc_feature (1)..(338): Homolog of NCBI NO: 30682683 NR Description: expressed protein [Arabidopsis thaliana]
  misc_feature (1)..(380): Homolog of NCBI NO: 34911170 NR Description: B1144G04.32 [Oryza sativa (japonica
  misc_feature (5)..(338): Homolog of NCBI NO: 18087662 NR Description: putative RNA-binding protein [Oryza sativa]
  misc_feature (1)..(338): Homolog of NCBI NO: 25084169 NR Description: Unknown protein [Arabidopsis thaliana]
  misc_feature (1)..(340): Homolog of NCBI NO: 7487895 NR Description: hypothetical protein YUP8H12R.13 - Arabidopsis >gi|3152559|gb|AAC17040.1| Similarity to A. thaliana gene product gb|AC000132. EST gb|Z25651 comes from this gene. [Arabidopsis
MVSNSSTDSLVANGGQSDGRGSMQRNGSAIAGLPKDAPKSTTTGQYKQPGIPKNVSTTASAHSLQGKTAYANTLLPYGKSDIANGVSSIASYSYKPCSKIYDARGDNNTTGSTYTSEQNRGSRTRRSRNQLIVKAYTTKAGNADAEGNIVINPDRYNKEDFSIEYSDARFFVIKSYSEDDVHKSIKYGVWSSTLNGNKKLQSVYEDAQRIATEKSRECPIFLFFSVNSSGLFCGVAEMTGPVSFDRDMDFWQQDKWSGSFPVKWHIIKDVPNSYFRHIILHNNENKPVTNSRDTQEIILKQGLEVLKLFKHHAEKTSLLDDFMYYEDRQRLMQEERARLPFRTFRRPFPVLNLDFSDRSKKSSKDVVKKPSVTSAETKVVQLKNSDGDEKSNTQEATDDSTPSTLKFGSLAIKPTAGTTFNPTQPKPKPTPSLGSDHKSDSSEEVTGSLADDIVSVGSLPIKVKGSKELSSKIAAVGTSPLSTQDQFRSKPGF

SEQ ID NO: 104352 - DNA, 1232 bp, Arabidopsis thaliana
  misc_feature (1)..(1232): Ceres Seq. ID no. 13614845
  misc_feature: MA Experiment ID: 108577 Result: Up-regulated in Transcription
  misc_feature: MA Experiment 108577 PARAMETER Experiment Name: At_42deg_Heat_cDNA_P Parameter: Temperature (deg C) Value: 42 vs. 22
  misc_feature: MA Experiment 108577 PARAMETER Experiment Name: At_42deg_Heat_cDNA_P Parameter: Timepoint (hr) Value: 6
  misc_feature: MA Experiment 108577 PARAMETER Experiment Name: At_42deg_Heat_cDNA_P Parameter: Tissue Value: Aerial
  misc_feature: MA Experiment ID: 20000794 Result: Down-regulated in Transcription
  misc_feature: MA Experiment 20000794 PARAMETER Experiment Name: At_Petals_P Parameter: Age (day) Value: 23-25 days
  misc_feature: MA Experiment 20000794 PARAMETER Experiment Name: At_Petals_P Parameter: Plant Line Value: WS
  misc_feature: MA Experiment 20000794 PARAMETER Experiment Name: At_Petals_P Parameter: Tissue Value: Petals vs. Whole plant
  misc_feature: MA Experiment ID: 20001557 Result: Up-regulated in Transcription
  misc_feature: MA Experiment 20001557 PARAMETER Experiment Name: At_Drought_Soil_Dry_P Parameter: Age (day) Value: 27
  misc_feature: MA Experiment 20001557 PARAMETER Experiment Name: At_Drought_Soil_Dry_P Parameter: Organism Value: A. thaliana
  misc_feature: MA Experiment 20001557 PARAMETER Experiment Name: At_Drought_Soil_Dry_P Parameter: Plant Line Value: WS
  misc_feature: MA Experiment 20001557 PARAMETER Experiment Name: At_Drought_Soil_Dry_P Parameter: Post Timepoint (hr) Value: 3
  misc_feature: MA Experiment 20001557 PARAMETER Experiment Name: At_Drought_Soil_Dry_P Parameter: Post-Treatment Value: Re-Water vs. No Drought
  misc_feature: MA Experiment 20001557 PARAMETER Experiment Name: At_Drought_Soil_Dry_P Parameter: Timepoint (day) Value: 13
  misc_feature: MA Experiment 20001557 PARAMETER Experiment Name: At_Drought_Soil_Dry_P Parameter: Treatment Value: Drought vs. No Drought
  misc_feature: MA Experiment ID: 20001558 Result: Up-regulated in Transcription
  misc_feature: MA Experiment 20001558 PARAMETER Experiment Name: At_Drought_Soil_Dry_P Parameter: Age (day) Value: 27
  misc_feature: MA Experiment 20001558 PARAMETER Experiment Name: At_Drought_Soil_Dry_P Parameter: Organism Value: A. thaliana
  misc_feature: MA Experiment 20001558 PARAMETER Experiment Name: At_Drought_Soil_Dry_P Parameter: Plant Line Value: WS
  misc_feature: MA Experiment 20001558 PARAMETER Experiment Name: At_Drought_Soil_Dry_P Parameter: Post Timepoint (hr) Value: 6
  misc_feature: MA Experiment 20001558 PARAMETER Experiment Name: At_Drought_Soil_Dry_P Parameter: Post-Treatment Value: Re-Water vs. No Drought
  misc_feature: MA Experiment 20001558 PARAMETER Experiment Name: At_Drought_Soil_Dry_P Parameter: Timepoint (day) Value: 13
  misc_feature: MA Experiment 20001558 PARAMETER Experiment Name: At_Drought_Soil_Dry_P Parameter: Treatment Value: Drought vs. No Drought
  misc_feature: MA Experiment ID: 20001757 Result: Up-regulated in Transcription
  misc_feature: MA Experiment 20001757 PARAMETER Experiment Name: At_50mM_NH4NO3_L-to-H_P Parameter: Timepoint (hr) Value: 6
  misc_feature: MA Experiment 20001757 PARAMETER Experiment Name: At_50mM_NH4NO3_L-to-H_P Parameter: Tissue Value: Leaf
  misc_feature: MA Experiment 20001757 PARAMETER Experiment Name: At_50mM_NH4NO3_L-to-H_P Parameter: Treatment Value: 50mM NH4NO3 vs 100mM Mannitol
gagagttctggtttctgcatctctctccttcttcgtttagactttagccattgaaggtcgcttcgattcgaaatcatggcggccgtaccgagaggcctcctttctcgaatcaatcagtttctatcaatacggtctataactccttcatcctctgaatctcttcctcattgtagtagcttctttctcatccgacgattcagctccgatactgggttgatggacggtggtggatctgatattatcggggctcagacccgaatcattgaggcgaaacaaggtgagatgtctagtagatccaagaggactgggatcatcgcggttaagtgtgggatgactgcgctctgggacaaatggggaaagaggattccgatttctattctttgggttgatgataatatcgtctctcaggttaaaactgttgagaaagaaggcatttttgcgttacagatcggatgtgggcaaaagaaaccgaagcatttgtcaaaagctgtggtggggcatttcagagcacaaggtgtgccgttaaagaggaagttgagggaatttcctgtgactgaagacgctcttcttcctgttggtacttcactcggtgtccgccattttgttccgggacagtacgttgatgtcactgggatcactcgaggaaaaggttttcagggatgcatgaaaagacatggtttcagtggaatgccggcatcacatggtgcttcattgtcccatcgaagcgggggttccacagggcaaagagatgctcctggaaaggtgttcaagggcagaaagatggctgggagaatgggtgcagatcagaggacagtaaagaacgtttgggtctacaagatcgatcctgcgaggaacctcatgtgggtgagaggacaagttcctggtgcagaaggaaactttgtgttcataaaagatgcatggtgcaagaaaccagacatctcaaagcttccgtttccaacttacttagctccagaagatgaagatccatcagaattagaaccgttggttgcagatcttggagaagttgacccatttatgttggcagagtgatgaaaacagcatgatcttgatctttatttgggcttttacaatgattagagaccagaaagaagctgtggaagtgaaggaatcacagagctaaagctttttgcagatgaatttgtctttttcttattttagttgtttggatgtatgatttgaaaacgattaaatagaggaatttaggcttgctc

SEQ ID NO: 104353 - protein, 324 aa, Arabidopsis thaliana
  peptide (1)..(324): Ceres Seq. ID no. 13614846
  misc_feature (83)..(279): Pfam Name: Ribosomal protein L3 Pfam Description: Ribosomal protein L3
  misc_feature (1)..(324): Homolog of NCBI NO: 18401521 NR Description: ribosomal protein L3p family [Arabidopsis
  misc_feature (1)..(324): Homolog of NCBI NO: 34902796 NR Description: unnamed protein product [Oryza sativa (japonica group)] >gi|7106521|dbj|BAA92206.1| unnamed protein product
  misc_feature (191)..(324): Homolog of NCBI NO: 21450877 NR Description: putative ribosomal protein L3 [Arabidopsis
  misc_feature (76)..(297): Homolog of NCBI NO: 23108389 NR Description: hypothetical protein [Novosphingobium
  misc_feature (66)..(294): Homolog of NCBI NO: 16125497 NR Description: ribosomal protein L3 [Caulobacter crescentus CB15]
  misc_feature (76)..(294): Homolog of NCBI NO: 23014088 NR Description: hypothetical protein [Magnetospirillum
  misc_feature (76)..(286): Homolog of NCBI NO: 22956505 NR Description: hypothetical protein [Rhodobacter sphaeroides]
  misc_feature (76)..(281): Homolog of NCBI NO: 17987040 NR Description: LSU ribosomal protein L3P [Brucella melitensis]
  misc_feature (76)..(281): Homolog of NCBI NO: 23502110 NR Description: ribosomal protein L3 [Brucella suis 1330]
  misc_feature (76)..(305): Homolog of NCBI NO: 13470551 NR Description: 50S ribosomal protein L3 [Mesorhizobium loti]
MAAVPRGLLSRINQFLSIRSITPSSSESLPHCSSFFLIRRFSSDTGLMDGGGSDIIGAQTRIIEAKQGEMSSRSKRTGIIAVKCGMTALWDKWGKRIPISILWVDDNIVSQVKTVEKEGIFALQIGCGQKKPKHLSKAVVGHFRAQGVPLKRKLREFPVTEDALLPVGTSLGVRHFVPGQYVDVTGITRGKGFQGCMKRHGFSGMPASHGASLSHRSGGSTGQRDAPGKVFKGRKMAGRMGADQRTVKNVWVYKIDPARNLMWVRGQVPGAEGNFVFIKDAWCKKPDISKLPFPTYLAPEDEDPSELEPLVADLGEVDPFMLAE

SEQ ID NO: 104354 - protein, 277 aa, Arabidopsis thaliana; identical to SEQ ID NO: 36068
  peptide (1)..(277): Ceres Seq. ID no. 13614847
  misc_feature (36)..(232): Pfam Name: Ribosomal protein L3 Pfam Description: Ribosomal protein L3
  misc_feature (1)..(277): Homolog of NCBI NO: 18401521 NR Description: ribosomal protein L3p family [Arabidopsis
  misc_feature (1)..(277): Homolog of NCBI NO: 34902796 NR Description: unnamed protein product [Oryza sativa (japonica group)] >gi|7106521|dbj|BAA92206.1| unnamed protein product
  misc_feature (144)..(277): Homolog of NCBI NO: 21450877 NR Description: putative ribosomal protein L3 [Arabidopsis
  misc_feature (29)..(250): Homolog of NCBI NO: 23108389 NR Description: hypothetical protein [Novosphingobium
  misc_feature (19)..(247): Homolog of NCBI NO: 16125497 NR Description: ribosomal protein L3 [Caulobacter crescentus CB15]
  misc_feature (29)..(247): Homolog of NCBI NO: 23014088 NR Description: hypothetical protein [Magnetospirillum
  misc_feature (29)..(239): Homolog of NCBI NO: 22956505 NR Description: hypothetical protein [Rhodobacter sphaeroides]
  misc_feature (29)..(234): Homolog of NCBI NO: 17987040 NR Description: LSU ribosomal protein L3P [Brucella melitensis]
  misc_feature (29)..(234): Homolog of NCBI NO: 23502110 NR Description: ribosomal protein L3 [Brucella suis 1330]
  misc_feature (29)..(258): Homolog of NCBI NO: 13470551 NR Description: 50S ribosomal protein L3 [Mesorhizobium loti]

SEQ ID NO: 104355 - protein, 255 aa, Arabidopsis thaliana; identical to SEQ ID NO: 36069
  peptide (1)..(255): Ceres Seq. ID no. 13614848
  misc_feature (14)..(210): Pfam Name: Ribosomal protein L3 Pfam Description: Ribosomal protein L3
  misc_feature (1)..(255): Homolog of NCBI NO: 18401521 NR Description: ribosomal protein L3p family [Arabidopsis
  misc_feature (1)..(255): Homolog of NCBI NO: 34902796 NR Description: unnamed protein product [Oryza sativa (japonica group)] >gi|7106521|dbj|BAA92206.1| unnamed protein product
  misc_feature (122)..(255): Homolog of NCBI NO: 21450877 NR Description: putative ribosomal protein L3 [Arabidopsis
  misc_feature (7)..(228): Homolog of NCBI NO: 23108389 NR Description: hypothetical protein [Novosphingobium
  misc_feature (1)..(225): Homolog of NCBI NO: 16125497 NR Description: ribosomal protein L3 [Caulobacter crescentus CB15]
  misc_feature (7)..(225): Homolog of NCBI NO: 23014088 NR Description: hypothetical protein [Magnetospirillum
  misc_feature (7)..(217): Homolog of NCBI NO: 22956505 NR Description: hypothetical protein [Rhodobacter sphaeroides]
  misc_feature (7)..(212): Homolog of NCBI NO: 17987040 NR Description: LSU ribosomal protein L3P [Brucella melitensis]
  misc_feature (7)..(212): Homolog of NCBI NO: 23502110 NR Description: ribosomal protein L3 [Brucella suis 1330]
  misc_feature (7)..(236): Homolog of NCBI NO: 13470551 NR Description: 50S ribosomal protein L3 [Mesorhizobium loti]

SEQ ID NO: 104356 - DNA, 1376 bp, Arabidopsis thaliana
  misc_feature (1)..(1376): Ceres Seq. ID no. 13614859
  misc_feature: MA Experiment ID: 108434 Result: Down-regulated in Transcription
  misc_feature: MA Experiment 108434 PARAMETER Experiment Name: At_Root_Tips_cDNA_P Parameter: Tissue Value: Root Tips
  misc_feature: MA Experiment ID: 108462 Result: Down-regulated in Transcription
  misc_feature: MA Experiment 108462 PARAMETER Experiment Name: At_Germinating_Seeds_cDNA_P Parameter: Age (day) Value: 2 vs. 0
  misc_feature: MA Experiment 108462 PARAMETER Experiment Name: At_Germinating_Seeds_cDNA_P Parameter: Tissue Value: Germinating Seeds
  misc_feature: MA Experiment ID: 108463 Result: Down-regulated in Transcription
  misc_feature: MA Experiment 108463 PARAMETER Experiment Name: At_Germinating_Seeds_cDNA_P Parameter: Age (day) Value: 3 vs. 0
  misc_feature: MA Experiment 108463 PARAMETER Experiment Name: At_Germinating_Seeds_cDNA_P Parameter: Tissue Value: Germinating Seeds
  misc_feature: MA Experiment ID: 108464 Result: Down-regulated in Transcription
  misc_feature: MA Experiment 108464 PARAMETER Experiment Name: At_Germinating_Seeds_cDNA_P Parameter: Age (day) Value: 4 vs. 0
  misc_feature: MA Experiment 108464 PARAMETER Experiment Name: At_Germinating_Seeds_cDNA_P Parameter: Tissue Value: Germinating Seeds
  misc_feature: MA Experiment ID: 108561 Result: Up-regulated in Transcription
  misc_feature: MA Experiment 108561 PARAMETER Experiment Name: At_100uM_ABA_cDNA_P Parameter: Timepoint (hr) Value: 6
  misc_feature: MA Experiment 108561 PARAMETER Experiment Name: At_100uM_ABA_cDNA_P Parameter: Tissue Value: Aerial
  misc_feature: MA Experiment 108561 PARAMETER Experiment Name: At_100uM_ABA_cDNA_P Parameter: Treatment Value: 100uM ABA vs. No Treatment
  misc_feature: MA Experiment ID: 108569 Result: Up-regulated in Transcription
  misc_feature: MA Experiment 108569 PARAMETER Experiment Name: At_0.001%_MeJA__cDNA_P Parameter: Timepoint (hr) Value: 6
  misc_feature: MA Experiment 108569 PARAMETER Experiment Name: At_0.001%_MeJA__cDNA_P Parameter: Tissue Value: Aerial
  misc_feature: MA Experiment 108569 PARAMETER Experiment Name: At_0.001%_MeJA__cDNA_P Parameter: Treatment Value: 0.001% MeJA vs. No Treatment
  misc_feature: MA Experiment ID: 108577 Result: Up-regulated in Transcription
  misc_feature: MA Experiment 108577 PARAMETER Experiment Name: At_42deg_Heat_cDNA_P Parameter: Temperature (deg C) Value: 42 vs. 22
  misc_feature: MA Experiment 108577 PARAMETER Experiment Name: At_42deg_Heat_cDNA_P Parameter: Timepoint (hr) Value: 6
  misc_feature: MA Experiment 108577 PARAMETER Experiment Name: At_42deg_Heat_cDNA_P Parameter: Tissue Value: Aerial
  misc_feature: MA Experiment ID: 108667 Result: Down-regulated in Transcription
  misc_feature: MA Experiment 108667 PARAMETER Experiment Name: At_2mM_SA_cDNA_P Parameter: Plant Line Value: WS
  misc_feature: MA Experiment 108667 PARAMETER Experiment Name: At_2mM_SA_cDNA_P Parameter: Timepoint (hr) Value: 1
  misc_feature: MA Experiment 108667 PARAMETER Experiment Name: At_2mM_SA_cDNA_P Parameter: Treatment Value: 2mM SA vs. No Treatment
  misc_feature: MA Experiment ID: 108668 Result: Up-regulated in Transcription
  misc_feature: MA Experiment 108668 PARAMETER Experiment Name: At_2mM_SA_cDNA_P Parameter: Plant Line Value: WS
  misc_feature: MA Experiment 108668 PARAMETER Experiment Name: At_2mM_SA_cDNA_P Parameter: Timepoint (hr) Value: 6
  misc_feature: MA Experiment 108668 PARAMETER Experiment Name: At_2mM_SA_cDNA_P Parameter: Treatment Value: 2mM SA vs. No Treatment
  misc_feature: MA Experiment ID: 20000069 Result: Up-regulated in Transcription
  misc_feature: MA Experiment 20000069 PARAMETER Experiment Name: At_100uM_ABA_Mutants_cDNA_P Parameter: Plant Line Value: CS23
  misc_feature: MA Experiment 20000069 PARAMETER Experiment Name: At_100uM_ABA_Mutants_cDNA_P Parameter: Timepoint (hr) Value: 6
  misc_feature: MA Experiment 20000069 PARAMETER Experiment Name: At_100uM_ABA_Mutants_cDNA_P Parameter: Tissue Value: Aerial
  misc_feature: MA Experiment 20000069 PARAMETER Experiment Name: At_100uM_ABA_Mutants_cDNA_P Parameter: Treatment Value: 100uM ABA vs. No Treatment
  misc_feature: MA Experiment ID: 20000070 Result: Up-regulated in Transcription
  misc_feature: MA Experiment 20000070 PARAMETER Experiment Name: At_100uM_ABA_Mutants_cDNA_P Parameter: Plant Line Value: CS24
  misc_feature: MA Experiment 20000070 PARAMETER Experiment Name: At_100uM_ABA_Mutants_cDNA_P Parameter: Timepoint (hr) Value: 6
  misc_feature: MA Experiment 20000070 PARAMETER Experiment Name: At_100uM_ABA_Mutants_cDNA_P Parameter: Tissue Value: Aerial
  misc_feature: MA Experiment 20000070 PARAMETER Experiment Name: At_100uM_ABA_Mutants_cDNA_P Parameter: Treatment Value: 100uM ABA vs. No Treatment
  misc_feature: MA Experiment ID: 20000071 Result: Up-regulated in Transcription
  misc_feature: MA Experiment 20000071 PARAMETER Experiment Name: At_100uM_ABA_Mutants_cDNA_P Parameter: Plant Line Value: CS8104
  misc_feature: MA Experiment 20000071 PARAMETER Experiment Name: At_100uM_ABA_Mutants_cDNA_P Parameter: Timepoint (hr) Value: 6
  misc_feature: MA Experiment 20000071 PARAMETER Experiment Name: At_100uM_ABA_Mutants_cDNA_P Parameter: Tissue Value: Aerial
  misc_feature: MA Experiment 20000071 PARAMETER Experiment Name: At_100uM_ABA_Mutants_cDNA_P Parameter: Treatment Value: 100uM ABA vs. No Treatment
  misc_feature: MA Experiment ID: 20000072 Result: Up-regulated in Transcription
  misc_feature: MA Experiment 20000072 PARAMETER Experiment Name: At_100uM_ABA_Mutants_cDNA_P Parameter: Plant Line Value: CS8105
  misc_feature: MA Experiment 20000072 PARAMETER Experiment Name: At_100uM_ABA_Mutants_cDNA_P Parameter: Timepoint (hr) Value: 6
  misc_feature: MA Experiment 20000072 PARAMETER Experiment Name: At_100uM_ABA_Mutants_cDNA_P Parameter: Tissue Value: Aerial
  misc_feature: MA Experiment 20000072 PARAMETER Experiment Name: At_100uM_ABA_Mutants_cDNA_P Parameter: Treatment Value: 100uM ABA vs. No Treatment
  misc_feature: MA Experiment ID: 20000086 Result: Up-regulated in Transcription
  misc_feature: MA Experiment 20000086 PARAMETER Experiment Name: At_100uM_ABA_Mutants_cDNA_P Parameter: Plant Line Value: CS22
  misc_feature: MA Experiment 20000086 PARAMETER Experiment Name: At_100uM_ABA_Mutants_cDNA_P Parameter: Timepoint (hr) Value: 6
  misc_feature: MA Experiment 20000086 PARAMETER Experiment Name: At_100uM_ABA_Mutants_cDNA_P Parameter: Tissue Value: Aerial
  misc_feature: MA Experiment 20000086 PARAMETER Experiment Name: At_100uM_ABA_Mutants_cDNA_P Parameter: Treatment Value: 100uM ABA vs. No Treatment
  misc_feature: MA Experiment ID: 20000088 Result: Up-regulated in Transcription
  misc_feature: MA Experiment 20000088 PARAMETER Experiment Name: At_100uM_ABA_Mutants_cDNA_P Parameter: Plant Line Value: Landsberg
  misc_feature: MA Experiment 20000088 PARAMETER Experiment Name: At_100uM_ABA_Mutants_cDNA_P Parameter: Timepoint (hr) Value: 6
  misc_feature: MA Experiment 20000088 PARAMETER Experiment Name: At_100uM_ABA_Mutants_cDNA_P Parameter: Tissue Value: Aerial
  misc_feature: MA Experiment 20000088 PARAMETER Experiment Name: At_100uM_ABA_Mutants_cDNA_P Parameter: Treatment Value: 100uM ABA vs. No Treatment
  misc_feature: MA Experiment ID: 20000117 Result: Up-regulated in Transcription
  misc_feature: MA Experiment 20000117 PARAMETER Experiment Name: At_100uM_ABA_Mutants_cDNA_P Parameter: Plant Line Value: Columbia
  misc_feature: MA Experiment 20000117 PARAMETER Experiment Name: At_100uM_ABA_Mutants_cDNA_P Parameter: Timepoint (hr) Value: 6
  misc_feature: MA Experiment 20000117 PARAMETER Experiment Name: At_100uM_ABA_Mutants_cDNA_P Parameter: Tissue Value: Aerial
  misc_feature: MA Experiment 20000117 PARAMETER Experiment Name: At_100uM_ABA_Mutants_cDNA_P Parameter: Treatment Value: 100uM ABA vs. No Treatment
  misc_feature: MA Experiment ID: 20000144 Result: Up-regulated in Transcription
  misc_feature: MA Experiment 20000144 PARAMETER Experiment Name: At_42deg_Heat_cDNA_P Parameter: Temperature (deg C) Value: 42 vs. 22
  misc_feature: MA Experiment 20000144 PARAMETER Experiment Name: At_42deg_Heat_cDNA_P Parameter: Timepoint (hr) Value: 1
  misc_feature: MA Experiment 20000144 PARAMETER Experiment Name: At_42deg_Heat_cDNA_P Parameter: Tissue Value: Aerial
  misc_feature: MA Experiment ID: 20000171 Result: Up-regulated in Transcription
  misc_feature: MA Experiment 20000171 PARAMETER Experiment Name: At_42deg_Heat_P Parameter: Age (day) Value: 14
  misc_feature: MA Experiment 20000171 PARAMETER Experiment Name: At_42deg_Heat_P Parameter: Organism Value: A. thaliana
  misc_feature: MA Experiment 20000171 PARAMETER Experiment Name: At_42deg_Heat_P Parameter: Plant Line Value: WS
  misc_feature: MA Experiment 20000171 PARAMETER Experiment Name: At_42deg_Heat_P Parameter: Temperature (deg C) Value: 42 vs. 22
  misc_feature: MA Experiment 20000171 PARAMETER Experiment Name: At_42deg_Heat_P Parameter: Timepoint (hr) Value: 1
  misc_feature: MA Experiment 20000171 PARAMETER Experiment Name: At_42deg_Heat_P Parameter: Tissue Value: Aerial
  misc_feature: MA Experiment ID: 20000180 Result: Down-regulated in Transcription
  misc_feature: MA Experiment 20000180 PARAMETER Experiment Name: At_Germinating_Seeds_P Parameter: Age (hr) Value: 24 vs. 0
  misc_feature: MA Experiment 20000180 PARAMETER Experiment Name: At_Germinating_Seeds_P Parameter: Tissue Value: Germinating Seeds
  misc_feature: MA Experiment ID: 20000182 Result: Up-regulated in Transcription
  misc_feature: MA Experiment 20000182 PARAMETER Experiment Name: At_2mM_SA_P Parameter: Age (day) Value: 14
  misc_feature: MA Experiment 20000182 PARAMETER Experiment Name: At_2mM_SA_P Parameter: Organism Value: A. thaliana
  misc_feature: MA Experiment 20000182 PARAMETER Experiment Name: At_2mM_SA_P Parameter: Plant Line Value: WS
  misc_feature: MA Experiment 20000182 PARAMETER Experiment Name: At_2mM_SA_P Parameter: Timepoint (hr) Value: 6
  misc_feature: MA Experiment 20000182 PARAMETER Experiment Name: At_2mM_SA_P Parameter: Tissue Value: Aerial
  misc_feature: MA Experiment 20000182 PARAMETER Experiment Name: At_2mM_SA_P Parameter: Treatment Value: 2mM SA vs. No Treatment
  misc_feature: MA Experiment ID: 20000184 Result: Down-regulated in Transcription
  misc_feature: MA Experiment 20000184 PARAMETER Experiment Name: At_Shoots__P Parameter: Age (day) Value: 7
  misc_feature: MA Experiment 20000184 PARAMETER Experiment Name: At_Shoots__P Parameter: Tissue Value: Shoots vs. Whole Plant
  misc_feature: MA Experiment ID: 20000185 Result: Down-regulated in Transcription
  misc_feature: MA Experiment 20000185 PARAMETER Experiment Name: At_Roots__P Parameter: Age (day) Value: 7 vs. 21
  misc_feature: MA Experiment 20000185 PARAMETER Experiment Name: At_Roots__P Parameter: Organism Value: A. thaliana
  misc_feature: MA Experiment 20000185 PARAMETER Experiment Name: At_Roots__P Parameter: Tissue Value: Roots vs. Whole Plant
  misc_feature: MA Experiment ID: 20000227 Result: Down-regulated in Transcription
  misc_feature: MA Experiment 20000227 PARAMETER Experiment Name: At_Root-Tips-vs-Tops_P Parameter: Tissue Value: Root Tips vs. Root Tops
  misc_feature: MA Experiment ID: 20000234 Result: Down-regulated in Transcription
  misc_feature: MA Experiment 20000234 PARAMETER Experiment Name: At_Siliques_P Parameter: Age (day) Value: 21
  misc_feature: MA Experiment 20000234 PARAMETER Experiment Name: At_Siliques_P Parameter: Organism Value: A. thaliana
  misc_feature: MA Experiment 20000234 PARAMETER Experiment Name: At_Siliques_P Parameter: Plant Line Value: WS
  misc_feature: MA Experiment 20000234 PARAMETER Experiment Name: At_Siliques_P Parameter: Tissue Value: Less Than 5mm Siliques vs. Whole Plant
  misc_feature: MA Experiment ID: 20000235 Result: Down-regulated in Transcription
  misc_feature: MA Experiment 20000235 PARAMETER Experiment Name: At_Siliques_P Parameter: Age (day) Value: 21
  misc_feature: MA Experiment 20000235 PARAMETER Experiment Name: At_Siliques_P Parameter: Organism Value: A. thaliana
  misc_feature: MA Experiment 20000235 PARAMETER Experiment Name: At_Siliques_P Parameter: Plant Line Value: WS
  misc_feature: MA Experiment 20000235 PARAMETER Experiment Name: At_Siliques_P Parameter: Tissue Value: 5-10mm Siliques vs. Whole Plant
  misc_feature: MA Experiment ID: 20000267 Result: Up-regulated in Transcription
  misc_feature: MA Experiment 20000267 PARAMETER Experiment Name: At_Drought_P Parameter: Age (day) Value: 7
  misc_feature: MA Experiment 20000267 PARAMETER Experiment Name: At_Drought_P Parameter: Organism Value: A. thaliana
  misc_feature: MA Experiment 20000267 PARAMETER Experiment Name: At_Drought_P Parameter: Plant Line Value: WS
  misc_feature: MA Experiment 20000267 PARAMETER Experiment Name: At_Drought_P Parameter: Timepoint (hr) Value: 6
  misc_feature: MA Experiment 20000267 PARAMETER Experiment Name: At_Drought_P Parameter: Tissue Value: Whole Plant
  misc_feature: MA Experiment 20000267 PARAMETER Experiment Name: At_Drought_P Parameter: Treatment Value: Drought vs. No Drought
  misc_feature: MA Experiment ID: 20000268 Result: Up-regulated in Transcription
  misc_feature: MA Experiment 20000268 PARAMETER Experiment Name: At_100mM_NaCl__P Parameter: Age (day) Value: 14
  misc_feature: MA Experiment 20000268 PARAMETER Experiment Name: At_100mM_NaCl__P Parameter: Organism Value: A. thaliana
  misc_feature: MA Experiment 20000268 PARAMETER Experiment Name: At_100mM_NaCl__P Parameter: Plant Line Value: WS
  misc_feature: MA Experiment 20000268 PARAMETER Experiment Name: At_100mM_NaCl__P Parameter: Timepoint (hr) Value: 6
  misc_feature: MA Experiment 20000268 PARAMETER Experiment Name: At_100mM_NaCl__P Parameter: Tissue Value: Whole Plant
  misc_feature: MA Experiment 20000268 PARAMETER Experiment Name: At_100mM_NaCl__P Parameter: Treatment Value: 100mM NaCl vs. No Treatment
  misc_feature: MA Experiment ID: 20000269 Result: Down-regulated in Transcription
  misc_feature: MA Experiment 20000269 PARAMETER Experiment Name: At_1mM_KNO3_L-vs-H_Roots_P Parameter: Age (day) Value: 7,10,12
  misc_feature: MA Experiment 20000269 PARAMETER Experiment Name: At_1mM_KNO3_L-vs-H_Roots_P Parameter: Organism Value: A. thaliana
  misc_feature: MA Experiment 20000269 PARAMETER Experiment Name: At_1mM_KNO3_L-vs-H_Roots_P Parameter: Plant Line Value: WS
  misc_feature: MA Experiment 20000269 PARAMETER Experiment Name: At_1mM_KNO3_L-vs-H_Roots_P Parameter: Timepoint (day) Value: 7,10,12
  misc_feature: MA Experiment 20000269 PARAMETER Experiment Name: At_1mM_KNO3_L-vs-H_Roots_P Parameter: Tissue Value: Roots
  misc_feature: MA Experiment 20000269 PARAMETER Experiment Name: At_1mM_KNO3_L-vs-H_Roots_P Parameter: Treatment Value: 1mM KNO3 vs. 50mM KNO3
  misc_feature: MA Experiment ID: 20000436 Result: Up-regulated in Transcription
  misc_feature: MA Experiment 20000436 PARAMETER Experiment Name: At_Drought_P Parameter: Age (day) Value: 7
  misc_feature: MA Experiment 20000436 PARAMETER Experiment Name: At_Drought_P Parameter: Organism Value: A. thaliana
  misc_feature: MA Experiment 20000436 PARAMETER Experiment Name: At_Drought_P Parameter: Plant Line Value: WS
  misc_feature: MA Experiment 20000436 PARAMETER Experiment Name: At_Drought_P Parameter: Timepoint (hr) Value: 12
  misc_feature: MA Experiment 20000436 PARAMETER Experiment Name: At_Drought_P Parameter: Tissue Value: Whole Plant
  misc_feature: MA Experiment 20000436 PARAMETER Experiment Name: At_Drought_P Parameter: Treatment Value: Drought vs. No Drought
  misc_feature: MA Experiment ID: 20000437 Result: Up-regulated in Transcription
  misc_feature: MA Experiment 20000437 PARAMETER Experiment Name: At_Drought_P Parameter: Age (day) Value: 8
  misc_feature: MA Experiment 20000437 PARAMETER Experiment Name: At_Drought_P Parameter: Organism Value: A. thaliana
  misc_feature: MA Experiment 20000437 PARAMETER Experiment Name: At_Drought_P Parameter: Plant Line Value: WS
  misc_feature: MA Experiment 20000437 PARAMETER Experiment Name: At_Drought_P Parameter: Timepoint (hr) Value: 24
  misc_feature: MA Experiment 20000437 PARAMETER Experiment Name: At_Drought_P Parameter: Tissue Value: Whole Plant
  misc_feature: MA Experiment 20000437 PARAMETER Experiment Name: At_Drought_P Parameter: Treatment Value: Drought vs. No Drought
  misc_feature: MA Experiment ID: 20000438 Result: Down-regulated in Transcription
  misc_feature: MA Experiment 20000438 PARAMETER Experiment Name: At_Shoots__P Parameter: Age (day) Value: 14
  misc_feature: MA Experiment 20000438 PARAMETER Experiment Name: At_Shoots__P Parameter: Tissue Value: Shoots vs. Whole Plant
  misc_feature: MA Experiment ID: 20000439 Result: Down-regulated in Transcription
  misc_feature: MA Experiment 20000439 PARAMETER Experiment Name: At_Roots__P Parameter: Age (day) Value: 14 vs. 21
  misc_feature: MA Experiment 20000439 PARAMETER Experiment Name: At_Roots__P Parameter: Organism Value: A. thaliana
  misc_feature: MA Experiment 20000439 PARAMETER Experiment Name: At_Roots__P Parameter: Tissue Value: Roots vs. Whole Plant
  misc_feature: MA Experiment ID: 20000460 Result: Down-regulated in Transcription
  misc_feature: MA Experiment 20000460 PARAMETER Experiment Name: At_10percent_PEG_P Parameter: Age (day) Value: 12
  misc_feature: MA Experiment 20000460 PARAMETER Experiment Name: At_10percent_PEG_P Parameter: Organism Value: A. thaliana
  misc_feature: MA Experiment 20000460 PARAMETER Experiment Name: At_10percent_PEG_P Parameter: Plant Line Value: WS
  misc_feature: MA Experiment 20000460 PARAMETER Experiment Name: At_10percent_PEG_P Parameter: Timepoint (day) Value: 12
  misc_feature: MA Experiment 20000460 PARAMETER Experiment Name: At_10percent_PEG_P Parameter: Tissue Value: Whole Plant
  misc_feature: MA Experiment 20000460 PARAMETER Experiment Name: At_10percent_PEG_P Parameter: Treatment Value: 10percent PEG vs. No Treatment
  misc_feature: MA Experiment ID: 20000527 Result: Down-regulated in Transcription
  misc_feature: MA Experiment 20000527 PARAMETER Experiment Name: At_10percent_PEG_P Parameter: Age (day) Value: 20
  misc_feature: MA Experiment 20000527 PARAMETER Experiment Name: At_10percent_PEG_P Parameter: Organism Value: A. thaliana
  misc_feature: MA Experiment 20000527 PARAMETER Experiment Name: At_10percent_PEG_P Parameter: Plant Line Value: WS
  misc_feature: MA Experiment 20000527 PARAMETER Experiment Name: At_10percent_PEG_P Parameter: Timepoint (day) Value: 20
  misc_feature: MA Experiment 20000527 PARAMETER Experiment Name: At_10percent_PEG_P Parameter: Tissue Value: Whole Plant
  misc_feature: MA Experiment 20000527 PARAMETER Experiment Name: At_10percent_PEG_P Parameter: Treatment Value: 10percent PEG vs. No Treatment
  misc_feature: MA Experiment ID: 20000573 Result: Down-regulated in Transcription
  misc_feature: MA Experiment 20000573 PARAMETER Experiment Name: At_100uM_ABA_Mutants__P Parameter: Organism Value: A. thaliana
  misc_feature: MA Experiment 20000573 PARAMETER Experiment Name: At_100uM_ABA_Mutants__P Parameter: Plant Line Value: CS22 vs. Ler wt
  misc_feature: MA Experiment 20000573 PARAMETER Experiment Name: At_100uM_ABA_Mutants__P Parameter: Timepoint (hr) Value: N/A
  misc_feature: MA Experiment 20000573 PARAMETER Experiment Name: At_100uM_ABA_Mutants__P Parameter: Tissue Value: Whole Plant
  misc_feature: MA Experiment 20000573 PARAMETER Experiment Name: At_100uM_ABA_Mutants__P Parameter: Treatment Value: None
  misc_feature: MA Experiment ID: 20000574 Result: Down-regulated in Transcription
  misc_feature: MA Experiment 20000574 PARAMETER Experiment Name: At_100uM_ABA_Mutants__P Parameter: Organism Value: A. thaliana
  misc_feature: MA Experiment 20000574 PARAMETER Experiment Name: At_100uM_ABA_Mutants__P Parameter: Plant Line Value: CS23 vs. Ler wt
  misc_feature: MA Experiment 20000574 PARAMETER Experiment Name: At_100uM_ABA_Mutants__P Parameter: Timepoint (hr) Value: N/A
  misc_feature: MA Experiment 20000574 PARAMETER Experiment Name: At_100uM_ABA_Mutants__P Parameter: Tissue Value: Whole Plant
  misc_feature: MA Experiment 20000574 PARAMETER Experiment Name: At_100uM_ABA_Mutants__P Parameter: Treatment Value: None
  misc_feature: MA Experiment ID: 20001247 Result: Down-regulated in Transcription
  misc_feature: MA Experiment 20001247 PARAMETER Experiment Name: At_Far-red-induction_P Parameter: Age (day) Value: 7
  misc_feature: MA Experiment 20001247 PARAMETER Experiment Name: At_Far-red-induction_P Parameter: Light Value: Far-red vs. White
  misc_feature: MA Experiment 20001247 PARAMETER Experiment Name: At_Far-red-induction_P Parameter: Organism Value: A. thaliana
  misc_feature: MA Experiment 20001247 PARAMETER Experiment Name: At_Far-red-induction_P Parameter: Plant Line Value: Columbia
  misc_feature: MA Experiment 20001247 PARAMETER Experiment Name: At_Far-red-induction_P Parameter: Timepoint (hr) Value: 1
  misc_feature: MA Experiment 20001247 PARAMETER Experiment Name: At_Far-red-induction_P Parameter: Tissue Value: Whole Plant
  misc_feature: MA Experiment ID: 20001248 Result: Down-regulated in Transcription
  misc_feature: MA Experiment 20001248 PARAMETER Experiment Name: At_Far-red-induction_P Parameter: Age (day) Value: 7
  misc_feature: MA Experiment 20001248 PARAMETER Experiment Name: At_Far-red-induction_P Parameter: Light Value: Far-red vs. White
  misc_feature: MA Experiment 20001248 PARAMETER Experiment Name: At_Far-red-induction_P Parameter: Organism Value: A. thaliana
  misc_feature: MA Experiment 20001248 PARAMETER Experiment Name: At_Far-red-induction_P Parameter: Plant Line Value: Columbia
  misc_feature: MA Experiment 20001248 PARAMETER Experiment Name: At_Far-red-induction_P Parameter: Timepoint (hr) Value: 4
  misc_feature: MA Experiment 20001248 PARAMETER Experiment Name: At_Far-red-induction_P Parameter: Tissue Value: Whole Plant
  misc_feature: MA Experiment ID: 20001451 Result: Down-regulated in Transcription
  misc_feature: MA Experiment 20001451 PARAMETER Experiment Name: At_Far-red-induction_P Parameter: Age (day) Value: 7
  misc_feature: MA Experiment 20001451 PARAMETER Experiment Name: At_Far-red-induction_P Parameter: Light Value: Far-red vs. White
  misc_feature: MA Experiment 20001451 PARAMETER Experiment Name: At_Far-red-induction_P Parameter: Organism Value: A. thaliana
  misc_feature: MA Experiment 20001451 PARAMETER Experiment Name: At_Far-red-induction_P Parameter: Plant Line Value: Columbia
  misc_feature: MA Experiment 20001451 PARAMETER Experiment Name: At_Far-red-induction_P Parameter: Timepoint (hr) Value: 24
  misc_feature: MA Experiment 20001451 PARAMETER Experiment Name: At_Far-red-induction_P Parameter: Tissue Value: Whole Plant
  misc_feature: MA Experiment ID: 20001554 Result: Up-regulated in Transcription
  misc_feature: MA Experiment 20001554 PARAMETER Experiment Name: At_Drought_Soil_Dry_P Parameter: Age (day) Value: 21
  misc_feature: MA Experiment 20001554 PARAMETER Experiment Name: At_Drought_Soil_Dry_P Parameter: Organism Value: A. thaliana
  misc_feature: MA Experiment 20001554 PARAMETER Experiment Name: At_Drought_Soil_Dry_P Parameter: Plant Line Value: WS
  misc_feature: MA Experiment 20001554 PARAMETER Experiment Name: At_Drought_Soil_Dry_P Parameter: Post Timepoint (hr) Value: None
  misc_feature: MA Experiment 20001554 PARAMETER Experiment Name: At_Drought_Soil_Dry_P Parameter: Post-Treatment Value: None
  misc_feature: MA Experiment 20001554 PARAMETER Experiment Name: At_Drought_Soil_Dry_P Parameter: Timepoint (day) Value: 7
  misc_feature: MA Experiment 20001554 PARAMETER Experiment Name: At_Drought_Soil_Dry_P Parameter: Treatment Value: Drought vs. No Drought
  misc_feature: MA Experiment ID: 20001555 Result: Up-regulated in Transcription
  misc_feature: MA Experiment 20001555 PARAMETER Experiment Name: At_Drought_Soil_Dry_P Parameter: Age (day) Value: 24
  misc_feature: MA Experiment 20001555 PARAMETER Experiment Name: At_Drought_Soil_Dry_P Parameter: Organism Value: A. thaliana
  misc_feature: MA Experiment 20001555 PARAMETER Experiment Name: At_Drought_Soil_Dry_P Parameter: Plant Line Value: WS
  misc_feature: MA Experiment 20001555 PARAMETER Experiment Name: At_Drought_Soil_Dry_P Parameter: Post Timepoint (hr) Value: None
  misc_feature: MA Experiment 20001555 PARAMETER Experiment Name: At_Drought_Soil_Dry_P Parameter: Post-Treatment Value: None
  misc_feature: MA Experiment 20001555 PARAMETER Experiment Name: At_Drought_Soil_Dry_P Parameter: Timepoint (day) Value: 10
  misc_feature: MA Experiment 20001555 PARAMETER Experiment Name: At_Drought_Soil_Dry_P Parameter: Treatment Value: Drought vs. No Drought
  misc_feature: MA Experiment ID: 20001558 Result: Down-regulated in Transcription
  misc_feature: MA Experiment 20001558 PARAMETER Experiment Name: At_Drought_Soil_Dry_P Parameter: Age (day) Value: 27
  misc_feature: MA Experiment 20001558 PARAMETER Experiment Name: At_Drought_Soil_Dry_P Parameter: Organism Value: A. thaliana
  misc_feature: MA Experiment 20001558 PARAMETER Experiment Name: At_Drought_Soil_Dry_P Parameter: Plant Line Value: WS
  misc_feature: MA Experiment 20001558 PARAMETER Experiment Name: At_Drought_Soil_Dry_P Parameter: Post Timepoint (hr) Value: 6
  misc_feature: MA Experiment 20001558 PARAMETER Experiment Name: At_Drought_Soil_Dry_P Parameter: Post-Treatment Value: Re-Water vs. No Drought
  misc_feature: MA Experiment 20001558 PARAMETER Experiment Name: At_Drought_Soil_Dry_P Parameter: Timepoint (day) Value: 13
  misc_feature: MA Experiment 20001558 PARAMETER Experiment Name: At_Drought_Soil_Dry_P Parameter: Treatment Value: Drought vs. No Drought
  misc_feature: MA Experiment ID: 20001560 Result: Down-regulated in Transcription
  misc_feature: MA Experiment 20001560 PARAMETER Experiment Name: At_Drought_Soil_Dry_P Parameter: Age (day) Value: 28
  misc_feature: MA Experiment 20001560 PARAMETER Experiment Name: At_Drought_Soil_Dry_P Parameter: Organism Value: A. thaliana
  misc_feature: MA Experiment 20001560 PARAMETER Experiment Name: At_Drought_Soil_Dry_P Parameter: Plant Line Value: WS
  misc_feature: MA Experiment 20001560 PARAMETER Experiment Name: At_Drought_Soil_Dry_P Parameter: Post Timepoint (hr) Value: None
  misc_feature: MA Experiment 20001560 PARAMETER Experiment Name: At_Drought_Soil_Dry_P Parameter: Post-Treatment Value: None
  misc_feature: MA Experiment 20001560 PARAMETER Experiment Name: At_Drought_Soil_Dry_P Parameter: Timepoint (day) Value: 14
  misc_feature: MA Experiment 20001560 PARAMETER Experiment Name: At_Drought_Soil_Dry_P Parameter: Treatment Value: Drought vs. No Drought
ccttatctctctctctctttctctcttatataaagagagaaatatacaaaacctccaagtacgtttcatcgatcctacctaattcatcaaaaaattgtgtgaggcttatttgatcaataattatgaattctggtcgtcgatcgttaatgtccgccacggcgagtctgagtttgctgttgtgtatcttcaccaccttcgtcgtggtgtcgaacggtgagcttcagagatttatagagccggctaaaagcgacggttccgttagttttatagtcatcggagattggggtcgtcgtggctccttcaatcagtctctcgttgcttatcagatgggaaaaattggagagaagattgacttagatttcgtggtgtctacgggagataacttctacgacaatggattgtttagtgaacatgatccaaacttcgaacaatctttctctaacatctacactgctccaagtcttcagaaacagtggtacagtgttttgggaaaccatgactatagaggtgacgcagaagctcagctgagttctgttctccgggaaatcgacagccgttggatttgtcttcgatcatttgtcgttgatgcagagttggtagagatgttctttgttgacacgactcctttcgtgaaagaatactacacagaagcagatggtcactcatatgattggcgcgcagttccatctcgcaactcttatgtcaaagctcttctccgtgatcttgaagtttccttaaagagttctaaagcaagatggaagattgttgttggtcaccatgcaatgagaagcattggacatcatggagatactaaagagctcaacgaagagcttcttccgattcttaaagagaacggtgttgatctctacatgaatggacatgatcattgtcttcaacatatgagtgatgaagacagtcctattcagtttctaactagtggtgctggatccaaggcttggagaggagatattaacccagtgaccatcaatcccaagctactgaaattctattatgatggtcaaggattcatgtctgctcggttcactcactcggacgcagagatcgtcttctacgatgtctttggtgagattttgcacaaatgggtcacttctaaacaacttcttcattcctctgtttgaagataaaaagccttaataaatttggcttcctttgtaattttgtaacatacatttaagattcttaagtcctattgcaggctaggtaggcttcctgcttagtttagcatccctatcatttttagcaatagcttattccatcacaataacatatataatgtacgatcttttcctcaaatttttgatacaagtgtaatgatacccttaatgggtatcttcttaatgctacataagttagtc

SEQ ID NO: 104357 - protein, 338 aa, Arabidopsis thaliana; identical to SEQ ID NO: 40283
  peptide (1)..(338): Ceres Seq. ID no. 13614860
  misc_feature (46)..(257): Pfam Name: Calcineurin-like phosphoesterase Pfam Description: Calcineurin-like phosphoesterase
  misc_feature (1)..(338): Homolog of NCBI NO: 18401643 NR Description: calcineurin-like phosphoesterase family thaliana] >gi|6624897|emb|CAB63938.1| acid phosphatase type 5
  misc_feature (1)..(338): Homolog of NCBI NO: 21536860 NR Description: acid phosphatase type 5 [Arabidopsis thaliana]
  misc_feature (16)..(336): Homolog of NCBI NO: 39918795 NR Description: putative acid phosphatase [Lupinus luteus]
  misc_feature (18)..(335): Homolog of NCBI NO: 30683951 NR Description: calcineurin-like phosphoesterase family thaliana] >gi|24030193|gb|AAN41277.1| putative purple acid
  misc_feature (18)..(335): Homolog of NCBI NO: 30911094 NR Description: putative purple acid phosphatase [Arabidopsis
  misc_feature (18)..(335): Homolog of NCBI NO: 25752249 NR Description: probable acid phosphatase (EC 3.1.3.2) F10B6.10
  misc_feature (15)..(338): Homolog of NCBI NO: 22325419 NR Description: calcineurin-like phosphoesterase family thaliana] >gi|17529296|gb|AAL38875.1| putative purple acid [Arabidopsis thaliana] >gi|20257479|gb|AAM15909.1|AF492660_1
  misc_feature (14)..(333): Homolog of NCBI NO: 22329781 NR Description: calcineurin-like phosphoesterase family thaliana] >gi|17978997|gb|AAL47459.1| At1g25230/F4F7_8 thaliana] >gi|22655338|gb|AAM98261.1| At1g25230/F4F7_8

SEQ ID NO: 104358 - protein, 330 aa, Arabidopsis thaliana; identical to SEQ ID NO: 40284
  peptide (1)..(330): Ceres Seq. ID no. 13614861
  misc_feature (38)..(249): Pfam Name: Calcineurin-like phosphoesterase Pfam Description: Calcineurin-like phosphoesterase
  misc_feature (1)..(330): Homolog of NCBI NO: 18401643 NR Description: calcineurin-like phosphoesterase family thaliana] >gi|6624897|emb|CAB63938.1| acid phosphatase type 5
  misc_feature (1)..(330): Homolog of NCBI NO: 21536860 NR Description: acid phosphatase type 5 [Arabidopsis thaliana]
  misc_feature (8)..(328): Homolog of NCBI NO: 39918795 NR Description: putative acid phosphatase [Lupinus luteus]
  misc_feature (10)..(327): Homolog of NCBI NO: 30683951 NR Description: calcineurin-like phosphoesterase family thaliana] >gi|24030193|gb|AAN41277.1| putative purple acid
  misc_feature (10)..(327): Homolog of NCBI NO: 30911094 NR Description: putative purple acid phosphatase [Arabidopsis
  misc_feature (10)..(327): Homolog of NCBI NO: 25752249 NR Description: probable acid phosphatase (EC 3.1.3.2) F10B6.10
  misc_feature (7)..(330): Homolog of NCBI NO: 22325419 NR Description: calcineurin-like phosphoesterase family thaliana] >gi|17529296|gb|AAL38875.1| putative purple acid [Arabidopsis thaliana] >gi|20257479|gb|AAM15909.1|AF492660_1
  misc_feature (6)..(325): Homolog of NCBI NO: 22329781 NR Description: calcineurin-like phosphoesterase family thaliana] >gi|17978997|gb|AAL47459.1| At1g25230/F4F7_8 thaliana] >gi|22655338|gb|AAM98261.1| At1g25230/F4F7_8

SEQ ID NO: 104359 - protein, 270 aa, Arabidopsis thaliana; identical to SEQ ID NO: 40285
  peptide (1)..(270): Ceres Seq. ID no. 13614862
  misc_feature (1)..(189): Pfam Name: Calcineurin-like phosphoesterase Pfam Description: Calcineurin-like phosphoesterase
  misc_feature (1)..(270): Homolog of NCBI NO: 18401643 NR Description: calcineurin-like phosphoesterase family thaliana] >gi|6624897|emb|CAB63938.1| acid phosphatase type 5
  misc_feature (1)..(270): Homolog of NCBI NO: 21536860 NR Description: acid phosphatase type 5 [Arabidopsis thaliana]
  misc_feature (1)..(268): Homolog of NCBI NO: 39918795 NR Description: putative acid phosphatase [Lupinus luteus]
  misc_feature (1)..(267): Homolog of NCBI NO: 30683951 NR Description: calcineurin-like phosphoesterase family thaliana] >gi|24030193|gb|AAN41277.1| putative purple acid
  misc_feature (1)..(267): Homolog of NCBI NO: 30911094 NR Description: putative purple acid phosphatase [Arabidopsis
  misc_feature (1)..(267): Homolog of NCBI NO: 25752249 NR Description: probable acid phosphatase (EC 3.1.3.2) F10B6.10
  misc_feature (1)..(270): Homolog of NCBI NO: 22325419 NR Description: calcineurin-like phosphoesterase family thaliana] >gi|17529296|gb|AAL38875.1| putative purple acid [Arabidopsis thaliana] >gi|20257479|gb|AAM15909.1|AF492660_1
  misc_feature (1)..(265): Homolog of NCBI NO: 22329781 NR Description: calcineurin-like phosphoesterase family thaliana] >gi|17978997|gb|AAL47459.1| At1g25230/F4F7_8 thaliana] >gi|22655338|gb|AAM98261.1| At1g25230/F4F7_8

SEQ ID NO: 104360 - DNA, 1550 bp, Arabidopsis thaliana
  misc_feature (1)..(1550): Ceres Seq. ID no. 13614863
  misc_feature: MA Experiment ID: 108464 Result: Up-regulated in Transcription
  misc_feature: MA Experiment 108464 PARAMETER Experiment Name: At_Germinating_Seeds_cDNA_P Parameter: Age (day) Value: 4 vs. 0
  misc_feature: MA Experiment 108464 PARAMETER Experiment Name: At_Germinating_Seeds_cDNA_P Parameter: Tissue Value: Germinating Seeds
  misc_feature: MA Experiment ID: 108573 Result: Up-regulated in Transcription
  misc_feature: MA Experiment 108573 PARAMETER Experiment Name: At_Drought_cDNA_P Parameter: Timepoint (hr) Value: 6
  misc_feature: MA Experiment 108573 PARAMETER Experiment Name: At_Drought_cDNA_P Parameter: Tissue Value: Aerial
  misc_feature: MA Experiment 108573 PARAMETER Experiment Name: At_Drought_cDNA_P Parameter: Treatment Value: Drought vs. No Drought
  misc_feature: MA Experiment ID: 108574 Result: Up-regulated in Transcription
  misc_feature: MA Experiment 108574 PARAMETER Experiment Name: At_Wounding__cDNA_P Parameter: Timepoint (hr) Value: 1
  misc_feature: MA Experiment 108574 PARAMETER Experiment Name: At_Wounding__cDNA_P Parameter: Tissue Value: Aerial
  misc_feature: MA Experiment 108574 PARAMETER Experiment Name: At_Wounding__cDNA_P Parameter: Treatment Value: Wounding vs. No Wounding
  misc_feature: MA Experiment ID: 108579 Result: Up-regulated in Transcription
  misc_feature: MA Experiment 108579 PARAMETER Experiment Name: At_4deg_Cold_cDNA_P Parameter: Temperature (deg C) Value: 4 vs. 22
  misc_feature: MA Experiment 108579 PARAMETER Experiment Name: At_4deg_Cold_cDNA_P Parameter: Timepoint (hr) Value: 6
  misc_feature: MA Experiment 108579 PARAMETER Experiment Name: At_4deg_Cold_cDNA_P Parameter: Tissue Value: Aerial
  misc_feature: MA Experiment ID: 108585 Result: Up-regulated in Transcription
  misc_feature: MA Experiment 108585 PARAMETER Experiment Name: At_5mM_NaNP_cDNA_P Parameter: Timepoint (hr) Value: 6
  misc_feature: MA Experiment 108585 PARAMETER Experiment Name: At_5mM_NaNP_cDNA_P Parameter: Tissue Value: Aerial
  misc_feature: MA Experiment 108585 PARAMETER Experiment Name: At_5mM_NaNP_cDNA_P Parameter: Treatment Value: null
  misc_feature: MA Experiment ID: 20000072 Result: Up-regulated in Transcription
  misc_feature: MA Experiment 20000072 PARAMETER Experiment Name: At_100uM_ABA_Mutants_cDNA_P Parameter: Plant Line Value: CS8105
  misc_feature: MA Experiment 20000072 PARAMETER Experiment Name: At_100uM_ABA_Mutants_cDNA_P Parameter: Timepoint (hr) Value: 6
  misc_feature: MA Experiment 20000072 PARAMETER Experiment Name: At_100uM_ABA_Mutants_cDNA_P Parameter: Tissue Value: Aerial
  misc_feature: MA Experiment 20000072 PARAMETER Experiment Name: At_100uM_ABA_Mutants_cDNA_P Parameter: Treatment Value: 100uM ABA vs. No Treatment
  misc_feature: MA Experiment ID: 20000089 Result: Down-regulated in Transcription
  misc_feature: MA Experiment ID: 20000090 Result: Down-regulated in Transcription
  misc_feature: MA Experiment ID: 20000093 Result: Up-regulated in Transcription
  misc_feature: MA Experiment 20000093 PARAMETER Experiment Name: At_42deg_Heat_cDNA_P Parameter: Temperature (deg C) Value: 42 vs. 22
  misc_feature: MA Experiment 20000093 PARAMETER Experiment Name: At_42deg_Heat_cDNA_P Parameter: Timepoint (hr) Value: 0.5
  misc_feature: MA Experiment 20000093 PARAMETER Experiment Name: At_42deg_Heat_cDNA_P Parameter: Tissue Value: Aerial
  misc_feature: MA Experiment ID: 20000112 Result: Up-regulated in Transcription
  misc_feature: MA Experiment 20000112 PARAMETER Experiment Name: At_42deg_Heat_cDNA_P Parameter: Temperature (deg C) Value: 42 vs. 22
  misc_feature: MA Experiment 20000112 PARAMETER Experiment Name: At_42deg_Heat_cDNA_P Parameter: Timepoint (hr) Value: 2
  misc_feature: MA Experiment 20000112 PARAMETER Experiment Name: At_42deg_Heat_cDNA_P Parameter: Tissue Value: Aerial
  misc_feature: MA Experiment ID: 20000113 Result: Up-regulated in Transcription
  misc_feature: MA Experiment 20000113 PARAMETER Experiment Name: At_42deg_Heat_cDNA_P Parameter: Temperature (deg C) Value: 42 vs. 22
  misc_feature: MA Experiment 20000113 PARAMETER Experiment Name: At_42deg_Heat_cDNA_P Parameter: Timepoint (hr) Value: 8
  misc_feature: MA Experiment 20000113 PARAMETER Experiment Name: At_42deg_Heat_cDNA_P Parameter: Tissue Value: Aerial
  misc_feature: MA Experiment ID: 20000144 Result: Up-regulated in Transcription
  misc_feature: MA Experiment 20000144 PARAMETER Experiment Name: At_42deg_Heat_cDNA_P Parameter: Temperature (deg C) Value: 42 vs. 22
  misc_feature: MA Experiment 20000144 PARAMETER Experiment Name: At_42deg_Heat_cDNA_P Parameter: Timepoint (hr) Value: 1
  misc_feature: MA Experiment 20000144 PARAMETER Experiment Name: At_42deg_Heat_cDNA_P Parameter: Tissue Value: Aerial
  misc_feature: MA Experiment ID: 20000171 Result: Up-regulated in Transcription
  misc_feature: MA Experiment 20000171 PARAMETER Experiment Name: At_42deg_Heat_P Parameter: Age (day) Value: 14
  misc_feature: MA Experiment 20000171 PARAMETER Experiment Name: At_42deg_Heat_P Parameter: Organism Value: A. thaliana
  misc_feature: MA Experiment 20000171 PARAMETER Experiment Name: At_42deg_Heat_P Parameter: Plant Line Value: WS
  misc_feature: MA Experiment 20000171 PARAMETER Experiment Name: At_42deg_Heat_P Parameter: Temperature (deg C) Value: 42 vs. 22
  misc_feature: MA Experiment 20000171 PARAMETER Experiment Name: At_42deg_Heat_P Parameter: Timepoint (hr) Value: 1
  misc_feature: MA Experiment 20000171 PARAMETER Experiment Name: At_42deg_Heat_P Parameter: Tissue Value: Aerial
  misc_feature: MA Experiment ID: 20000234 Result: Down-regulated in Transcription
  misc_feature: MA Experiment 20000234 PARAMETER Experiment Name: At_Siliques_P Parameter: Age (day) Value: 21
  misc_feature: MA Experiment 20000234 PARAMETER Experiment Name: At_Siliques_P Parameter: Organism Value: A. thaliana
  misc_feature: MA Experiment 20000234 PARAMETER Experiment Name: At_Siliques_P Parameter: Plant Line Value: WS
  misc_feature: MA Experiment 20000234 PARAMETER Experiment Name: At_Siliques_P Parameter: Tissue Value: Less Than 5mm Siliques vs. Whole Plant
  misc_feature: MA Experiment ID: 20000436 Result: Up-regulated in Transcription
  misc_feature: MA Experiment 20000436 PARAMETER Experiment Name: At_Drought_P Parameter: Age (day) Value: 7
  misc_feature: MA Experiment 20000436 PARAMETER Experiment Name: At_Drought_P Parameter: Organism Value: A. thaliana
  misc_feature: MA Experiment 20000436 PARAMETER Experiment Name: At_Drought_P Parameter: Plant Line Value: WS
  misc_feature: MA Experiment 20000436 PARAMETER Experiment Name: At_Drought_P Parameter: Timepoint (hr) Value: 12
  misc_feature: MA Experiment 20000436 PARAMETER Experiment Name: At_Drought_P Parameter: Tissue Value: Whole Plant
  misc_feature: MA Experiment 20000436 PARAMETER Experiment Name: At_Drought_P Parameter: Treatment Value: Drought vs. No Drought
  misc_feature: MA Experiment ID: 20000495 Result: Down-regulated in Transcription
  misc_feature: MA Experiment 20000495 PARAMETER Experiment Name: At_Guard_Cells_P Parameter: Harvest Date Value: 8/2/2002
  misc_feature: MA Experiment 20000495 PARAMETER Experiment Name: At_Guard_Cells_P Parameter: Organism Value: A. thaliana
  misc_feature: MA Experiment 20000495 PARAMETER Experiment Name: At_Guard_Cells_P Parameter: Tissue Value: Guard Cells vs. Leaves
  misc_feature: MA Experiment ID: 20001247 Result: Up-regulated in Transcription
  misc_feature: MA Experiment 20001247 PARAMETER Experiment Name: At_Far-red-induction_P Parameter: Age (day) Value: 7
  misc_feature: MA Experiment 20001247 PARAMETER Experiment Name: At_Far-red-induction_P Parameter: Light Value: Far-red vs. White
  misc_feature: MA Experiment 20001247 PARAMETER Experiment Name: At_Far-red-induction_P Parameter: Organism Value: A. thaliana
  misc_feature: MA Experiment 20001247 PARAMETER Experiment Name: At_Far-red-induction_P Parameter: Plant Line Value: Columbia
  misc_feature: MA Experiment 20001247 PARAMETER Experiment Name: At_Far-red-induction_P Parameter: Timepoint (hr) Value: 1
  misc_feature: MA Experiment 20001247 PARAMETER Experiment Name: At_Far-red-induction_P Parameter: Tissue Value: Whole Plant
  misc_feature: MA Experiment ID: 20001248 Result: Down-regulated in Transcription
  misc_feature: MA Experiment 20001248 PARAMETER Experiment Name: At_Far-red-induction_P Parameter: Age (day) Value: 7
  misc_feature: MA Experiment 20001248 PARAMETER Experiment Name: At_Far-red-induction_P Parameter: Light Value: Far-red vs. White
  misc_feature: MA Experiment 20001248 PARAMETER Experiment Name: At_Far-red-induction_P Parameter: Organism Value: A. thaliana
  misc_feature: MA Experiment 20001248 PARAMETER Experiment Name: At_Far-red-induction_P Parameter: Plant Line Value: Columbia
  misc_feature: MA Experiment 20001248 PARAMETER Experiment Name: At_Far-red-induction_P Parameter: Timepoint (hr) Value: 4
  misc_feature: MA Experiment 20001248 PARAMETER Experiment Name: At_Far-red-induction_P Parameter: Tissue Value: Whole Plant
  misc_feature: MA Experiment ID: 20001450 Result: Up-regulated in Transcription
  misc_feature: MA Experiment 20001450 PARAMETER Experiment Name: At_Far-red-induction_P Parameter: Age (day) Value: 7
  misc_feature: MA Experiment 20001450 PARAMETER Experiment Name: At_Far-red-induction_P Parameter: Light Value: Far-red vs. White
  misc_feature: MA Experiment 20001450 PARAMETER Experiment Name: At_Far-red-induction_P Parameter: Organism Value: A. thaliana
  misc_feature: MA Experiment 20001450 PARAMETER Experiment Name: At_Far-red-induction_P Parameter: Plant Line Value: Columbia
  misc_feature: MA Experiment 20001450 PARAMETER Experiment Name: At_Far-red-induction_P Parameter: Timepoint (hr) Value: 8
  misc_feature: MA Experiment 20001450 PARAMETER Experiment Name: At_Far-red-induction_P Parameter: Tissue Value: Whole Plant
  misc_feature: MA Experiment ID: 20001558 Result: Down-regulated in Transcription
  misc_feature: MA Experiment 20001558 PARAMETER Experiment Name: At_Drought_Soil_Dry_P Parameter: Age (day) Value: 27
  misc_feature: MA Experiment 20001558 PARAMETER Experiment Name: At_Drought_Soil_Dry_P Parameter: Organism Value: A. thaliana
  misc_feature: MA Experiment 20001558 PARAMETER Experiment Name: At_Drought_Soil_Dry_P Parameter: Plant Line Value: WS
  misc_feature: MA Experiment 20001558 PARAMETER Experiment Name: At_Drought_Soil_Dry_P Parameter: Post Timepoint (hr) Value: 6
  misc_feature: MA Experiment 20001558 PARAMETER Experiment Name: At_Drought_Soil_Dry_P Parameter: Post-Treatment Value: Re-Water vs. No Drought
  misc_feature: MA Experiment 20001558 PARAMETER Experiment Name: At_Drought_Soil_Dry_P Parameter: Timepoint (day) Value: 13
  misc_feature: MA Experiment 20001558 PARAMETER Experiment Name: At_Drought_Soil_Dry_P Parameter: Treatment Value: Drought vs. No Drought
  misc_feature: MA Experiment ID: 20001560 Result: Down-regulated in Transcription
  misc_feature: MA Experiment 20001560 PARAMETER Experiment Name: At_Drought_Soil_Dry_P Parameter: Age (day) Value: 28
  misc_feature: MA Experiment 20001560 PARAMETER Experiment Name: At_Drought_Soil_Dry_P Parameter: Organism Value: A. thaliana
  misc_feature: MA Experiment 20001560 PARAMETER Experiment Name: At_Drought_Soil_Dry_P Parameter: Plant Line Value: WS
  misc_feature: MA Experiment 20001560 PARAMETER Experiment Name: At_Drought_Soil_Dry_P Parameter: Post Timepoint (hr) Value: None
  misc_feature: MA Experiment 20001560 PARAMETER Experiment Name: At_Drought_Soil_Dry_P Parameter: Post-Treatment Value: None
  misc_feature: MA Experiment 20001560 PARAMETER Experiment Name: At_Drought_Soil_Dry_P Parameter: Timepoint (day) Value: 14
  misc_feature: MA Experiment 20001560 PARAMETER Experiment Name: At_Drought_Soil_Dry_P Parameter: Treatment Value: Drought vs. No Drought
  misc_feature: MA Experiment ID: 20001757 Result: Down-regulated in Transcription
  misc_feature: MA Experiment 20001757 PARAMETER Experiment Name: At_50mM_NH4NO3_L-to-H_P Parameter: Timepoint (hr) Value: 6
  misc_feature: MA Experiment 20001757 PARAMETER Experiment Name: At_50mM_NH4NO3_L-to-H_P Parameter: Tissue Value: Leaf
  misc_feature: MA Experiment 20001757 PARAMETER Experiment Name: At_50mM_NH4NO3_L-to-H_P Parameter: Treatment Value: 50mM NH4NO3 vs 100mM Mannitol
ctcaggaaaactaaaccaaagtctgtttaccagtaatatcaatcgatcgccattctcgacatttctctctctcaagctagtctaaagtttcttcttatctccttcctccgaccaaaacttcgacttctctcttattttcaccctcagagagtaaccatggatgccttgacctcgagtttggttcgatctcccatcgtaccatcgagaacttccgacaacggttctggatctatgttccttaccgccagtggccctggattcacgcgttctggttcttcaagacttcaacttcgtttaagggtatgtcccaaatctcttcaaaacgcgtctgctagatcctcaagatcattacagagcttaacaacgactgctaaaactcggagaagttttgtggttagagcttcttcagcgtctaatgatgcttcatctggttcttcccccaaaccgatcgctccgctccagctgcaatcgcctgctggtcagtttctgtctcagattttggtgagccatcctcatcttgtgcctgcagctgttgaacagcagcttgagcagcttcaaactgatcgggactctcagggacagaacaaagattcagcgtctgtacctggaaccgacatcgttctctacaggagaattgcggagttgaaggaaaacgagagaagaagaacattggaagagattttgtatgcattggtggttcaaaagttcatggaagctaacgtatcacttgtaccttcagtaagcccatcttcagatccgtctggtcgggttgatacttggccgaccaaagtggagaaactcgagcggcttcactcgcccgagatgtacgagatgattcacaaccatcttgccttgattcttggaagcagaatgggtgatctgaactctgttgcacagataagcaagctcagagttggccaagtttacgctgcttctgtgatgtatggatatttcttgaagagggtggaccaaaggtttcagcttgagaagacgatgaagattcttccgggtgggtcggatgaaagtaaaacaagcgttgagcaagccgaggggacggcaacatatcaggcggctgtatcgtctcacccagaggttggtgcatttgcgggcggagttagtgctaagggcttcggcagcgagattaaaccatcccgattaaggtcatatgtgatgtcatttgatgcggagacgctgcagagatacgccactataagatcaagagaagcagttggaatcatcgagaagcacacagaggcattgtttggtaagcctgagattgtaataacaccggagggcacagtcgattcatcgaaggacgaacagataaagatcagcttcggtggaatgaagaggctcgtcttggaggcagttactttcgggtcgttcctttgggatgttgagagccatgtagatgcgaggtaccactttgtattgaactaaaaacatggtctgtaatgcagttgactaacttatgtagcattaagaagatacccattaagggtatcattacacttgtatcaaaaatttgaggaaaagatcgtacattatat

SEQ ID NO: 104361 - protein, 427 aa, Arabidopsis thaliana
  peptide (1)..(427): Ceres Seq. ID no. 13614864
  misc_feature (11)..(427): Pfam Name: Protein of unknown function (DUF760) Pfam Description: Protein of unknown function (DUF760)
  misc_feature (1)..(427): Homolog of NCBI NO: 18401645 NR Description: expressed protein [Arabidopsis thaliana] gb|AAF02142.1~gene_id:MEB5.2~similar to unknown protein thaliana] >gi|20466177|gb|AAM20406.1| unknown protein
  misc_feature (1)..(427): Homolog of NCBI NO: 17064820 NR Description: Unknown protein [Arabidopsis thaliana]
  misc_feature (1)..(427): Homolog of NCBI NO: 15221185 NR Description: expressed protein [Arabidopsis thaliana] T1N15.6 [Arabidopsis thaliana] >gi|18086465|gb|AAL57686.1| [Arabidopsis thaliana] >gi|24030356|gb|AAN41342.1| unknown
  misc_feature (171)..(427): Homolog of NCBI NO: 13561930 NR Description: unknown [Brassica napus]
  misc_feature (53)..(427): Homolog of NCBI NO: 28301943 NR Description: unknown protein [Oryza sativa (japonica
  misc_feature (65)..(425): Homolog of NCBI NO: 18398302 NR Description: expressed protein [Arabidopsis thaliana]
  misc_feature (66)..(425): Homolog of NCBI NO: 32489097 NR Description: OSJNBa0093F12.3 [Oryza sativa (japonica
  misc_feature (74)..(277): Homolog of NCBI NO: 15239021 NR Description: expressed protein [Arabidopsis thaliana] gb|AAF02142.1~gene_id:K15N18.6~strong similarity to unknown [Arabidopsis thaliana] >gi|28392972|gb|AAO41921.1| unknown
  misc_feature (333)..(422): Homolog of NCBI NO: 15239021 NR Description: expressed protein [Arabidopsis thaliana] gb|AAF02142.1~gene_id:K15N18.6~strong similarity to unknown [Arabidopsis thaliana] >gi|28392972|gb|AAO41921.1| unknown
  misc_feature (77)..(358): Homolog of NCBI NO: 18397912 NR Description: expressed protein [Arabidopsis thaliana] unknown protein [Arabidopsis thaliana] unknown protein [Arabidopsis thaliana]
MDALTSSLVRSPIVPSRTSDNGSGSMFLTASGPGFTRSGSSRLQLRLRVCPKSLQNASARSSRSLQSLTTTAKTRRSFVVRASSASNDASSGSSPKPIAPLQLQSPAGQFLSQILVSHPHLVPAAVEQQLEQLQTDRDSQGQNKDSASVPGTDIVLYRRIAELKENERRRTLEEILYALVVQKFMEANVSLVPSVSPSSDPSGRVDTWPTKVEKLERLHSPEMYEMIHNHLALILGSRMGDLNSVAQISKLRVGQVYAASVMYGYFLKRVDQRFQLEKTMKILPGGSDESKTSVEQAEGTATYQAAVSSHPEVGAFAGGVSAKGFGSEIKPSRLRSYVMSFDAETLQRYATIRSREAVGIIEKHTEALFGKPEIVITPEGTVDSSKDEQIKISFGGMKRLVLEAVTFGSFLWDVESHVDARYHFVLN

SEQ ID NO: 104362 - protein, 402 aa, Arabidopsis thaliana
  peptide (1)..(402): Ceres Seq. ID no. 13614865
  misc_feature (1)..(402): Pfam Name: Protein of unknown function (DUF760) Pfam Description: Protein of unknown function (DUF760)
  misc_feature (1)..(402): Homolog of NCBI NO: 18401645 NR Description: expressed protein [Arabidopsis thaliana] gb|AAF02142.1~gene_id:MEB5.2~similar to unknown protein thaliana] >gi|20466177|gb|AAM20406.1| unknown protein
  misc_feature (1)..(402): Homolog of NCBI NO: 17064820 NR Description: Unknown protein [Arabidopsis thaliana]
  misc_feature (1)..(402): Homolog of NCBI NO: 15221185 NR Description: expressed protein [Arabidopsis thaliana] T1N15.6 [Arabidopsis thaliana] >gi|18086465|gb|AAL57686.1| [Arabidopsis thaliana] >gi|24030356|gb|AAN41342.1| unknown
  misc_feature (146)..(402): Homolog of NCBI NO: 13561930 NR Description: unknown [Brassica napus]
  misc_feature (28)..(402): Homolog of NCBI NO: 28301943 NR Description: unknown protein [Oryza sativa (japonica
  misc_feature (40)..(400): Homolog of NCBI NO: 18398302 NR Description: expressed protein [Arabidopsis thaliana]
  misc_feature (41)..(400): Homolog of NCBI NO: 32489097 NR Description: OSJNBa0093F12.3 [Oryza sativa (japonica
  misc_feature (49)..(252): Homolog of NCBI NO: 15239021 NR Description: expressed protein [Arabidopsis thaliana] gb|AAF02142.1~gene_id:K15N18.6~strong similarity to unknown [Arabidopsis thaliana] >gi|28392972|gb|AAO41921.1| unknown
  misc_feature (308)..(397): Homolog of NCBI NO: 15239021 NR Description: expressed protein [Arabidopsis thaliana] gb|AAF02142.1~gene_id:K15N18.6~strong similarity to unknown [Arabidopsis thaliana] >gi|28392972|gb|AAO41921.1| unknown
  misc_feature (52)..(333): Homolog of NCBI NO: 18397912 NR Description: expressed protein [Arabidopsis thaliana] unknown protein [Arabidopsis thaliana] unknown protein [Arabidopsis thaliana]
MFLTASGPGFTRSGSSRLQLRLRVCPKSLQNASARSSRSLQSLTTTAKTRRSFVVRASSASNDASSGSSPKPIAPLQLQSPAGQFLSQILVSHPHLVPAAVEQQLEQLQTDRDSQGQNKDSASVPGTDIVLYRRIAELKENERRRTLEEILYALVVQKFMEANVSLVPSVSPSSDPSGRVDTWPTKVEKLERLHSPEMYEMIHNHLALILGSRMGDLNSVAQISKLRVGQVYAASVMYGYFLKRVDQRFQLEKTMKILPGGSDESKTSVEQAEGTATYQAAVSSHPEVGAFAGGVSAKGFGSEIKPSRLRSYVMSFDAETLQRYATIRSREAVGIIEKHTEALFGKPEIVITPEGTVDSSKDEQIKISFGGMKRLVLEAVTFGSFLWDVESHVDARYHFVLN

SEQ ID NO: 104363 - protein, 243 aa, Arabidopsis thaliana; identical to SEQ ID NO: 39464
  peptide (1)..(243): Ceres Seq. ID no. 13614866
  misc_feature (1)..(243): Pfam Name: Protein of unknown function (DUF760) Pfam Description: Protein of unknown function (DUF760)
  misc_feature (1)..(243): Homolog of NCBI NO: 18401645 NR Description: expressed protein [Arabidopsis thaliana] gb|AAF02142.1~gene_id:MEB5.2~similar to unknown protein thaliana] >gi|20466177|gb|AAM20406.1| unknown protein
  misc_feature (1)..(243): Homolog of NCBI NO: 17064820 NR Description: Unknown protein [Arabidopsis thaliana]
  misc_feature (1)..(243): Homolog of NCBI NO: 15221185 NR Description: expressed protein [Arabidopsis thaliana] T1N15.6 [Arabidopsis thaliana] >gi|18086465|gb|AAL57686.1| [Arabidopsis thaliana] >gi|24030356|gb|AAN41342.1| unknown
  misc_feature (1)..(243): Homolog of NCBI NO: 13561930 NR Description: unknown [Brassica napus]
  misc_feature (1)..(243): Homolog of NCBI NO: 28301943 NR Description: unknown protein [Oryza sativa (japonica
  misc_feature (1)..(241): Homolog of NCBI NO: 18398302 NR Description: expressed protein [Arabidopsis thaliana]
  misc_feature (1)..(241): Homolog of NCBI NO: 32489097 NR Description: OSJNBa0093F12.3 [Oryza sativa (japonica
  misc_feature (1)..(93): Homolog of NCBI NO: 15239021 NR Description: expressed protein [Arabidopsis thaliana] gb|AAF02142.1~gene_id:K15N18.6~strong similarity to unknown [Arabidopsis thaliana] >gi|28392972|gb|AAO41921.1| unknown
  misc_feature (149)..(238): Homolog of NCBI NO: 15239021 NR Description: expressed protein [Arabidopsis thaliana] gb|AAF02142.1~gene_id:K15N18.6~strong similarity to unknown [Arabidopsis thaliana] >gi|28392972|gb|AAO41921.1| unknown
  misc_feature (1)..(174): Homolog of NCBI NO: 18397912 NR Description: expressed protein [Arabidopsis thaliana] unknown protein [Arabidopsis thaliana] unknown protein [Arabidopsis thaliana]

SEQ ID NO: 104364 - DNA, 1310 bp, Arabidopsis thaliana
  misc_feature (1)..(1310): Ceres Seq. ID no. 13614867
  misc_feature: MA Experiment ID: 108488 Result: Down-regulated in Transcription
  misc_feature: MA Experiment ID: 108501 Result: Up-regulated in Transcription
  misc_feature: MA Experiment 108501 PARAMETER Experiment Name: At_ap2_floral_buds_cDNA_P Parameter: Plant Line Value: ap2 (Ler.)
  misc_feature: MA Experiment 108501 PARAMETER Experiment Name: At_ap2_floral_buds_cDNA_P Parameter: Tissue Value: Closed Flower
  misc_feature: MA Experiment ID: 20000173 Result: Down-regulated in Transcription
  misc_feature: MA Experiment 20000173 PARAMETER Experiment Name: At_42deg_Heat_P Parameter: Age (day) Value: 14
  misc_feature: MA Experiment 20000173 PARAMETER Experiment Name: At_42deg_Heat_P Parameter: Organism Value: A. thaliana
  misc_feature: MA Experiment 20000173 PARAMETER Experiment Name: At_42deg_Heat_P Parameter: Plant Line Value: WS
  misc_feature: MA Experiment 20000173 PARAMETER Experiment Name: At_42deg_Heat_P Parameter: Temperature (deg C) Value: 42 vs. 22
  misc_feature: MA Experiment 20000173 PARAMETER Experiment Name: At_42deg_Heat_P Parameter: Timepoint (hr) Value: 6
  misc_feature: MA Experiment 20000173 PARAMETER Experiment Name: At_42deg_Heat_P Parameter: Tissue Value: Aerial
  misc_feature: MA Experiment ID: 20000227 Result: Up-regulated in Transcription
  misc_feature: MA Experiment 20000227 PARAMETER Experiment Name: At_Root-Tips-vs-Tops_P Parameter: Tissue Value: Root Tips vs. Root Tops
  misc_feature: MA Experiment ID: 20000234 Result: Up-regulated in Transcription
  misc_feature: MA Experiment 20000234 PARAMETER Experiment Name: At_Siliques_P Parameter: Age (day) Value: 21
  misc_feature: MA Experiment 20000234 PARAMETER Experiment Name: At_Siliques_P Parameter: Organism Value: A. thaliana
  misc_feature: MA Experiment 20000234 PARAMETER Experiment Name: At_Siliques_P Parameter: Plant Line Value: WS
  misc_feature: MA Experiment 20000234 PARAMETER Experiment Name: At_Siliques_P Parameter: Tissue Value: Less Than 5mm Siliques vs. Whole Plant
  misc_feature: MA Experiment ID: 20000235 Result: Up-regulated in Transcription
  misc_feature: MA Experiment 20000235 PARAMETER Experiment Name: At_Siliques_P Parameter: Age (day) Value: 21
  misc_feature: MA Experiment 20000235 PARAMETER Experiment Name: At_Siliques_P Parameter: Organism Value: A. thaliana
  misc_feature: MA Experiment 20000235 PARAMETER Experiment Name: At_Siliques_P Parameter: Plant Line Value: WS
  misc_feature: MA Experiment 20000235 PARAMETER Experiment Name: At_Siliques_P Parameter: Tissue Value: 5-10mm Siliques vs. Whole Plant
  misc_feature: MA Experiment ID: 20000264 Result: Up-regulated in Transcription
  misc_feature: MA Experiment 20000264 PARAMETER Experiment Name: At_Open_Flower_P Parameter: Age (day) Value: 21
  misc_feature: MA Experiment 20000264 PARAMETER Experiment Name: At_Open_Flower_P Parameter: Plant Line Value: WS
  misc_feature: MA Experiment 20000264 PARAMETER Experiment Name: At_Open_Flower_P Parameter: Tissue Value: Open Flower vs. Whole Plant
  misc_feature: MA Experiment ID: 20000265 Result: Up-regulated in Transcription
  misc_feature: MA Experiment 20000265 PARAMETER Experiment Name: At_Open_Flower_P Parameter: Age (day) Value: 21
  misc_feature: MA Experiment 20000265 PARAMETER Experiment Name: At_Open_Flower_P Parameter: Plant Line Value: WS
  misc_feature: MA Experiment 20000265 PARAMETER Experiment Name: At_Open_Flower_P Parameter: Tissue Value: Closed Flower vs. Whole Plant
  misc_feature: MA Experiment ID: 20000286 Result: Up-regulated in Transcription
  misc_feature: MA Experiment 20000286 PARAMETER Experiment Name: At_Open_Flower_P Parameter: Age (day) Value: 21
  misc_feature: MA Experiment 20000286 PARAMETER Experiment Name: At_Open_Flower_P Parameter: Plant Line Value: WS
  misc_feature: MA Experiment 20000286 PARAMETER Experiment Name: At_Open_Flower_P Parameter: Tissue Value: Half Open vs. Whole Plant
  misc_feature: MA Experiment ID: 20000436 Result: Up-regulated in Transcription
  misc_feature: MA Experiment 20000436 PARAMETER Experiment Name: At_Drought_P Parameter: Age (day) Value: 7
  misc_feature: MA Experiment 20000436 PARAMETER Experiment Name: At_Drought_P Parameter: Organism Value: A. thaliana
  misc_feature: MA Experiment 20000436 PARAMETER Experiment Name: At_Drought_P Parameter: Plant Line Value: WS
  misc_feature: MA Experiment 20000436 PARAMETER Experiment Name: At_Drought_P Parameter: Timepoint (hr) Value: 12
  misc_feature: MA Experiment 20000436 PARAMETER Experiment Name: At_Drought_P Parameter: Tissue Value: Whole Plant
  misc_feature: MA Experiment 20000436 PARAMETER Experiment Name: At_Drought_P Parameter: Treatment Value: Drought vs. No Drought
  misc_feature: MA Experiment ID: 20000437 Result: Up-regulated in Transcription
  misc_feature: MA Experiment 20000437 PARAMETER Experiment Name: At_Drought_P Parameter: Age (day) Value: 8
  misc_feature: MA Experiment 20000437 PARAMETER Experiment Name: At_Drought_P Parameter: Organism Value: A. thaliana
  misc_feature: MA Experiment 20000437 PARAMETER Experiment Name: At_Drought_P Parameter: Plant Line Value: WS
  misc_feature: MA Experiment 20000437 PARAMETER Experiment Name: At_Drought_P Parameter: Timepoint (hr) Value: 24
  misc_feature: MA Experiment 20000437 PARAMETER Experiment Name: At_Drought_P Parameter: Tissue Value: Whole Plant
  misc_feature: MA Experiment 20000437 PARAMETER Experiment Name: At_Drought_P Parameter: Treatment Value: Drought vs. No Drought
  misc_feature: MA Experiment ID: 20000453 Result: Up-regulated in Transcription
  misc_feature: MA Experiment 20000453 PARAMETER Experiment Name: At_100uM_ABA_P Parameter: Age (day) Value: 15
  misc_feature: MA Experiment 20000453 PARAMETER Experiment Name: At_100uM_ABA_P Parameter: Organism Value: A. thaliana
  misc_feature: MA Experiment 20000453 PARAMETER Experiment Name: At_100uM_ABA_P Parameter: Plant Line Value: WS
  misc_feature: MA Experiment 20000453 PARAMETER Experiment Name: At_100uM_ABA_P Parameter: Timepoint (hr) Value: 24
  misc_feature: MA Experiment 20000453 PARAMETER Experiment Name: At_100uM_ABA_P Parameter: Tissue Value: Aerial
  misc_feature: MA Experiment 20000453 PARAMETER Experiment Name: At_100uM_ABA_P Parameter: Treatment Value: 100uM ABA vs. No Treatment
  misc_feature: MA Experiment ID: 20000794 Result: Up-regulated in Transcription
  misc_feature: MA Experiment 20000794 PARAMETER Experiment Name: At_Petals_P Parameter: Age (day) Value: 23-25 days
  misc_feature: MA Experiment 20000794 PARAMETER Experiment Name: At_Petals_P Parameter: Plant Line Value: WS
  misc_feature: MA Experiment 20000794 PARAMETER Experiment Name: At_Petals_P Parameter: Tissue Value: Petals vs. Whole plant
  misc_feature: MA Experiment ID: 20001559 Result: Up-regulated in Transcription
  misc_feature: MA Experiment 20001559 PARAMETER Experiment Name: At_Drought_Soil_Dry_P Parameter: Age (day) Value: 28
  misc_feature: MA Experiment 20001559 PARAMETER Experiment Name: At_Drought_Soil_Dry_P Parameter: Organism Value: A. thaliana
  misc_feature: MA Experiment 20001559 PARAMETER Experiment Name: At_Drought_Soil_Dry_P Parameter: Plant Line Value: WS
  misc_feature: MA Experiment 20001559 PARAMETER Experiment Name: At_Drought_Soil_Dry_P Parameter: Post Timepoint (hr) Value: 29
  misc_feature: MA Experiment 20001559 PARAMETER Experiment Name: At_Drought_Soil_Dry_P Parameter: Post-Treatment Value: Re-Water vs. No Drought
  misc_feature: MA Experiment 20001559 PARAMETER Experiment Name: At_Drought_Soil_Dry_P Parameter: Timepoint (day) Value: 14
  misc_feature: MA Experiment 20001559 PARAMETER Experiment Name: At_Drought_Soil_Dry_P Parameter: Treatment Value: Drought vs. No Drought
  misc_feature: MA Experiment ID: 20001560 Result: Up-regulated in Transcription
  misc_feature: MA Experiment 20001560 PARAMETER Experiment Name: At_Drought_Soil_Dry_P Parameter: Age (day) Value: 28
  misc_feature: MA Experiment 20001560 PARAMETER Experiment Name: At_Drought_Soil_Dry_P Parameter: Organism Value: A. thaliana
  misc_feature: MA Experiment 20001560 PARAMETER Experiment Name: At_Drought_Soil_Dry_P Parameter: Plant Line Value: WS
  misc_feature: MA Experiment 20001560 PARAMETER Experiment Name: At_Drought_Soil_Dry_P Parameter: Post Timepoint (hr) Value: None
  misc_feature: MA Experiment 20001560 PARAMETER Experiment Name: At_Drought_Soil_Dry_P Parameter: Post-Treatment Value: None
  misc_feature: MA Experiment 20001560 PARAMETER Experiment Name: At_Drought_Soil_Dry_P Parameter: Timepoint (day) Value: 14
  misc_feature: MA Experiment 20001560 PARAMETER Experiment Name: At_Drought_Soil_Dry_P Parameter: Treatment Value: Drought vs. No Drought
  misc_feature: MA Experiment ID: 20001904 Result: Up-regulated in Transcription
  misc_feature: MA Experiment 20001904 PARAMETER Experiment Name: At_Drought_Reproduction_P Parameter: Age (day) Value: 37
  misc_feature: MA Experiment 20001904 PARAMETER Experiment Name: At_Drought_Reproduction_P Parameter: Organism Value: A. thaliana
  misc_feature: MA Experiment 20001904 PARAMETER Experiment Name: At_Drought_Reproduction_P Parameter: Plant Line Value: WS
  misc_feature: MA Experiment 20001904 PARAMETER Experiment Name: At_Drought_Reproduction_P Parameter: Timepoint (day) Value: 7
  misc_feature: MA Experiment 20001904 PARAMETER Experiment Name: At_Drought_Reproduction_P Parameter: Tissue Value: Rosettes
  misc_feature: MA Experiment 20001904 PARAMETER Experiment Name: At_Drought_Reproduction_P Parameter: Treatment Value: Drought vs. No Drought
  misc_feature: MA Experiment ID: 20001905 Result: Up-regulated in Transcription
  misc_feature: MA Experiment 20001905 PARAMETER Experiment Name: At_Drought_Reproduction_P Parameter: Age (day) Value: 40
  misc_feature: MA Experiment 20001905 PARAMETER Experiment Name: At_Drought_Reproduction_P Parameter: Organism Value: A. thaliana
  misc_feature: MA Experiment 20001905 PARAMETER Experiment Name: At_Drought_Reproduction_P Parameter: Plant Line Value: WS
  misc_feature: MA Experiment 20001905 PARAMETER Experiment Name: At_Drought_Reproduction_P Parameter: Timepoint (day) Value: 10
  misc_feature: MA Experiment 20001905 PARAMETER Experiment Name: At_Drought_Reproduction_P Parameter: Tissue Value: Rosettes
  misc_feature: MA Experiment 20001905 PARAMETER Experiment Name: At_Drought_Reproduction_P Parameter: Treatment Value: Drought vs. No Drought
  misc_feature: MA Experiment ID: 20001906 Result: Up-regulated in Transcription
  misc_feature: MA Experiment 20001906 PARAMETER Experiment Name: At_Drought_Reproduction_P Parameter: Age (day) Value: 35
  misc_feature: MA Experiment 20001906 PARAMETER Experiment Name: At_Drought_Reproduction_P Parameter: Organism Value: A. thaliana
  misc_feature: MA Experiment 20001906 PARAMETER Experiment Name: At_Drought_Reproduction_P Parameter: Plant Line Value: WS
  misc_feature: MA Experiment 20001906 PARAMETER Experiment Name: At_Drought_Reproduction_P Parameter: Timepoint (day) Value: 5
  misc_feature: MA Experiment 20001906 PARAMETER Experiment Name: At_Drought_Reproduction_P Parameter: Tissue Value: Siliques
  misc_feature: MA Experiment 20001906 PARAMETER Experiment Name: At_Drought_Reproduction_P Parameter: Treatment Value: Drought vs. No Drought
  misc_feature: MA Experiment ID: 20001908 Result: Up-regulated in Transcription
  misc_feature: MA Experiment 20001908 PARAMETER Experiment Name: At_Drought_Reproduction_P Parameter: Age (day) Value: 40
  misc_feature: MA Experiment 20001908 PARAMETER Experiment Name: At_Drought_Reproduction_P Parameter: Organism Value: A. thaliana
  misc_feature: MA Experiment 20001908 PARAMETER Experiment Name: At_Drought_Reproduction_P Parameter: Plant Line Value: WS
  misc_feature: MA Experiment 20001908 PARAMETER Experiment Name: At_Drought_Reproduction_P Parameter: Timepoint (day) Value: 10
  misc_feature: MA Experiment 20001908 PARAMETER Experiment Name: At_Drought_Reproduction_P Parameter: Tissue Value: Siliques
  misc_feature: MA Experiment 20001908 PARAMETER Experiment Name: At_Drought_Reproduction_P Parameter: Treatment Value: Drought vs. No Drought
ctctataaacacacactctcaggagagaagttgtattgatcgtcttctctttccctaaacacactgattattttctctccgacgccgccatgtctctgctctcagatctcgttaacctcaacctcaccgatgccaccgggaaaatcatcgccgaatacatatggatcggtggatctggaatggatatcagaagcaaagccaggacactaccaggaccagtgactgatccatcaaagcttcccaagtggaactacgacggatccagcaccggtcaggctgctggagaagacagtgaagtcattctataccctcaggcaatattcaaggatcccttcaggaaaggcaacaacatcctggtgatgtgtgatgcttacacaccagctggtgatcctattccaaccaacaagaggcacaacgctgctaagatcttcagccaccccgacgttgccaaggaggagccttggtatgggattgagcaagaatacactttgatgcaaaaggatgtgaactggccaattggttggcctgttggtggctaccctggccctcagggaccttactactgtggtgtgggagctgacaaagccattggtcgtgacattgtggatgctcactacaaggcctgtctttacgccggtattggtatttctggtatcaatggagaagtcatgccaggccagtgggagttccaagtcggccctgttgagggtattagttctggtgatcaagtctgggttgctcgataccttctcgagaggatcactgagatctctggtgtaattgtcagcttcgacccgaaaccagtcccgggtgactggaatggagctggagctcactgcaactacagcactaagacaatgagaaacgatggaggattagaagtgatcaagaaagcgatagggaagcttcagctgaaacacaaagaacacattgctgcttacggtgaaggaaacgagcgtcgtctcactggaaagcacgaaaccgcagacatcaacacattctcttggggagtcgcgaaccgtggagcgtcagtgagagtgggacgtgacacagagaaggaaggtaaagggtacttcgaagacagaaggccagcttctaacatggatccttacgttgtcacctccatgatcgctgagacgaccatactcggttgatgacacatttcatgatttgatttctctccaatttggttttttttttttcccttttgattgcacttttcgataataaaaaaataattcttattatgggcgtattgttgtgacattttgtgttttgtttcgaataattaaataagcgcttcttaaggt

SEQ ID NO: 104365 - protein, 354 aa, Arabidopsis thaliana
  peptide (1)..(354): Ceres Seq. ID no. 13614868
  misc_feature (103)..(354): Pfam Name: Glutamine synthetase, catalytic domain Pfam Description: Glutamine synthetase, catalytic domain
  misc_feature (1)..(354): Homolog of NCBI NO: 15229530 NR Description: glutamine synthetase -related [Arabidopsis >gi|11386845|sp|Q9LVI8|GLN1_ARATH Glutamine synthetase, cytosolic
  misc_feature (1)..(354): Homolog of NCBI NO: 28393681 NR Description: putative glutamine synthetase [Arabidopsis
  misc_feature (2)..(354): Homolog of NCBI NO: 99698 NR Description: glutamate-ammonia ligase (EC 6.3.1.2), cytosolic
  misc_feature (2)..(354): Homolog of NCBI NO: 228456 NR Description: Gln synthetase
  misc_feature (1)..(354): Homolog of NCBI NO: 1076473 NR Description: Gln 1.1 protein - radish
  misc_feature (1)..(353): Homolog of NCBI NO: 417060 NR Description: Glutamine synthetase nodule isozyme ligase) (GS) >gi|170637|gb|AAA34239.1| glutamine synthetase
  misc_feature (1)..(353): Homolog of NCBI NO: 1084350 NR Description: glutamate-ammonia ligase (EC 6.3.1.2) - rape
  misc_feature (1)..(353): Homolog of NCBI NO: 15240288 NR Description: glutamate--ammonia ligase [Arabidopsis thaliana] glutamine synthetase [Arabidopsis thaliana] AT5g37600/K12B20_50 [Arabidopsis thaliana]
  misc_feature (1)..(353): Homolog of NCBI NO: 121349 NR Description: Glutamine synthetase shoot isozyme
  misc_feature (1)..(353): Homolog of NCBI NO: 1835154 NR Description: glutamine synthetase [Medicago truncatula]
MSLLSDLVNLNLTDATGKIIAEYIWIGGSGMDIRSKARTLPGPVTDPSKLPKWNYDGSSTGQAAGEDSEVILYPQAIFKDPFRKGNNILVMCDAYTPAGDPIPTNKRHNAAKIFSHPDVAKEEPWYGIEQEYTLMQKDVNWPIGWPVGGYPGPQGPYYCGVGADKAIGRDIVDAHYKACLYAGIGISGINGEVMPGQWEFQVGPVEGISSGDQVWVARYLLERITEISGVIVSFDPKPVPGDWNGAGAHCNYSTKTMRNDGGLEVIKKAIGKLQLKHKEHIAAYGEGNERRLTGKHETADINTFSWGVANRGASVRVGRDTEKEGKGYFEDRRPASNMDPYVVTSMIAETTILG

SEQ ID NO: 104366 - protein, 324 aa, Arabidopsis thaliana
  peptide (1)..(324): Ceres Seq. ID no. 13614869
  misc_feature (73)..(324): Pfam Name: Glutamine synthetase, catalytic domain Pfam Description: Glutamine synthetase, catalytic domain
  misc_feature (1)..(324): Homolog of NCBI NO: 15229530 NR Description: glutamine synthetase -related [Arabidopsis >gi|11386845|sp|Q9LVI8|GLN1_ARATH Glutamine synthetase, cytosolic
  misc_feature (1)..(324): Homolog of NCBI NO: 28393681 NR Description: putative glutamine synthetase [Arabidopsis
  misc_feature (1)..(324): Homolog of NCBI NO: 99698 NR Description: glutamate-ammonia ligase (EC 6.3.1.2), cytosolic
  misc_feature (1)..(324): Homolog of NCBI NO: 228456 NR Description: Gln synthetase
  misc_feature (1)..(324): Homolog of NCBI NO: 1076473 NR Description: Gln 1.1 protein - radish
  misc_feature (1)..(323): Homolog of NCBI NO: 417060 NR Description: Glutamine synthetase nodule isozyme ligase) (GS) >gi|170637|gb|AAA34239.1| glutamine synthetase
  misc_feature (1)..(323): Homolog of NCBI NO: 1084350 NR Description: glutamate-ammonia ligase (EC 6.3.1.2) - rape
  misc_feature (1)..(323): Homolog of NCBI NO: 15240288 NR Description: glutamate--ammonia ligase [Arabidopsis thaliana] glutamine synthetase [Arabidopsis thaliana] AT5g37600/K12B20_50 [Arabidopsis thaliana]
  misc_feature (1)..(323): Homolog of NCBI NO: 121349 NR Description: Glutamine synthetase shoot isozyme
  misc_feature (1)..(323): Homolog of NCBI NO: 1835154 NR Description: glutamine synthetase [Medicago truncatula]
MDIRSKARTLPGPVTDPSKLPKWNYDGSSTGQAAGEDSEVILYPQAIFKDPFRKGNNILVMCDAYTPAGDPIPTNKRHNAAKIFSHPDVAKEEPWYGIEQEYTLMQKDVNWPIGWPVGGYPGPQGPYYCGVGADKAIGRDIVDAHYKACLYAGIGISGINGEVMPGQWEFQVGPVEGISSGDQVWVARYLLERITEISGVIVSFDPKPVPGDWNGAGAHCNYSTKTMRNDGGLEVIKKAIGKLQLKHKEHIAAYGEGNERRLTGKHETADINTFSWGVANRGASVRVGRDTEKEGKGYFEDRRPASNMDPYVVTSMIAETTILG

SEQ ID NO: 104367 - protein, 264 aa, Arabidopsis thaliana
  peptide (1)..(264): Ceres Seq. ID no. 13614870
  misc_feature (13)..(264): Pfam Name: Glutamine synthetase, catalytic domain Pfam Description: Glutamine synthetase, catalytic domain
  misc_feature (1)..(264): Homolog of NCBI NO: 15229530 NR Description: glutamine synthetase -related [Arabidopsis >gi|11386845|sp|Q9LVI8|GLN1_ARATH Glutamine synthetase, cytosolic
  misc_feature (1)..(264): Homolog of NCBI NO: 28393681 NR Description: putative glutamine synthetase [Arabidopsis
  misc_feature (1)..(264): Homolog of NCBI NO: 99698 NR Description: glutamate-ammonia ligase (EC 6.3.1.2), cytosolic
  misc_feature (1)..(264): Homolog of NCBI NO: 228456 NR Description: Gln synthetase
  misc_feature (1)..(264): Homolog of NCBI NO: 1076473 NR Description: Gln 1.1 protein - radish
  misc_feature (1)..(263): Homolog of NCBI NO: 417060 NR Description: Glutamine synthetase nodule isozyme ligase) (GS) >gi|170637|gb|AAA34239.1| glutamine synthetase
  misc_feature (1)..(263): Homolog of NCBI NO: 1084350 NR Description: glutamate-ammonia ligase (EC 6.3.1.2) - rape
  misc_feature (1)..(263): Homolog of NCBI NO: 15240288 NR Description: glutamate--ammonia ligase [Arabidopsis thaliana] glutamine synthetase [Arabidopsis thaliana] AT5g37600/K12B20_50 [Arabidopsis thaliana]
  misc_feature (1)..(263): Homolog of NCBI NO: 121349 NR Description: Glutamine synthetase shoot isozyme
  misc_feature (1)..(263): Homolog of NCBI NO: 1835154 NR Description: glutamine synthetase [Medicago truncatula]
MCDAYTPAGDPIPTNKRHNAAKIFSHPDVAKEEPWYGIEQEYTLMQKDVNWPIGWPVGGYPGPQGPYYCGVGADKAIGRDIVDAHYKACLYAGIGISGINGEVMPGQWEFQVGPVEGISSGDQVWVARYLLERITEISGVIVSFDPKPVPGDWNGAGAHCNYSTKTMRNDGGLEVIKKAIGKLQLKHKEHIAAYGEGNERRLTGKHETADINTFSWGVANRGASVRVGRDTEKEGKGYFEDRRPASNMDPYVVTSMIAETTILG

SEQ ID NO: 104368 - DNA, 921 bp, Arabidopsis thaliana
  misc_feature (1)..(921): Ceres Seq. ID no. 13614879
  misc_feature: MA Experiment ID: 108463 Result: Down-regulated in Transcription
  misc_feature: MA Experiment 108463 PARAMETER Experiment Name: At_Germinating_Seeds_cDNA_P Parameter: Age (day) Value: 3 vs. 0
  misc_feature: MA Experiment 108463 PARAMETER Experiment Name: At_Germinating_Seeds_cDNA_P Parameter: Tissue Value: Germinating Seeds
  misc_feature: MA Experiment ID: 108488 Result: Down-regulated in Transcription
  misc_feature: MA Experiment ID: 108576 Result: Up-regulated in Transcription
  misc_feature: MA Experiment 108576 PARAMETER Experiment Name: At_42deg_Heat_cDNA_P Parameter: Temperature (deg C) Value: 42 vs. 22
  misc_feature: MA Experiment 108576 PARAMETER Experiment Name: At_42deg_Heat_cDNA_P Parameter: Timepoint (hr) Value: 1
  misc_feature: MA Experiment 108576 PARAMETER Experiment Name: At_42deg_Heat_cDNA_P Parameter: Tissue Value: Aerial
  misc_feature: MA Experiment ID: 20000093 Result: Up-regulated in Transcription
  misc_feature: MA Experiment 20000093 PARAMETER Experiment Name: At_42deg_Heat_cDNA_P Parameter: Temperature (deg C) Value: 42 vs. 22
  misc_feature: MA Experiment 20000093 PARAMETER Experiment Name: At_42deg_Heat_cDNA_P Parameter: Timepoint (hr) Value: 0.5
  misc_feature: MA Experiment 20000093 PARAMETER Experiment Name: At_42deg_Heat_cDNA_P Parameter: Tissue Value: Aerial
  misc_feature: MA Experiment ID: 20000113 Result: Up-regulated in Transcription
  misc_feature: MA Experiment 20000113 PARAMETER Experiment Name: At_42deg_Heat_cDNA_P Parameter: Temperature (deg C) Value: 42 vs. 22
  misc_feature: MA Experiment 20000113 PARAMETER Experiment Name: At_42deg_Heat_cDNA_P Parameter: Timepoint (hr) Value: 8
  misc_feature: MA Experiment 20000113 PARAMETER Experiment Name: At_42deg_Heat_cDNA_P Parameter: Tissue Value: Aerial
  misc_feature: MA Experiment ID: 20000144 Result: Up-regulated in Transcription
  misc_feature: MA Experiment 20000144 PARAMETER Experiment Name: At_42deg_Heat_cDNA_P Parameter: Temperature (deg C) Value: 42 vs. 22
  misc_feature: MA Experiment 20000144 PARAMETER Experiment Name: At_42deg_Heat_cDNA_P Parameter: Timepoint (hr) Value: 1
  misc_feature: MA Experiment 20000144 PARAMETER Experiment Name: At_42deg_Heat_cDNA_P Parameter: Tissue Value: Aerial
aagaaatctttcagatttgcgcatatcgacaattttccgagcggccagtttacgtattttgtttgtagttaacgtgtttcaaggactttgacaatggctgaggaagcgcataaggtaacattgaatgtctatgatttaagccaaggcttggcacgccagctctcacaatcactcctgggaaaggttattgaaggtgtatggcatacaggaatagttgtctatgggaatgagtacttttttggaggagggatacaacatttaccagttggaagaactccatatggaacaccaattcgaacgatagagttgggtctatcacatgtgcctaaagatgtattcgagatgtacttggaagaaatcagtcctcgttacactgctgaatcctacaatttacttactcacaactgcaacaacttcagcaacgaggtcgctcagtttttggtgggtaaagggattcctgactacattctccagcttcctaatgatgttctaaacagtcccatgggtggtcttataatgcctatgttgcaaggcctcgaaacaactctaaaggctggtgctgttcctcaagttccacagtttaggccacagccacaaccttttggagcttttagtaaagatgatggcccacaaattgtgatagctcctaagctcgaggcagcagaaacctcaactgcaactgagaaagtgccacctgttattcaaccatcagctagtaaagagaaggtcaaggacgacccgttgggtgatgctagggccaagattcaggaagagattacaagcgaatttgcagctctaatggcacaaggcacattacgagcaagtgaagcagctgctatggcgacaaaaagagtcatgcaaaagtacggacatctcaatgtaaacgcttagtgcaataacagagagatgaaacattttatt

SEQ ID NO: 104369 - protein, 265 aa, Arabidopsis thaliana; identical to SEQ ID NO: 38015
  peptide (1)..(265): Ceres Seq. ID no. 13614880
  misc_feature (6)..(129): Pfam Name: Eukaryotic protein of unknown function (DUF862) Pfam Description: Eukaryotic protein of unknown function (DUF862)
  misc_feature (1)..(265): Homolog of NCBI NO: 15231383 NR Description: expressed protein [Arabidopsis thaliana] unknown protein [Arabidopsis thaliana] unknown protein [Arabidopsis thaliana]
  misc_feature (1)..(254): Homolog of NCBI NO: 37535296 NR Description: unknown protein [Oryza sativa (japonica
  misc_feature (5)..(151): Homolog of NCBI NO: 28277916 NR Description: Similar to DNA segment, Chr 15, Wayne State
  misc_feature (7)..(169): Homolog of NCBI NO: 29246854 NR Description: GLP_191_9337_10773 [Giardia lamblia ATCC 50803]
  misc_feature (8)..(157): Homolog of NCBI NO: 37589651 NR Description: Unknown (protein for MGC:73066) [Danio rerio]
  misc_feature (6)..(156): Homolog of NCBI NO: 14779199 NR Description: similar to DNA segment, Chr 15, Wayne State
  misc_feature (1)..(149): Homolog of NCBI NO: 34867307 NR Description: similar to D15Wsu75e protein [Rattus norvegicus]
  misc_feature (6)..(149): Homolog of NCBI NO: 20162548 NR Description: D15Wsu75e protein [Mus musculus] unnamed protein product [Mus musculus]
  misc_feature (8)..(175): Homolog of NCBI NO: 40738408 NR Description: hypothetical protein AN6915.2 [Aspergillus
  misc_feature (8)..(155): Homolog of NCBI NO: 23508869 NR Description: hypothetical protein [Plasmodium falciparum 3D7]

SEQ ID NO: 104370 - protein, 182 aa, Arabidopsis thaliana; identical to SEQ ID NO: 38016
  peptide (1)..(182): Ceres Seq. ID no. 13614881
  misc_feature (1)..(182): Homolog of NCBI NO: 15231383 NR Description: expressed protein [Arabidopsis thaliana] unknown protein [Arabidopsis thaliana] unknown protein [Arabidopsis thaliana]
  misc_feature (1)..(171): Homolog of NCBI NO: 37535296 NR Description: unknown protein [Oryza sativa (japonica
  misc_feature (1)..(68): Homolog of NCBI NO: 28277916 NR Description: Similar to DNA segment, Chr 15, Wayne State
  misc_feature (1)..(86): Homolog of NCBI NO: 29246854 NR Description: GLP_191_9337_10773 [Giardia lamblia ATCC 50803]
  misc_feature (1)..(74): Homolog of NCBI NO: 37589651 NR Description: Unknown (protein for MGC:73066) [Danio rerio]
  misc_feature (1)..(73): Homolog of NCBI NO: 14779199 NR Description: similar to DNA segment, Chr 15, Wayne State
  misc_feature (1)..(66): Homolog of NCBI NO: 34867307 NR Description: similar to D15Wsu75e protein [Rattus norvegicus]
  misc_feature (1)..(66): Homolog of NCBI NO: 20162548 NR Description: D15Wsu75e protein [Mus musculus] unnamed protein product [Mus musculus]
  misc_feature (1)..(92): Homolog of NCBI NO: 40738408 NR Description: hypothetical protein AN6915.2 [Aspergillus
  misc_feature (1)..(72): Homolog of NCBI NO: 23508869 NR Description: hypothetical protein [Plasmodium falciparum 3D7]

SEQ ID NO: 104371 - DNA, 1445 bp, Arabidopsis thaliana
  misc_feature (1)..(1445): Ceres Seq. ID no. 13614890
  misc_feature: MA Experiment ID: 20000227 Result: Down-regulated in Transcription
  misc_feature: MA Experiment 20000227 PARAMETER Experiment Name: At_Root-Tips-vs-Tops_P Parameter: Tissue Value: Root Tips vs. Root Tops
  misc_feature: MA Experiment ID: 20000234 Result: Down-regulated in Transcription
  misc_feature: MA Experiment 20000234 PARAMETER Experiment Name: At_Siliques_P Parameter: Age (day) Value: 21
  misc_feature: MA Experiment 20000234 PARAMETER Experiment Name: At_Siliques_P Parameter: Organism Value: A. thaliana
  misc_feature: MA Experiment 20000234 PARAMETER Experiment Name: At_Siliques_P Parameter: Plant Line Value: WS
  misc_feature: MA Experiment 20000234 PARAMETER Experiment Name: At_Siliques_P Parameter: Tissue Value: Less Than 5mm Siliques vs. Whole Plant
  misc_feature: MA Experiment ID: 20000264 Result: Down-regulated in Transcription
  misc_feature: MA Experiment 20000264 PARAMETER Experiment Name: At_Open_Flower_P Parameter: Age (day) Value: 21
  misc_feature: MA Experiment 20000264 PARAMETER Experiment Name: At_Open_Flower_P Parameter: Plant Line Value: WS
  misc_feature: MA Experiment 20000264 PARAMETER Experiment Name: At_Open_Flower_P Parameter: Tissue Value: Open Flower vs. Whole Plant
  misc_feature: MA Experiment ID: 20000286 Result: Down-regulated in Transcription
  misc_feature: MA Experiment 20000286 PARAMETER Experiment Name: At_Open_Flower_P Parameter: Age (day) Value: 21
  misc_feature: MA Experiment 20000286 PARAMETER Experiment Name: At_Open_Flower_P Parameter: Plant Line Value: WS
  misc_feature: MA Experiment 20000286 PARAMETER Experiment Name: At_Open_Flower_P Parameter: Tissue Value: Half Open vs. Whole Plant
  misc_feature: MA Experiment ID: 20000495 Result: Down-regulated in Transcription
  misc_feature: MA Experiment 20000495 PARAMETER Experiment Name: At_Guard_Cells_P Parameter: Harvest Date Value: 8/2/2002
  misc_feature: MA Experiment 20000495 PARAMETER Experiment Name: At_Guard_Cells_P Parameter: Organism Value: A. thaliana
  misc_feature: MA Experiment 20000495 PARAMETER Experiment Name: At_Guard_Cells_P Parameter: Tissue Value: Guard Cells vs. Leaves
  misc_feature: MA Experiment ID: 20001557 Result: Down-regulated in Transcription
  misc_feature: MA Experiment 20001557 PARAMETER Experiment Name: At_Drought_Soil_Dry_P Parameter: Age (day) Value: 27
  misc_feature: MA Experiment 20001557 PARAMETER Experiment Name: At_Drought_Soil_Dry_P Parameter: Organism Value: A. thaliana
  misc_feature: MA Experiment 20001557 PARAMETER Experiment Name: At_Drought_Soil_Dry_P Parameter: Plant Line Value: WS
  misc_feature: MA Experiment 20001557 PARAMETER Experiment Name: At_Drought_Soil_Dry_P Parameter: Post Timepoint (hr) Value: 3
  misc_feature: MA Experiment 20001557 PARAMETER Experiment Name: At_Drought_Soil_Dry_P Parameter: Post-Treatment Value: Re-Water vs. No Drought
  misc_feature: MA Experiment 20001557 PARAMETER Experiment Name: At_Drought_Soil_Dry_P Parameter: Timepoint (day) Value: 13
  misc_feature: MA Experiment 20001557 PARAMETER Experiment Name: At_Drought_Soil_Dry_P Parameter: Treatment Value: Drought vs. No Drought
  misc_feature: MA Experiment ID: 20001558 Result: Down-regulated in Transcription
  misc_feature: MA Experiment 20001558 PARAMETER Experiment Name: At_Drought_Soil_Dry_P Parameter: Age (day) Value: 27
  misc_feature: MA Experiment 20001558 PARAMETER Experiment Name: At_Drought_Soil_Dry_P Parameter: Organism Value: A. thaliana
  misc_feature: MA Experiment 20001558 PARAMETER Experiment Name: At_Drought_Soil_Dry_P Parameter: Plant Line Value: WS
  misc_feature: MA Experiment 20001558 PARAMETER Experiment Name: At_Drought_Soil_Dry_P Parameter: Post Timepoint (hr) Value: 6
  misc_feature: MA Experiment 20001558 PARAMETER Experiment Name: At_Drought_Soil_Dry_P Parameter: Post-Treatment Value: Re-Water vs. No Drought
  misc_feature: MA Experiment 20001558 PARAMETER Experiment Name: At_Drought_Soil_Dry_P Parameter: Timepoint (day) Value: 13
  misc_feature: MA Experiment 20001558 PARAMETER Experiment Name: At_Drought_Soil_Dry_P Parameter: Treatment Value: Drought vs. No Drought
  misc_feature: MA Experiment ID: 20001560 Result: Down-regulated in Transcription
  misc_feature: MA Experiment 20001560 PARAMETER Experiment Name: At_Drought_Soil_Dry_P Parameter: Age (day) Value: 28
  misc_feature: MA Experiment 20001560 PARAMETER Experiment Name: At_Drought_Soil_Dry_P Parameter: Organism Value: A. thaliana
  misc_feature: MA Experiment 20001560 PARAMETER Experiment Name: At_Drought_Soil_Dry_P Parameter: Plant Line Value: WS
  misc_feature: MA Experiment 20001560 PARAMETER Experiment Name: At_Drought_Soil_Dry_P Parameter: Post Timepoint (hr) Value: None
  misc_feature: MA Experiment 20001560 PARAMETER Experiment Name: At_Drought_Soil_Dry_P Parameter: Post-Treatment Value: None
  misc_feature: MA Experiment 20001560 PARAMETER Experiment Name: At_Drought_Soil_Dry_P Parameter: Timepoint (day) Value: 14
  misc_feature: MA Experiment 20001560 PARAMETER Experiment Name: At_Drought_Soil_Dry_P Parameter: Treatment Value: Drought vs. No Drought
  misc_feature: MA Experiment ID: 20001905 Result: Down-regulated in Transcription
  misc_feature: MA Experiment 20001905 PARAMETER Experiment Name: At_Drought_Reproduction_P Parameter: Age (day) Value: 40
  misc_feature: MA Experiment 20001905 PARAMETER Experiment Name: At_Drought_Reproduction_P Parameter: Organism Value: A. thaliana
  misc_feature: MA Experiment 20001905 PARAMETER Experiment Name: At_Drought_Reproduction_P Parameter: Plant Line Value: WS
  misc_feature: MA Experiment 20001905 PARAMETER Experiment Name: At_Drought_Reproduction_P Parameter: Timepoint (day) Value: 10
  misc_feature: MA Experiment 20001905 PARAMETER Experiment Name: At_Drought_Reproduction_P Parameter: Tissue Value: Rosettes
  misc_feature: MA Experiment 20001905 PARAMETER Experiment Name: At_Drought_Reproduction_P Parameter: Treatment Value: Drought vs. No Drought
aatccgctaaatcattcttcttcatctctctctcattcacaattcccgaaattctctcaaatcacagatccttttagggtttttccactgtttctaggttttttttattgctcaaatctgatcaatggatagttgtctctctaatcaaacggcgcttcagtttctcccgtcgcgttccaggagacagagcggcgatggaggcggtggttttgttattccggcgaagaggaagatccagtatagttcgatggttgtggttgcggcggcgggacagagtcggtgtgagcctggaagcagtctaaacgcgccgcttgagccacgatcggcgcaggggaggtttctgagaagcgtgttgctaaacaaacggcagctatttcattacgccgccgctgatgagctaaagcaactggctgatgatagggaagctgctttagctcgtatgtctctcagctctggttccgatgaggcttctctccacagaaggatagctgaactcaaggaacgctactgtaaaactgcagtccaagacataatgtacatgttaatcttttacaaatactccgagataagagtccctcttgttccaaagctatccagatgcatctataatggaagactcgagatctggccttcaaaagactgggagttagagtcaatttacagctgcgatacccttgagatcatcaaagaacacgttagcgcagtcatcggattacgggtcaactcatgtgtgactgacaattgggcaacaacgcagatacagaaactgcatctcaggaaagtatatgctgcctcgatcttgtacggttacttcttgaaatcagcttccctaaggcaccagcttgagtgttccttatcagatattcatggaagcggatatctgaaaagtcccatctttggatgctcattcacaacgggcactgcacagatctccaacaagcagcagctgagacattacatctcagactttgatcccgagacattgcagagatgcgcaaaaccaaggacagaggaggcaaggaatctgatagagaagcaaagtttggctctttttggcacggaagagagtgatgagaccatagtgacatcgttttcgagtctgaagcggttggttctcgaggctgtggcgtttgggacattcctgtgggacacggaattgtatgtagatggtgcatataagctgaaggagaatgggaatgcagaagaacaagaaggaaagaaaagcatatgatgaacaagtctggttagaagaaaagcttcatgatcttctggtagtgtatatatagagaaatgtttctgccgaatctctcaggcagttgttcagttcaatgtatagatcttgcttagaaatattttgatttctgaataagaatgtggtgtggttataaggaataagagatactgtagttgggttcaattttatgttatgtgttaagtttccttgt

SEQ ID NO: 104372 - protein, 368 aa, Arabidopsis thaliana; identical to SEQ ID NO: 23835
  peptide (1)..(368): Ceres Seq. ID no. 13614891
  misc_feature (11)..(356): Pfam Name: Protein of unknown function (DUF760) Pfam Description: Protein of unknown function (DUF760)
  misc_feature (1)..(368): Homolog of NCBI NO: 18397912 NR Description: expressed protein [Arabidopsis thaliana] unknown protein [Arabidopsis thaliana] unknown protein [Arabidopsis thaliana]
  misc_feature (1)..(250): Homolog of NCBI NO: 15239021 NR Description: expressed protein [Arabidopsis thaliana] gb|AAF02142.1~gene_id:K15N18.6~strong similarity to unknown [Arabidopsis thaliana] >gi|28392972|gb|AAO41921.1| unknown
  misc_feature (273)..(362): Homolog of NCBI NO: 15239021 NR Description: expressed protein [Arabidopsis thaliana] gb|AAF02142.1~gene_id:K15N18.6~strong similarity to unknown [Arabidopsis thaliana] >gi|28392972|gb|AAO41921.1| unknown
  misc_feature (36)..(249): Homolog of NCBI NO: 15221185 NR Description: expressed protein [Arabidopsis thaliana] T1N15.6 [Arabidopsis thaliana] >gi|18086465|gb|AAL57686.1| [Arabidopsis thaliana] >gi|24030356|gb|AAN41342.1| unknown
  misc_feature (259)..(351): Homolog of NCBI NO: 15221185 NR Description: expressed protein [Arabidopsis thaliana] T1N15.6 [Arabidopsis thaliana] >gi|18086465|gb|AAL57686.1| [Arabidopsis thaliana] >gi|24030356|gb|AAN41342.1| unknown
  misc_feature (55)..(247): Homolog of NCBI NO: 28301943 NR Description: unknown protein [Oryza sativa (japonica
  misc_feature (261)..(356): Homolog of NCBI NO: 28301943 NR Description: unknown protein [Oryza sativa (japonica
  misc_feature (43)..(247): Homolog of NCBI NO: 18398302 NR Description: expressed protein [Arabidopsis thaliana]
  misc_feature (270)..(351): Homolog of NCBI NO: 18398302 NR Description: expressed protein [Arabidopsis thaliana]
  misc_feature (133)..(249): Homolog of NCBI NO: 13561930 NR Description: unknown [Brassica napus]

SEQ ID NO: 104373 - protein, 327 aa, Arabidopsis thaliana; identical to SEQ ID NO: 23836
  peptide (1)..(327): Ceres Seq. ID no. 13614892
  misc_feature (1)..(315): Pfam Name: Protein of unknown function (DUF760) Pfam Description: Protein of unknown function (DUF760)
  misc_feature (1)..(327): Homolog of NCBI NO: 18397912 NR Description: expressed protein [Arabidopsis thaliana] unknown protein [Arabidopsis thaliana] unknown protein [Arabidopsis thaliana]
  misc_feature (1)..(209): Homolog of NCBI NO: 15239021 NR Description: expressed protein [Arabidopsis thaliana] gb|AAF02142.1~gene_id:K15N18.6~strong similarity to unknown [Arabidopsis thaliana] >gi|28392972|gb|AAO41921.1| unknown
  misc_feature (232)..(321): Homolog of NCBI NO: 15239021 NR Description: expressed protein [Arabidopsis thaliana] gb|AAF02142.1~gene_id:K15N18.6~strong similarity to unknown [Arabidopsis thaliana] >gi|28392972|gb|AAO41921.1| unknown
  misc_feature (1)..(208): Homolog of NCBI NO: 15221185 NR Description: expressed protein [Arabidopsis thaliana] T1N15.6 [Arabidopsis thaliana] >gi|18086465|gb|AAL57686.1| [Arabidopsis thaliana] >gi|24030356|gb|AAN41342.1| unknown
  misc_feature (218)..(310): Homolog of NCBI NO: 15221185 NR Description: expressed protein [Arabidopsis thaliana] T1N15.6 [Arabidopsis thaliana] >gi|18086465|gb|AAL57686.1| [Arabidopsis thaliana] >gi|24030356|gb|AAN41342.1| unknown
  misc_feature (14)..(206): Homolog of NCBI NO: 28301943 NR Description: unknown protein [Oryza sativa (japonica
  misc_feature (220)..(315): Homolog of NCBI NO: 28301943 NR Description: unknown protein [Oryza sativa (japonica
  misc_feature (2)..(206): Homolog of NCBI NO: 18398302 NR Description: expressed protein [Arabidopsis thaliana]
  misc_feature (229)..(310): Homolog of NCBI NO: 18398302 NR Description: expressed protein [Arabidopsis thaliana]
  misc_feature (92)..(208): Homolog of NCBI NO: 13561930 NR Description: unknown [Brassica napus]

SEQ ID NO: 104374 - protein, 263 aa, Arabidopsis thaliana; identical to SEQ ID NO: 23837
  peptide (1)..(263): Ceres Seq. ID no. 13614893
  misc_feature (1)..(251): Pfam Name: Protein of unknown function (DUF760) Pfam Description: Protein of unknown function (DUF760)
  misc_feature (1)..(263): Homolog of NCBI NO: 18397912 NR Description: expressed protein [Arabidopsis thaliana] unknown protein [Arabidopsis thaliana] unknown protein [Arabidopsis thaliana]
  misc_feature (1)..(145): Homolog of NCBI NO: 15239021 NR Description: expressed protein [Arabidopsis thaliana] gb|AAF02142.1~gene_id:K15N18.6~strong similarity to unknown [Arabidopsis thaliana] >gi|28392972|gb|AAO41921.1| unknown
  misc_feature (168)..(257): Homolog of NCBI NO: 15239021 NR Description: expressed protein [Arabidopsis thaliana] gb|AAF02142.1~gene_id:K15N18.6~strong similarity to unknown [Arabidopsis thaliana] >gi|28392972|gb|AAO41921.1| unknown
  misc_feature (1)..(144): Homolog of NCBI NO: 15221185 NR Description: expressed protein [Arabidopsis thaliana] T1N15.6 [Arabidopsis thaliana] >gi|18086465|gb|AAL57686.1| [Arabidopsis thaliana] >gi|24030356|gb|AAN41342.1| unknown
  misc_feature (154)..(246): Homolog of NCBI NO: 15221185 NR Description: expressed protein [Arabidopsis thaliana] T1N15.6 [Arabidopsis thaliana] >gi|18086465|gb|AAL57686.1| [Arabidopsis thaliana] >gi|24030356|gb|AAN41342.1| unknown
  misc_feature (1)..(142): Homolog of NCBI NO: 28301943 NR Description: unknown protein [Oryza sativa (japonica
  misc_feature (156)..(251): Homolog of NCBI NO: 28301943 NR Description: unknown protein [Oryza sativa (japonica
  misc_feature (1)..(142): Homolog of NCBI NO: 18398302 NR Description: expressed protein [Arabidopsis thaliana]
  misc_feature (165)..(246): Homolog of NCBI NO: 18398302 NR Description: expressed protein [Arabidopsis thaliana]
  misc_feature (28)..(144): Homolog of NCBI NO: 13561930 NR Description: unknown [Brassica napus]

SEQ ID NO: 104375 - DNA, 1712 bp, Arabidopsis thaliana
  misc_feature (1)..(1712): Ceres Seq. ID no. 13614894
  misc_feature: MA Experiment ID: 108569 Result: Down-regulated in Transcription
  misc_feature: MA Experiment 108569 PARAMETER Experiment Name: At_0.001%_MeJA__cDNA_P Parameter: Timepoint (hr) Value: 6
  misc_feature: MA Experiment 108569 PARAMETER Experiment Name: At_0.001%_MeJA__cDNA_P Parameter: Tissue Value: Aerial
  misc_feature: MA Experiment 108569 PARAMETER Experiment Name: At_0.001%_MeJA__cDNA_P Parameter: Treatment Value: 0.001% MeJA vs. No Treatment
  misc_feature: MA Experiment ID: 108595 Result: Up-regulated in Transcription
  misc_feature: MA Experiment 108595 PARAMETER Experiment Name: At_Ler-pi_Ovule_cDNA_P Parameter: Plant Line Value: null
  misc_feature: MA Experiment ID: 20000171 Result: Down-regulated in Transcription
  misc_feature: MA Experiment 20000171 PARAMETER Experiment Name: At_42deg_Heat_P Parameter: Age (day) Value: 14
  misc_feature: MA Experiment 20000171 PARAMETER Experiment Name: At_42deg_Heat_P Parameter: Organism Value: A. thaliana
  misc_feature: MA Experiment 20000171 PARAMETER Experiment Name: At_42deg_Heat_P Parameter: Plant Line Value: WS
  misc_feature: MA Experiment 20000171 PARAMETER Experiment Name: At_42deg_Heat_P Parameter: Temperature (deg C) Value: 42 vs. 22
  misc_feature: MA Experiment 20000171 PARAMETER Experiment Name: At_42deg_Heat_P Parameter: Timepoint (hr) Value: 1
  misc_feature: MA Experiment 20000171 PARAMETER Experiment Name: At_42deg_Heat_P Parameter: Tissue Value: Aerial
  misc_feature: MA Experiment ID: 20000173 Result: Down-regulated in Transcription
  misc_feature: MA Experiment 20000173 PARAMETER Experiment Name: At_42deg_Heat_P Parameter: Age (day) Value: 14
  misc_feature: MA Experiment 20000173 PARAMETER Experiment Name: At_42deg_Heat_P Parameter: Organism Value: A. thaliana
  misc_feature: MA Experiment 20000173 PARAMETER Experiment Name: At_42deg_Heat_P Parameter: Plant Line Value: WS
  misc_feature: MA Experiment 20000173 PARAMETER Experiment Name: At_42deg_Heat_P Parameter: Temperature (deg C) Value: 42 vs. 22
  misc_feature: MA Experiment 20000173 PARAMETER Experiment Name: At_42deg_Heat_P Parameter: Timepoint (hr) Value: 6
  misc_feature: MA Experiment 20000173 PARAMETER Experiment Name: At_42deg_Heat_P Parameter: Tissue Value: Aerial
  misc_feature: MA Experiment ID: 20000180 Result: Up-regulated in Transcription
  misc_feature: MA Experiment 20000180 PARAMETER Experiment Name: At_Germinating_Seeds_P Parameter: Age (hr) Value: 24 vs. 0
  misc_feature: MA Experiment 20000180 PARAMETER Experiment Name: At_Germinating_Seeds_P Parameter: Tissue Value: Germinating Seeds
  misc_feature: MA Experiment ID: 20000182 Result: Down-regulated in Transcription
  misc_feature: MA Experiment 20000182 PARAMETER Experiment Name: At_2mM_SA_P Parameter: Age (day) Value: 14
  misc_feature: MA Experiment 20000182 PARAMETER Experiment Name: At_2mM_SA_P Parameter: Organism Value: A. thaliana
  misc_feature: MA Experiment 20000182 PARAMETER Experiment Name: At_2mM_SA_P Parameter: Plant Line Value: WS
  misc_feature: MA Experiment 20000182 PARAMETER Experiment Name: At_2mM_SA_P Parameter: Timepoint (hr) Value: 6
  misc_feature: MA Experiment 20000182 PARAMETER Experiment Name: At_2mM_SA_P Parameter: Tissue Value: Aerial
  misc_feature: MA Experiment 20000182 PARAMETER Experiment Name: At_2mM_SA_P Parameter: Treatment Value: 2mM SA vs. No Treatment
  misc_feature: MA Experiment ID: 20000185 Result: Up-regulated in Transcription
  misc_feature: MA Experiment 20000185 PARAMETER Experiment Name: At_Roots__P Parameter: Age (day) Value: 7 vs. 21
  misc_feature: MA Experiment 20000185 PARAMETER Experiment Name: At_Roots__P Parameter: Organism Value: A. thaliana
  misc_feature: MA Experiment 20000185 PARAMETER Experiment Name: At_Roots__P Parameter: Tissue Value: Roots vs. Whole Plant
  misc_feature: MA Experiment ID: 20000213 Result: Up-regulated in Transcription
  misc_feature: MA Experiment 20000213 PARAMETER Experiment Name: At_4deg_Cold_P Parameter: Timepoint (hr) Value: 2
  misc_feature: MA Experiment ID: 20000234 Result: Up-regulated in Transcription
  misc_feature: MA Experiment 20000234 PARAMETER Experiment Name: At_Siliques_P Parameter: Age (day) Value: 21
  misc_feature: MA Experiment 20000234 PARAMETER Experiment Name: At_Siliques_P Parameter: Organism Value: A. thaliana
  misc_feature: MA Experiment 20000234 PARAMETER Experiment Name: At_Siliques_P Parameter: Plant Line Value: WS
  misc_feature: MA Experiment 20000234 PARAMETER Experiment Name: At_Siliques_P Parameter: Tissue Value: Less Than 5mm Siliques vs. Whole Plant
  misc_feature: MA Experiment ID: 20000264 Result: Up-regulated in Transcription
  misc_feature: MA Experiment 20000264 PARAMETER Experiment Name: At_Open_Flower_P Parameter: Age (day) Value: 21
  misc_feature: MA Experiment 20000264 PARAMETER Experiment Name: At_Open_Flower_P Parameter: Plant Line Value: WS
  misc_feature: MA Experiment 20000264 PARAMETER Experiment Name: At_Open_Flower_P Parameter: Tissue Value: Open Flower vs. Whole Plant
  misc_feature: MA Experiment ID: 20000265 Result: Up-regulated in Transcription
  misc_feature: MA Experiment 20000265 PARAMETER Experiment Name: At_Open_Flower_P Parameter: Age (day) Value: 21
  misc_feature: MA Experiment 20000265 PARAMETER Experiment Name: At_Open_Flower_P Parameter: Plant Line Value: WS
  misc_feature: MA Experiment 20000265 PARAMETER Experiment Name: At_Open_Flower_P Parameter: Tissue Value: Closed Flower vs. Whole Plant
  misc_feature: MA Experiment ID: 20000286 Result: Up-regulated in Transcription
  misc_feature: MA Experiment 20000286 PARAMETER Experiment Name: At_Open_Flower_P Parameter: Age (day) Value: 21
  misc_feature: MA Experiment 20000286 PARAMETER Experiment Name: At_Open_Flower_P Parameter: Plant Line Value: WS
  misc_feature: MA Experiment 20000286 PARAMETER Experiment Name: At_Open_Flower_P Parameter: Tissue Value: Half Open vs. Whole Plant
  misc_feature: MA Experiment ID: 20000439 Result: Up-regulated in Transcription
  misc_feature: MA Experiment 20000439 PARAMETER Experiment Name: At_Roots__P Parameter: Age (day) Value: 14 vs. 21
  misc_feature: MA Experiment 20000439 PARAMETER Experiment Name: At_Roots__P Parameter: Organism Value: A. thaliana
  misc_feature: MA Experiment 20000439 PARAMETER Experiment Name: At_Roots__P Parameter: Tissue Value: Roots vs. Whole Plant
  misc_feature: MA Experiment ID: 20000443 Result: Down-regulated in Transcription
  misc_feature: MA Experiment 20000443 PARAMETER Experiment Name: At_1uM_BR-BRZ__P Parameter: Tissue Value: Shoot Apices
  misc_feature: MA Experiment 20000443 PARAMETER Experiment Name: At_1uM_BR-BRZ__P Parameter: Treatment Value: 1uM BRZ vs. No Treatment
  misc_feature: MA Experiment ID: 20000794 Result: Down-regulated in Transcription
  misc_feature: MA Experiment 20000794 PARAMETER Experiment Name: At_Petals_P Parameter: Age (day) Value: 23-25 days
  misc_feature: MA Experiment 20000794 PARAMETER Experiment Name: At_Petals_P Parameter: Plant Line Value: WS
  misc_feature: MA Experiment 20000794 PARAMETER Experiment Name: At_Petals_P Parameter: Tissue Value: Petals vs. Whole plant
  misc_feature: MA Experiment ID: 20001450 Result: Down-regulated in Transcription
  misc_feature: MA Experiment 20001450 PARAMETER Experiment Name: At_Far-red-induction_P Parameter: Age (day) Value: 7
  misc_feature: MA Experiment 20001450 PARAMETER Experiment Name: At_Far-red-induction_P Parameter: Light Value: Far-red vs. White
  misc_feature: MA Experiment 20001450 PARAMETER Experiment Name: At_Far-red-induction_P Parameter: Organism Value: A. thaliana
  misc_feature: MA Experiment 20001450 PARAMETER Experiment Name: At_Far-red-induction_P Parameter: Plant Line Value: Columbia
  misc_feature: MA Experiment 20001450 PARAMETER Experiment Name: At_Far-red-induction_P Parameter: Timepoint (hr) Value: 8
  misc_feature: MA Experiment 20001450 PARAMETER Experiment Name: At_Far-red-induction_P Parameter: Tissue Value: Whole Plant
  misc_feature: MA Experiment ID: 20001451 Result: Down-regulated in Transcription
  misc_feature: MA Experiment 20001451 PARAMETER Experiment Name: At_Far-red-induction_P Parameter: Age (day) Value: 7
  misc_feature: MA Experiment 20001451 PARAMETER Experiment Name: At_Far-red-induction_P Parameter: Light Value: Far-red vs. White
  misc_feature: MA Experiment 20001451 PARAMETER Experiment Name: At_Far-red-induction_P Parameter: Organism Value: A. thaliana
  misc_feature: MA Experiment 20001451 PARAMETER Experiment Name: At_Far-red-induction_P Parameter: Plant Line Value: Columbia
  misc_feature: MA Experiment 20001451 PARAMETER Experiment Name: At_Far-red-induction_P Parameter: Timepoint (hr) Value: 24
  misc_feature: MA Experiment 20001451 PARAMETER Experiment Name: At_Far-red-induction_P Parameter: Tissue Value: Whole Plant
  misc_feature: MA Experiment ID: 20001555 Result: Down-regulated in Transcription
  misc_feature: MA Experiment 20001555 PARAMETER Experiment Name: At_Drought_Soil_Dry_P Parameter: Age (day) Value: 24
  misc_feature: MA Experiment 20001555 PARAMETER Experiment Name: At_Drought_Soil_Dry_P Parameter: Organism Value: A. thaliana
  misc_feature: MA Experiment 20001555 PARAMETER Experiment Name: At_Drought_Soil_Dry_P Parameter: Plant Line Value: WS
  misc_feature: MA Experiment 20001555 PARAMETER Experiment Name: At_Drought_Soil_Dry_P Parameter: Post Timepoint (hr) Value: None
  misc_feature: MA Experiment 20001555 PARAMETER Experiment Name: At_Drought_Soil_Dry_P Parameter: Post-Treatment Value: None
  misc_feature: MA Experiment 20001555 PARAMETER Experiment Name: At_Drought_Soil_Dry_P Parameter: Timepoint (day) Value: 10
  misc_feature: MA Experiment 20001555 PARAMETER Experiment Name: At_Drought_Soil_Dry_P Parameter: Treatment Value: Drought vs. No Drought
  misc_feature: MA Experiment ID: 20001557 Result: Up-regulated in Transcription
  misc_feature: MA Experiment 20001557 PARAMETER Experiment Name: At_Drought_Soil_Dry_P Parameter: Age (day) Value: 27
  misc_feature: MA Experiment 20001557 PARAMETER Experiment Name: At_Drought_Soil_Dry_P Parameter: Organism Value: A. thaliana
  misc_feature: MA Experiment 20001557 PARAMETER Experiment Name: At_Drought_Soil_Dry_P Parameter: Plant Line Value: WS
  misc_feature: MA Experiment 20001557 PARAMETER Experiment Name: At_Drought_Soil_Dry_P Parameter: Post Timepoint (hr) Value: 3
  misc_feature: MA Experiment 20001557 PARAMETER Experiment Name: At_Drought_Soil_Dry_P Parameter: Post-Treatment Value: Re-Water vs. No Drought
  misc_feature: MA Experiment 20001557 PARAMETER Experiment Name: At_Drought_Soil_Dry_P Parameter: Timepoint (day) Value: 13
  misc_feature: MA Experiment 20001557 PARAMETER Experiment Name: At_Drought_Soil_Dry_P Parameter: Treatment Value: Drought vs. No Drought
  misc_feature: MA Experiment ID: 20001560 Result: Up-regulated in Transcription
  misc_feature: MA Experiment 20001560 PARAMETER Experiment Name: At_Drought_Soil_Dry_P Parameter: Age (day) Value: 28
  misc_feature: MA Experiment 20001560 PARAMETER Experiment Name: At_Drought_Soil_Dry_P Parameter: Organism Value: A. thaliana
  misc_feature: MA Experiment 20001560 PARAMETER Experiment Name: At_Drought_Soil_Dry_P Parameter: Plant Line Value: WS
  misc_feature: MA Experiment 20001560 PARAMETER Experiment Name: At_Drought_Soil_Dry_P Parameter: Post Timepoint (hr) Value: None
  misc_feature: MA Experiment 20001560 PARAMETER Experiment Name: At_Drought_Soil_Dry_P Parameter: Post-Treatment Value: None
  misc_feature: MA Experiment 20001560 PARAMETER Experiment Name: At_Drought_Soil_Dry_P Parameter: Timepoint (day) Value: 14
  misc_feature: MA Experiment 20001560 PARAMETER Experiment Name: At_Drought_Soil_Dry_P Parameter: Treatment Value: Drought vs. No Drought
  misc_feature: MA Experiment ID: 20001904 Result: Down-regulated in Transcription
  misc_feature: MA Experiment 20001904 PARAMETER Experiment Name: At_Drought_Reproduction_P Parameter: Age (day) Value: 37
  misc_feature: MA Experiment 20001904 PARAMETER Experiment Name: At_Drought_Reproduction_P Parameter: Organism Value: A. thaliana
  misc_feature: MA Experiment 20001904 PARAMETER Experiment Name: At_Drought_Reproduction_P Parameter: Plant Line Value: WS
  misc_feature: MA Experiment 20001904 PARAMETER Experiment Name: At_Drought_Reproduction_P Parameter: Timepoint (day) Value: 7
  misc_feature: MA Experiment 20001904 PARAMETER Experiment Name: At_Drought_Reproduction_P Parameter: Tissue Value: Rosettes
  misc_feature: MA Experiment 20001904 PARAMETER Experiment Name: At_Drought_Reproduction_P Parameter: Treatment Value: Drought vs. No Drought
aaattactcaatccatctccctctcttcttctccttctccaaacaacaaaccaaagcttctctcttttcttgcttcagagagacctagaagagttatcaacatgagtcttcttctacatctctttgctctgtctctgctcatctctgtttcaggagcaaagttctccggccggccaggaatcaactatggccagctcggaaacaacctcccgtcaccgtccgactcagtcaacctcatcaagtccctaaacgcgaaacgcgtcaaactctacgacgctaacccaaaaatcctcgccgcgttaaacggcaccgacattaccgtctccgtcatggtcccaaacgagctcctcgtcaacatctccaaatccgcatcactctccgacgactggatccgatccaacatcctcccgttttacccaaccaccaagatccgttacctcctcgtcggcaacgagatcctctctttaccagactctgagctcaaatcttcactcgttcccgcaatgcgcaagatccaacgctccttaaagtctctcggcgttaaaaaagtcaaagtcggtactacactcgccaccgacgttctccaatcttcgtttcctccgtctagcggcgagtttcgggaggatatctccggtttaattatgaaaccgatgctccaattcttaaaccggaccaaatctttcctattcgttgatgtttacccgtatttcgcgtgggcacaagatccgacccatgtggatctcgattacgcgattttcgaatctaccaacgtcaccgtcacggatccggtttcgaatctgacataccacaacctattcgatcagatgattgacgctttcgtcttcgccatgaaacgagtcgggtatccggatattcggatctgggtcgcggaaacgggttggcccaataacggtgactacgaccaaattggagcgaatatttacaacgccgctacttacaatcgcaatgttgtcaagaaactcgccgctgacccgcccgtaggtacgcccgcccgacccggaaaggttctaccggcgtttgtattcgcactttacaacgaaaatcagaaaacgggtccgggtacggagcggcatttcggacttttacatccgaatgggactcaggtttacgggattgatttgtcggggaagacggagtacaaggaatcattgccggcgccggagaataacgacctgtacaaagggaagatttggtgcgtggtggctaaaggagcgaattggactcagctaggtgatgctctatcgtacgcttgctcacaggggaataatacctgtgacccgattcaacgcggaggcccatgtcagaaacctgatttgaccgttttgcacgccagttacgcctttagctcttattgggcccaatttcgtaagatcgggggaacttgctccttcaacggcttagctacacaaaccatcaaagatccaagttacggacgatgtgagtttccgagcgtgacattgtgaagacttacgagttacgaaaatgcatggtcgagaagagacgcacgagggaaaaccgcacgatgttacggctttcattaatggaaacagcacgtgactctctgtacgatgttacgtagcttgattatttagaaacggcacgtgattagtgtttaacttgctgtttatttattttatttttcttttcccgcgaataatgaaaactcatgaaataattaattcgttttcggg

SEQ ID NO: 104376 - protein, 493 aa, Arabidopsis thaliana
  peptide (1)..(493): Ceres Seq. ID no. 13614895
  misc_feature (58)..(380): Pfam Name: Glycosyl hydrolases family 17 Pfam Description: Glycosyl hydrolases family 17
  misc_feature (34)..(493): Homolog of NCBI NO: 22330905 NR Description: glycosyl hydrolase family 17 [Arabidopsis
  misc_feature (34)..(493): Homolog of NCBI NO: 21593090 NR Description: putative glucan endo-1-3-beta-glucosidase
  misc_feature (34)..(406): Homolog of NCBI NO: 6642633 NR Description: putative beta-1,3-glucanase precursor
  misc_feature (427)..(493): Homolog of NCBI NO: 6642633 NR Description: putative beta-1,3-glucanase precursor
  misc_feature (25)..(493): Homolog of NCBI NO: 6714534 NR Description: beta-1,3-glucanase [Salix gilgiana]
  misc_feature (55)..(493): Homolog of NCBI NO: 21592541 NR Description: beta-1,3-glucanase, putative [Arabidopsis
  misc_feature (55)..(493): Homolog of NCBI NO: 15229514 NR Description: glycosyl hydrolase family 17 [Arabidopsis
  misc_feature (53)..(493): Homolog of NCBI NO: 322641 NR Description: beta-1,3-glucanase homolog (clone A6) - rape
  misc_feature (59)..(493): Homolog of NCBI NO: 15236405 NR Description: glycosyl hydrolase family 17 (anther-specific
  misc_feature (40)..(482): Homolog of NCBI NO: 29647494 NR Description: putative beta-1,3-glucanase [Oryza sativa
ITQSISLSSSPSPNNKPKLLSFLASERPRRVINMSLLLHLFALSLLISVSGAKFSGRPGINYGQLGNNLPSPSDSVNLIKSLNAKRVKLYDANPKILAALNGTDITVSVMVPNELLVNISKSASLSDDWIRSNILPFYPTTKIRYLLVGNEILSLPDSELKSSLVPAMRKIQRSLKSLGVKKVKVGTTLATDVLQSSFPPSSGEFREDISGLIMKPMLQFLNRTKSFLFVDVYPYFAWAQDPTHVDLDYAIFESTNVTVTDPVSNLTYHNLFDQMIDAFVFAMKRVGYPDIRIWVAETGWPNNGDYDQIGANIYNAATYNRNVVKKLAADPPVGTPARPGKVLPAFVFALYNENQKTGPGTERHFGLLHPNGTQVYGIDLSGKTEYKESLPAPENNDLYKGKIWCVVAKGANWTQLGDALSYACSQGNNTCDPIQRGGPCQKPDLTVLHASYAFSSYWAQFRKIGGTCSFNGLATQTIKDPSYGRCEFPSVTL

SEQ ID NO: 104377 - protein, 460 aa, Arabidopsis thaliana; identical to SEQ ID NO: 23286
  peptide (1)..(460): Ceres Seq. ID no. 13614896
  misc_feature (25)..(347): Pfam Name: Glycosyl hydrolases family 17 Pfam Description: Glycosyl hydrolases family 17
  misc_feature (1)..(460): Homolog of NCBI NO: 22330905 NR Description: glycosyl hydrolase family 17 [Arabidopsis
  misc_feature (1)..(460): Homolog of NCBI NO: 21593090 NR Description: putative glucan endo-1-3-beta-glucosidase
  misc_feature (1)..(373): Homolog of NCBI NO: 6642633 NR Description: putative beta-1,3-glucanase precursor
  misc_feature (394)..(460): Homolog of NCBI NO: 6642633 NR Description: putative beta-1,3-glucanase precursor
  misc_feature (1)..(460): Homolog of NCBI NO: 6714534 NR Description: beta-1,3-glucanase [Salix gilgiana]
  misc_feature (22)..(460): Homolog of NCBI NO: 21592541 NR Description: beta-1,3-glucanase, putative [Arabidopsis
  misc_feature (22)..(460): Homolog of NCBI NO: 15229514 NR Description: glycosyl hydrolase family 17 [Arabidopsis
  misc_feature (20)..(460): Homolog of NCBI NO: 322641 NR Description: beta-1,3-glucanase homolog (clone A6) - rape
  misc_feature (26)..(460): Homolog of NCBI NO: 15236405 NR Description: glycosyl hydrolase family 17 (anther-specific
  misc_feature (7)..(449): Homolog of NCBI NO: 29647494 NR Description: putative beta-1,3-glucanase [Oryza sativa

SEQ ID NO: 104378 - protein, 384 aa, Arabidopsis thaliana; identical to SEQ ID NO: 23287
  peptide (1)..(384): Ceres Seq. ID no. 13614897
  misc_feature (1)..(271): Pfam Name: Glycosyl hydrolases family 17 Pfam Description: Glycosyl hydrolases family 17
  misc_feature (1)..(384): Homolog of NCBI NO: 22330905 NR Description: glycosyl hydrolase family 17 [Arabidopsis
  misc_feature (1)..(384): Homolog of NCBI NO: 21593090 NR Description: putative glucan endo-1-3-beta-glucosidase
  misc_feature (1)..(297): Homolog of NCBI NO: 6642633 NR Description: putative beta-1,3-glucanase precursor
  misc_feature (318)..(384): Homolog of NCBI NO: 6642633 NR Description: putative beta-1,3-glucanase precursor
  misc_feature (1)..(384): Homolog of NCBI NO: 6714534 NR Description: beta-1,3-glucanase [Salix gilgiana]
  misc_feature (1)..(384): Homolog of NCBI NO: 21592541 NR Description: beta-1,3-glucanase, putative [Arabidopsis
  misc_feature (1)..(384): Homolog of NCBI NO: 15229514 NR Description: glycosyl hydrolase family 17 [Arabidopsis
  misc_feature (1)..(384): Homolog of NCBI NO: 322641 NR Description: beta-1,3-glucanase homolog (clone A6) - rape
  misc_feature (1)..(384): Homolog of NCBI NO: 15236405 NR Description: glycosyl hydrolase family 17 (anther-specific
  misc_feature (1)..(373): Homolog of NCBI NO: 29647494 NR Description: putative beta-1,3-glucanase [Oryza sativa

SEQ ID NO: 104379 - DNA, 1127 bp, Arabidopsis thaliana
  misc_feature (1)..(1127): Ceres Seq. ID no. 13614898
  misc_feature: MA Experiment ID: 108473 Result: Up-regulated in Transcription
  misc_feature: MA Experiment 108473 PARAMETER Experiment Name: At_Drought_Flowers_cDNA_P Parameter: Timepoint (hr) Value: 7 d
  misc_feature: MA Experiment 108473 PARAMETER Experiment Name: At_Drought_Flowers_cDNA_P Parameter: Tissue Value: Flower
  misc_feature: MA Experiment 108473 PARAMETER Experiment Name: At_Drought_Flowers_cDNA_P Parameter: Treatment Value: Drought vs. No Drought
  misc_feature: MA Experiment ID: 108561 Result: Up-regulated in Transcription
  misc_feature: MA Experiment 108561 PARAMETER Experiment Name: At_100uM_ABA_cDNA_P Parameter: Timepoint (hr) Value: 6
  misc_feature: MA Experiment 108561 PARAMETER Experiment Name: At_100uM_ABA_cDNA_P Parameter: Tissue Value: Aerial
  misc_feature: MA Experiment 108561 PARAMETER Experiment Name: At_100uM_ABA_cDNA_P Parameter: Treatment Value: 100uM ABA vs. No Treatment
  misc_feature: MA Experiment ID: 108585 Result: Up-regulated in Transcription
  misc_feature: MA Experiment 108585 PARAMETER Experiment Name: At_5mM_NaNP_cDNA_P Parameter: Timepoint (hr) Value: 6
  misc_feature: MA Experiment 108585 PARAMETER Experiment Name: At_5mM_NaNP_cDNA_P Parameter: Tissue Value: Aerial
  misc_feature: MA Experiment 108585 PARAMETER Experiment Name: At_5mM_NaNP_cDNA_P Parameter: Treatment Value: null
  misc_feature: MA Experiment ID: 108594 Result: Up-regulated in Transcription
  misc_feature: MA Experiment 108594 PARAMETER Experiment Name: At_Ler-rhl_Root_cDNA_P Parameter: Plant Line Value: null
  misc_feature: MA Experiment ID: 108607 Result: Up-regulated in Transcription
  misc_feature: MA Experiment 108607 PARAMETER Experiment Name: At_100uM_ABA_cDNA_P Parameter: Timepoint (hr) Value: 4
  misc_feature: MA Experiment 108607 PARAMETER Experiment Name: At_100uM_ABA_cDNA_P Parameter: Tissue Value: Aerial
  misc_feature: MA Experiment 108607 PARAMETER Experiment Name: At_100uM_ABA_cDNA_P Parameter: Treatment Value: 100uM ABA vs. No Treatment
  misc_feature: MA Experiment ID: 108608 Result: Up-regulated in Transcription
  misc_feature: MA Experiment 108608 PARAMETER Experiment Name: At_100uM_ABA_cDNA_P Parameter: Timepoint (hr) Value: 1
  misc_feature: MA Experiment 108608 PARAMETER Experiment Name: At_100uM_ABA_cDNA_P Parameter: Tissue Value: Aerial
  misc_feature: MA Experiment 108608 PARAMETER Experiment Name: At_100uM_ABA_cDNA_P Parameter: Treatment Value: 100uM ABA vs. No Treatment
  misc_feature: MA Experiment ID: 108609 Result: Up-regulated in Transcription
  misc_feature: MA Experiment 108609 PARAMETER Experiment Name: At_100uM_ABA_cDNA_P Parameter: Timepoint (hr) Value: 24
  misc_feature: MA Experiment 108609 PARAMETER Experiment Name: At_100uM_ABA_cDNA_P Parameter: Tissue Value: Aerial
  misc_feature: MA Experiment 108609 PARAMETER Experiment Name: At_100uM_ABA_cDNA_P Parameter: Treatment Value: 100uM ABA vs. No Treatment
  misc_feature: MA Experiment ID: 20000069 Result: Up-regulated in Transcription
  misc_feature: MA Experiment 20000069 PARAMETER Experiment Name: At_100uM_ABA_Mutants_cDNA_P Parameter: Plant Line Value: CS23
  misc_feature: MA Experiment 20000069 PARAMETER Experiment Name: At_100uM_ABA_Mutants_cDNA_P Parameter: Timepoint (hr) Value: 6
  misc_feature: MA Experiment 20000069 PARAMETER Experiment Name: At_100uM_ABA_Mutants_cDNA_P Parameter: Tissue Value: Aerial
  misc_feature: MA Experiment 20000069 PARAMETER Experiment Name: At_100uM_ABA_Mutants_cDNA_P Parameter: Treatment Value: 100uM ABA vs. No Treatment
  misc_feature: MA Experiment ID: 20000071 Result: Up-regulated in Transcription
  misc_feature: MA Experiment 20000071 PARAMETER Experiment Name: At_100uM_ABA_Mutants_cDNA_P Parameter: Plant Line Value: CS8104
  misc_feature: MA Experiment 20000071 PARAMETER Experiment Name: At_100uM_ABA_Mutants_cDNA_P Parameter: Timepoint (hr) Value: 6
  misc_feature: MA Experiment 20000071 PARAMETER Experiment Name: At_100uM_ABA_Mutants_cDNA_P Parameter: Tissue Value: Aerial
  misc_feature: MA Experiment 20000071 PARAMETER Experiment Name: At_100uM_ABA_Mutants_cDNA_P Parameter: Treatment Value: 100uM ABA vs. No Treatment
  misc_feature: MA Experiment ID: 20000072 Result: Up-regulated in Transcription
  misc_feature: MA Experiment 20000072 PARAMETER Experiment Name: At_100uM_ABA_Mutants_cDNA_P Parameter: Plant Line Value: CS8105
  misc_feature: MA Experiment 20000072 PARAMETER Experiment Name: At_100uM_ABA_Mutants_cDNA_P Parameter: Timepoint (hr) Value: 6
  misc_feature: MA Experiment 20000072 PARAMETER Experiment Name: At_100uM_ABA_Mutants_cDNA_P Parameter: Tissue Value: Aerial
  misc_feature: MA Experiment 20000072 PARAMETER Experiment Name: At_100uM_ABA_Mutants_cDNA_P Parameter: Treatment Value: 100uM ABA vs. No Treatment
  misc_feature: MA Experiment ID: 20000087 Result: Up-regulated in Transcription
  misc_feature: MA Experiment 20000087 PARAMETER Experiment Name: At_100uM_ABA_Mutants_cDNA_P Parameter: Plant Line Value: WS
  misc_feature: MA Experiment 20000087 PARAMETER Experiment Name: At_100uM_ABA_Mutants_cDNA_P Parameter: Timepoint (hr) Value: 6
  misc_feature: MA Experiment 20000087 PARAMETER Experiment Name: At_100uM_ABA_Mutants_cDNA_P Parameter: Tissue Value: Aerial
  misc_feature: MA Experiment 20000087 PARAMETER Experiment Name: At_100uM_ABA_Mutants_cDNA_P Parameter: Treatment Value: 100uM ABA vs. No Treatment
  misc_feature: MA Experiment ID: 20000112 Result: Up-regulated in Transcription
  misc_feature: MA Experiment 20000112 PARAMETER Experiment Name: At_42deg_Heat_cDNA_P Parameter: Temperature (deg C) Value: 42 vs. 22
  misc_feature: MA Experiment 20000112 PARAMETER Experiment Name: At_42deg_Heat_cDNA_P Parameter: Timepoint (hr) Value: 2
  misc_feature: MA Experiment 20000112 PARAMETER Experiment Name: At_42deg_Heat_cDNA_P Parameter: Tissue Value: Aerial
  misc_feature: MA Experiment ID: 20000166 Result: Up-regulated in Transcription
  misc_feature: MA Experiment 20000166 PARAMETER Experiment Name: At_100uM_ABA_P Parameter: Age (day) Value: 14
  misc_feature: MA Experiment 20000166 PARAMETER Experiment Name: At_100uM_ABA_P Parameter: Organism Value: A. thaliana
  misc_feature: MA Experiment 20000166 PARAMETER Experiment Name: At_100uM_ABA_P Parameter: Plant Line Value: WS
  misc_feature: MA Experiment 20000166 PARAMETER Experiment Name: At_100uM_ABA_P Parameter: Timepoint (hr) Value: 1
  misc_feature: MA Experiment 20000166 PARAMETER Experiment Name: At_100uM_ABA_P Parameter: Tissue Value: Aerial
  misc_feature: MA Experiment 20000166 PARAMETER Experiment Name: At_100uM_ABA_P Parameter: Treatment Value: 100uM ABA vs. No Treatment
  misc_feature: MA Experiment ID: 20000169 Result: Up-regulated in Transcription
  misc_feature: MA Experiment 20000169 PARAMETER Experiment Name: At_100uM_ABA_P Parameter: Age (day) Value: 14
  misc_feature: MA Experiment 20000169 PARAMETER Experiment Name: At_100uM_ABA_P Parameter: Organism Value: A. thaliana
  misc_feature: MA Experiment 20000169 PARAMETER Experiment Name: At_100uM_ABA_P Parameter: Plant Line Value: WS
  misc_feature: MA Experiment 20000169 PARAMETER Experiment Name: At_100uM_ABA_P Parameter: Timepoint (hr) Value: 6
  misc_feature: MA Experiment 20000169 PARAMETER Experiment Name: At_100uM_ABA_P Parameter: Tissue Value: Aerial
  misc_feature: MA Experiment 20000169 PARAMETER Experiment Name: At_100uM_ABA_P Parameter: Treatment Value: 100uM ABA vs. No Treatment
  misc_feature: MA Experiment ID: 20000173 Result: Up-regulated in Transcription
  misc_feature: MA Experiment 20000173 PARAMETER Experiment Name: At_42deg_Heat_P Parameter: Age (day) Value: 14
  misc_feature: MA Experiment 20000173 PARAMETER Experiment Name: At_42deg_Heat_P Parameter: Organism Value: A. thaliana
  misc_feature: MA Experiment 20000173 PARAMETER Experiment Name: At_42deg_Heat_P Parameter: Plant Line Value: WS
  misc_feature: MA Experiment 20000173 PARAMETER Experiment Name: At_42deg_Heat_P Parameter: Temperature (deg C) Value: 42 vs. 22
  misc_feature: MA Experiment 20000173 PARAMETER Experiment Name: At_42deg_Heat_P Parameter: Timepoint (hr) Value: 6
  misc_feature: MA Experiment 20000173 PARAMETER Experiment Name: At_42deg_Heat_P Parameter: Tissue Value: Aerial
  misc_feature: MA Experiment ID: 20000184 Result: Up-regulated in Transcription
  misc_feature: MA Experiment 20000184 PARAMETER Experiment Name: At_Shoots__P Parameter: Age (day) Value: 7
  misc_feature: MA Experiment 20000184 PARAMETER Experiment Name: At_Shoots__P Parameter: Tissue Value: Shoots vs. Whole Plant
  misc_feature: MA Experiment ID: 20000213 Result: Down-regulated in Transcription
  misc_feature: MA Experiment 20000213 PARAMETER Experiment Name: At_4deg_Cold_P Parameter: Timepoint (hr) Value: 2
  misc_feature: MA Experiment ID: 20000224 Result: Down-regulated in Transcription
  misc_feature: MA Experiment ID: 20000227 Result: Down-regulated in Transcription
  misc_feature: MA Experiment 20000227 PARAMETER Experiment Name: At_Root-Tips-vs-Tops_P Parameter: Tissue Value: Root Tips vs. Root Tops
  misc_feature: MA Experiment ID: 20000234 Result: Down-regulated in Transcription
  misc_feature: MA Experiment 20000234 PARAMETER Experiment Name: At_Siliques_P Parameter: Age (day) Value: 21
  misc_feature: MA Experiment 20000234 PARAMETER Experiment Name: At_Siliques_P Parameter: Organism Value: A. thaliana
  misc_feature: MA Experiment 20000234 PARAMETER Experiment Name: At_Siliques_P Parameter: Plant Line Value: WS
  misc_feature: MA Experiment 20000234 PARAMETER Experiment Name: At_Siliques_P Parameter: Tissue Value: Less Than 5mm Siliques vs. Whole Plant
  misc_feature: MA Experiment ID: 20000235 Result: Down-regulated in Transcription
  misc_feature: MA Experiment 20000235 PARAMETER Experiment Name: At_Siliques_P Parameter: Age (day) Value: 21
  misc_feature: MA Experiment 20000235 PARAMETER Experiment Name: At_Siliques_P Parameter: Organism Value: A. thaliana
  misc_feature: MA Experiment 20000235 PARAMETER Experiment Name: At_Siliques_P Parameter: Plant Line Value: WS
  misc_feature: MA Experiment 20000235 PARAMETER Experiment Name: At_Siliques_P Parameter: Tissue Value: 5-10mm Siliques vs. Whole Plant
  misc_feature: MA Experiment ID: 20000264 Result: Down-regulated in Transcription
  misc_feature: MA Experiment 20000264 PARAMETER Experiment Name: At_Open_Flower_P Parameter: Age (day) Value: 21
  misc_feature: MA Experiment 20000264 PARAMETER Experiment Name: At_Open_Flower_P Parameter: Plant Line Value: WS
  misc_feature: MA Experiment 20000264 PARAMETER Experiment Name: At_Open_Flower_P Parameter: Tissue Value: Open Flower vs. Whole Plant
  misc_feature: MA Experiment ID: 20000265 Result: Down-regulated in Transcription
  misc_feature: MA Experiment 20000265 PARAMETER Experiment Name: At_Open_Flower_P Parameter: Age (day) Value: 21
  misc_feature: MA Experiment 20000265 PARAMETER Experiment Name: At_Open_Flower_P Parameter: Plant Line Value: WS
  misc_feature: MA Experiment 20000265 PARAMETER Experiment Name: At_Open_Flower_P Parameter: Tissue Value: Closed Flower vs. Whole Plant
  misc_feature: MA Experiment ID: 20000286 Result: Down-regulated in Transcription
  misc_feature: MA Experiment 20000286 PARAMETER Experiment Name: At_Open_Flower_P Parameter: Age (day) Value: 21
  misc_feature: MA Experiment 20000286 PARAMETER Experiment Name: At_Open_Flower_P Parameter: Plant Line Value: WS
  misc_feature: MA Experiment 20000286 PARAMETER Experiment Name: At_Open_Flower_P Parameter: Tissue Value: Half Open vs. Whole Plant
  misc_feature: MA Experiment ID: 20000436 Result: Up-regulated in Transcription
  misc_feature: MA Experiment 20000436 PARAMETER Experiment Name: At_Drought_P Parameter: Age (day) Value: 7
  misc_feature: MA Experiment 20000436 PARAMETER Experiment Name: At_Drought_P Parameter: Organism Value: A. thaliana
  misc_feature: MA Experiment 20000436 PARAMETER Experiment Name: At_Drought_P Parameter: Plant Line Value: WS
  misc_feature: MA Experiment 20000436 PARAMETER Experiment Name: At_Drought_P Parameter: Timepoint (hr) Value: 12
  misc_feature: MA Experiment 20000436 PARAMETER Experiment Name: At_Drought_P Parameter: Tissue Value: Whole Plant
  misc_feature: MA Experiment 20000436 PARAMETER Experiment Name: At_Drought_P Parameter: Treatment Value: Drought vs. No Drought
  misc_feature: MA Experiment ID: 20000438 Result: Up-regulated in Transcription
  misc_feature: MA Experiment 20000438 PARAMETER Experiment Name: At_Shoots__P Parameter: Age (day) Value: 14
  misc_feature: MA Experiment 20000438 PARAMETER Experiment Name: At_Shoots__P Parameter: Tissue Value: Shoots vs. Whole Plant
  misc_feature: MA Experiment ID: 20000441 Result: Up-regulated in Transcription
  misc_feature: MA Experiment 20000441 PARAMETER Experiment Name: At_1uM_BR-BRZ__P Parameter: Tissue Value: Shoot Apices
  misc_feature: MA Experiment 20000441 PARAMETER Experiment Name: At_1uM_BR-BRZ__P Parameter: Treatment Value: 1uM BR vs. No Treatment
  misc_feature: MA Experiment ID: 20000453 Result: Up-regulated in Transcription
  misc_feature: MA Experiment 20000453 PARAMETER Experiment Name: At_100uM_ABA_P Parameter: Age (day) Value: 15
  misc_feature: MA Experiment 20000453 PARAMETER Experiment Name: At_100uM_ABA_P Parameter: Organism Value: A. thaliana
  misc_feature: MA Experiment 20000453 PARAMETER Experiment Name: At_100uM_ABA_P Parameter: Plant Line Value: WS
  misc_feature: MA Experiment 20000453 PARAMETER Experiment Name: At_100uM_ABA_P Parameter: Timepoint (hr) Value: 24
  misc_feature: MA Experiment 20000453 PARAMETER Experiment Name: At_100uM_ABA_P Parameter: Tissue Value: Aerial
  misc_feature: MA Experiment 20000453 PARAMETER Experiment Name: At_100uM_ABA_P Parameter: Treatment Value: 100uM ABA vs. No Treatment
  misc_feature: MA Experiment ID: 20000456 Result: Down-regulated in Transcription
  misc_feature: MA Experiment 20000456 PARAMETER Experiment Name: At_100uM_BA_P Parameter: Age (day) Value: 14
  misc_feature: MA Experiment 20000456 PARAMETER Experiment Name: At_100uM_BA_P Parameter: Organism Value: A. thaliana
  misc_feature: MA Experiment 20000456 PARAMETER Experiment Name: At_100uM_BA_P Parameter: Plant Line Value: WS
  misc_feature: MA Experiment 20000456 PARAMETER Experiment Name: At_100uM_BA_P Parameter: Timepoint (hr) Value: 6
  misc_feature: MA Experiment 20000456 PARAMETER Experiment Name: At_100uM_BA_P Parameter: Tissue Value: Aerial
  misc_feature: MA Experiment 20000456 PARAMETER Experiment Name: At_100uM_BA_P Parameter: Treatment Value: 100uM BA vs. No Treatment
  misc_feature: MA Experiment ID: 20000574 Result: Down-regulated in Transcription
  misc_feature: MA Experiment 20000574 PARAMETER Experiment Name: At_100uM_ABA_Mutants__P Parameter: Organism Value: A. thaliana
  misc_feature: MA Experiment 20000574 PARAMETER Experiment Name: At_100uM_ABA_Mutants__P Parameter: Plant Line Value: CS23 vs. Ler wt
  misc_feature: MA Experiment 20000574 PARAMETER Experiment Name: At_100uM_ABA_Mutants__P Parameter: Timepoint (hr) Value: N/A
  misc_feature: MA Experiment 20000574 PARAMETER Experiment Name: At_100uM_ABA_Mutants__P Parameter: Tissue Value: Whole Plant
  misc_feature: MA Experiment 20000574 PARAMETER Experiment Name: At_100uM_ABA_Mutants__P Parameter: Treatment Value: None
  misc_feature: MA Experiment ID: 20000794 Result: Down-regulated in Transcription
  misc_feature: MA Experiment 20000794 PARAMETER Experiment Name: At_Petals_P Parameter: Age (day) Value: 23-25 days
  misc_feature: MA Experiment 20000794 PARAMETER Experiment Name: At_Petals_P Parameter: Plant Line Value: WS
  misc_feature: MA Experiment 20000794 PARAMETER Experiment Name: At_Petals_P Parameter: Tissue Value: Petals vs. Whole plant
  misc_feature: MA Experiment ID: 20001247 Result: Up-regulated in Transcription
  misc_feature: MA Experiment 20001247 PARAMETER Experiment Name: At_Far-red-induction_P Parameter: Age (day) Value: 7
  misc_feature: MA Experiment 20001247 PARAMETER Experiment Name: At_Far-red-induction_P Parameter: Light Value: Far-red vs. White
  misc_feature: MA Experiment 20001247 PARAMETER Experiment Name: At_Far-red-induction_P Parameter: Organism Value: A. thaliana
  misc_feature: MA Experiment 20001247 PARAMETER Experiment Name: At_Far-red-induction_P Parameter: Plant Line Value: Columbia
  misc_feature: MA Experiment 20001247 PARAMETER Experiment Name: At_Far-red-induction_P Parameter: Timepoint (hr) Value: 1
  misc_feature: MA Experiment 20001247 PARAMETER Experiment Name: At_Far-red-induction_P Parameter: Tissue Value: Whole Plant
  misc_feature: MA Experiment ID: 20001248 Result: Up-regulated in Transcription
  misc_feature: MA Experiment 20001248 PARAMETER Experiment Name: At_Far-red-induction_P Parameter: Age (day) Value: 7
  misc_feature: MA Experiment 20001248 PARAMETER Experiment Name: At_Far-red-induction_P Parameter: Light Value: Far-red vs. White
  misc_feature: MA Experiment 20001248 PARAMETER Experiment Name: At_Far-red-induction_P Parameter: Organism Value: A. thaliana
  misc_feature: MA Experiment 20001248 PARAMETER Experiment Name: At_Far-red-induction_P Parameter: Plant Line Value: Columbia
  misc_feature: MA Experiment 20001248 PARAMETER Experiment Name: At_Far-red-induction_P Parameter: Timepoint (hr) Value: 4
  misc_feature: MA Experiment 20001248 PARAMETER Experiment Name: At_Far-red-induction_P Parameter: Tissue Value: Whole Plant
  misc_feature: MA Experiment ID: 20001450 Result: Up-regulated in Transcription
  misc_feature: MA Experiment 20001450 PARAMETER Experiment Name: At_Far-red-induction_P Parameter: Age (day) Value: 7
  misc_feature: MA Experiment 20001450 PARAMETER Experiment Name: At_Far-red-induction_P Parameter: Light Value: Far-red vs. White
  misc_feature: MA Experiment 20001450 PARAMETER Experiment Name: At_Far-red-induction_P Parameter: Organism Value: A. thaliana
  misc_feature: MA Experiment 20001450 PARAMETER Experiment Name: At_Far-red-induction_P Parameter: Plant Line Value: Columbia
  misc_feature: MA Experiment 20001450 PARAMETER Experiment Name: At_Far-red-induction_P Parameter: Timepoint (hr) Value: 8
  misc_feature: MA Experiment 20001450 PARAMETER Experiment Name: At_Far-red-induction_P Parameter: Tissue Value: Whole Plant
  misc_feature: MA Experiment ID: 20001451 Result: Up-regulated in Transcription
  misc_feature: MA Experiment 20001451 PARAMETER Experiment Name: At_Far-red-induction_P Parameter: Age (day) Value: 7
  misc_feature: MA Experiment 20001451 PARAMETER Experiment Name: At_Far-red-induction_P Parameter: Light Value: Far-red vs. White
  misc_feature: MA Experiment 20001451 PARAMETER Experiment Name: At_Far-red-induction_P Parameter: Organism Value: A. thaliana
  misc_feature: MA Experiment 20001451 PARAMETER Experiment Name: At_Far-red-induction_P Parameter: Plant Line Value: Columbia
  misc_feature: MA Experiment 20001451 PARAMETER Experiment Name: At_Far-red-induction_P Parameter: Timepoint (hr) Value: 24
  misc_feature: MA Experiment 20001451 PARAMETER Experiment Name: At_Far-red-induction_P Parameter: Tissue Value: Whole Plant
  misc_feature: MA Experiment ID: 20001558 Result: Down-regulated in Transcription
  misc_feature: MA Experiment 20001558 PARAMETER Experiment Name: At_Drought_Soil_Dry_P Parameter: Age (day) Value: 27
  misc_feature: MA Experiment 20001558 PARAMETER Experiment Name: At_Drought_Soil_Dry_P Parameter: Organism Value: A. thaliana
  misc_feature: MA Experiment 20001558 PARAMETER Experiment Name: At_Drought_Soil_Dry_P Parameter: Plant Line Value: WS
  misc_feature: MA Experiment 20001558 PARAMETER Experiment Name: At_Drought_Soil_Dry_P Parameter: Post Timepoint (hr) Value: 6
  misc_feature: MA Experiment 20001558 PARAMETER Experiment Name: At_Drought_Soil_Dry_P Parameter: Post-Treatment Value: Re-Water vs. No Drought
  misc_feature: MA Experiment 20001558 PARAMETER Experiment Name: At_Drought_Soil_Dry_P Parameter: Timepoint (day) Value: 13
  misc_feature: MA Experiment 20001558 PARAMETER Experiment Name: At_Drought_Soil_Dry_P Parameter: Treatment Value: Drought vs. No Drought
  misc_feature: MA Experiment ID: 20001560 Result: Down-regulated in Transcription
  misc_feature: MA Experiment 20001560 PARAMETER Experiment Name: At_Drought_Soil_Dry_P Parameter: Age (day) Value: 28
  misc_feature: MA Experiment 20001560 PARAMETER Experiment Name: At_Drought_Soil_Dry_P Parameter: Organism Value: A. thaliana
  misc_feature: MA Experiment 20001560 PARAMETER Experiment Name: At_Drought_Soil_Dry_P Parameter: Plant Line Value: WS
  misc_feature: MA Experiment 20001560 PARAMETER Experiment Name: At_Drought_Soil_Dry_P Parameter: Post Timepoint (hr) Value: None
  misc_feature: MA Experiment 20001560 PARAMETER Experiment Name: At_Drought_Soil_Dry_P Parameter: Post-Treatment Value: None
  misc_feature: MA Experiment 20001560 PARAMETER Experiment Name: At_Drought_Soil_Dry_P Parameter: Timepoint (day) Value: 14
  misc_feature: MA Experiment 20001560 PARAMETER Experiment Name: At_Drought_Soil_Dry_P Parameter: Treatment Value: Drought vs. No Drought
  misc_feature: MA Experiment ID: 20001757 Result: Up-regulated in Transcription
  misc_feature: MA Experiment 20001757 PARAMETER Experiment Name: At_50mM_NH4NO3_L-to-H_P Parameter: Timepoint (hr) Value: 6
  misc_feature: MA Experiment 20001757 PARAMETER Experiment Name: At_50mM_NH4NO3_L-to-H_P Parameter: Tissue Value: Leaf
  misc_feature: MA Experiment 20001757 PARAMETER Experiment Name: At_50mM_NH4NO3_L-to-H_P Parameter: Treatment Value: 50mM NH4NO3 vs 100mM Mannitol
  misc_feature: MA Experiment ID: 20001904 Result: Up-regulated in Transcription
  misc_feature: MA Experiment 20001904 PARAMETER Experiment Name: At_Drought_Reproduction_P Parameter: Age (day) Value: 37
  misc_feature: MA Experiment 20001904 PARAMETER Experiment Name: At_Drought_Reproduction_P Parameter: Organism Value: A. thaliana
  misc_feature: MA Experiment 20001904 PARAMETER Experiment Name: At_Drought_Reproduction_P Parameter: Plant Line Value: WS
  misc_feature: MA Experiment 20001904 PARAMETER Experiment Name: At_Drought_Reproduction_P Parameter: Timepoint (day) Value: 7
  misc_feature: MA Experiment 20001904 PARAMETER Experiment Name: At_Drought_Reproduction_P Parameter: Tissue Value: Rosettes
  misc_feature: MA Experiment 20001904 PARAMETER Experiment Name: At_Drought_Reproduction_P Parameter: Treatment Value: Drought vs. No Drought
  misc_feature: MA Experiment ID: 20001905 Result: Up-regulated in Transcription
  misc_feature: MA Experiment 20001905 PARAMETER Experiment Name: At_Drought_Reproduction_P Parameter: Age (day) Value: 40
  misc_feature: MA Experiment 20001905 PARAMETER Experiment Name: At_Drought_Reproduction_P Parameter: Organism Value: A. thaliana
  misc_feature: MA Experiment 20001905 PARAMETER Experiment Name: At_Drought_Reproduction_P Parameter: Plant Line Value: WS
  misc_feature: MA Experiment 20001905 PARAMETER Experiment Name: At_Drought_Reproduction_P Parameter: Timepoint (day) Value: 10
  misc_feature: MA Experiment 20001905 PARAMETER Experiment Name: At_Drought_Reproduction_P Parameter: Tissue Value: Rosettes
  misc_feature: MA Experiment 20001905 PARAMETER Experiment Name: At_Drought_Reproduction_P Parameter: Treatment Value: Drought vs. No Drought
  misc_feature: MA Experiment ID: 20001910 Result: Up-regulated in Transcription
  misc_feature: MA Experiment 20001910 PARAMETER Experiment Name: At_Drought_Reproduction_P Parameter: Age (day) Value: 37
  misc_feature: MA Experiment 20001910 PARAMETER Experiment Name: At_Drought_Reproduction_P Parameter: Organism Value: A. thaliana
  misc_feature: MA Experiment 20001910 PARAMETER Experiment Name: At_Drought_Reproduction_P Parameter: Plant Line Value: WS
  misc_feature: MA Experiment 20001910 PARAMETER Experiment Name: At_Drought_Reproduction_P Parameter: Timepoint (day) Value: 7
  misc_feature: MA Experiment 20001910 PARAMETER Experiment Name: At_Drought_Reproduction_P Parameter: Tissue Value: Flowers
  misc_feature: MA Experiment 20001910 PARAMETER Experiment Name: At_Drought_Reproduction_P Parameter: Treatment Value: Drought vs. No Drought
  misc_feature: MA Experiment ID: 20001911 Result: Up-regulated in Transcription
  misc_feature: MA Experiment 20001911 PARAMETER Experiment Name: At_Drought_Reproduction_P Parameter: Age (day) Value: 40
  misc_feature: MA Experiment 20001911 PARAMETER Experiment Name: At_Drought_Reproduction_P Parameter: Organism Value: A. thaliana
  misc_feature: MA Experiment 20001911 PARAMETER Experiment Name: At_Drought_Reproduction_P Parameter: Plant Line Value: WS
  misc_feature: MA Experiment 20001911 PARAMETER Experiment Name: At_Drought_Reproduction_P Parameter: Timepoint (day) Value: 10
  misc_feature: MA Experiment 20001911 PARAMETER Experiment Name: At_Drought_Reproduction_P Parameter: Tissue Value: Flowers
  misc_feature: MA Experiment 20001911 PARAMETER Experiment Name: At_Drought_Reproduction_P Parameter: Treatment Value: Drought vs. No Drought
gagcccaactcctctctcttcacgcatttctcgttgtcaaagacaaagttctctccttttataaacacccatctccacctcctctctcttattcaaacttctttgagaaaattcgagctaagtgtttttataatatatacattctctgatatgggtttctctagagcaaaacgtgtcactgatccacttgcagaagaggttagggctcgtctcgttggatgcagctttagcagcggcagcgaacataccggcgacggaattgaagactacgaagacgacgactcgccttgtctctctgatctagtacaagggttcttggaagatgaagttgatacagttgatgatgagtcatgctggtgtgatcaagattctggttccgactcggattctgactcggaacttggcgagctccctgactttgccgacgatatcgccaagcttctgaggaactctctcagggaagattcatacggacgaacggtgctggtacatgtggcgagagcgatggaaatgttgtcgtctctcggatctcagcccgaacagcgtgccgttttccagcgtaaggtcatgtctcttcttagagaactcggccacaatgcggccatctgcaaaactaaatggaaatcctccggcggactcaccgccggtaaccatgagttcatcgacgtcgtgtatacaccttccgcctcgtctcagtccgtccgtttcatcgtcgatttagatttctcgtcgcggtttcaaatcgcgaggccaacttcacagtacgcgcgtgtgcttcaatcgcttccggcggttttcgtcggaaagggggatgatctgaagcggatcttgcgtctcgtgtgtgacgccgcgaggatttctcttaggaaccgcgggctgacgcttccgccgtggaggaagaatcgttatatgcagacgcggtggcttggtccttacaaacgcaccaccaacttaacgccgtcaacttccggtgtagacaccgtcatgtgtcgtgccatcggtttcgataatgccgtcggaggccgtctatttgtgcgaacacgataaaaactagaccaaaaagaccacgtgtcatttttaacttgattttttccatatacgttctagagaataataattcattattt

SEQ ID NO: 104380 - protein, 348 aa, Arabidopsis thaliana; identical to SEQ ID NO: 36536
  peptide (1)..(348): Ceres Seq. ID no. 13614899
  misc_feature (98)..(314): Pfam Name: Protein of unknown function (DUF506) Pfam Description: Protein of unknown function (DUF506)
  misc_feature (51)..(348): Homolog of NCBI NO: 18397919 NR Description: expressed protein [Arabidopsis thaliana] unknown protein [Arabidopsis thaliana] unknown protein [Arabidopsis thaliana]
  misc_feature (51)..(348): Homolog of NCBI NO: 21554332 NR Description: unknown [Arabidopsis thaliana]
  misc_feature (92)..(346): Homolog of NCBI NO: 15230824 NR Description: hypothetical protein [Arabidopsis thaliana] gb|AAF02145.1~gene_id:MJL12.20~similar to unknown protein
  misc_feature (63)..(340): Homolog of NCBI NO: 34906942 NR Description: similar to Arabidopsis thaliana chromosome 3,
  misc_feature (84)..(314): Homolog of NCBI NO: 34902608 NR Description: Unknown protein [Oryza sativa (japonica
  misc_feature (84)..(314): Homolog of NCBI NO: 20042978 NR Description: Hypothetical protein [Oryza sativa]
  misc_feature (84)..(314): Homolog of NCBI NO: 37534384 NR Description: unknown protein [Oryza sativa (japonica
  misc_feature (49)..(316): Homolog of NCBI NO: 30682929 NR Description: expressed protein [Arabidopsis thaliana]
  misc_feature (54)..(316): Homolog of NCBI NO: 15228917 NR Description: expressed protein [Arabidopsis thaliana] gene_id:F5N5.17~pir||G71408~similar to unknown protein
  misc_feature (54)..(316): Homolog of NCBI NO: 28058790 NR Description: unknown protein [Arabidopsis thaliana]

SEQ ID NO: 104381 - protein, 298 aa, Arabidopsis thaliana; identical to SEQ ID NO: 36537
  peptide (1)..(298): Ceres Seq. ID no. 13614900
  misc_feature (48)..(264): Pfam Name: Protein of unknown function (DUF506) Pfam Description: Protein of unknown function (DUF506)
  misc_feature (1)..(298): Homolog of NCBI NO: 18397919 NR Description: expressed protein [Arabidopsis thaliana] unknown protein [Arabidopsis thaliana] unknown protein [Arabidopsis thaliana]
  misc_feature (1)..(298): Homolog of NCBI NO: 21554332 NR Description: unknown [Arabidopsis thaliana]
  misc_feature (42)..(296): Homolog of NCBI NO: 15230824 NR Description: hypothetical protein [Arabidopsis thaliana] gb|AAF02145.1~gene_id:MJL12.20~similar to unknown protein
  misc_feature (13)..(290): Homolog of NCBI NO: 34906942 NR Description: similar to Arabidopsis thaliana chromosome 3,
  misc_feature (34)..(264): Homolog of NCBI NO: 34902608 NR Description: Unknown protein [Oryza sativa (japonica
  misc_feature (34)..(264): Homolog of NCBI NO: 20042978 NR Description: Hypothetical protein [Oryza sativa]
  misc_feature (34)..(264): Homolog of NCBI NO: 37534384 NR Description: unknown protein [Oryza sativa (japonica
  misc_feature (1)..(266): Homolog of NCBI NO: 30682929 NR Description: expressed protein [Arabidopsis thaliana]
  misc_feature (4)..(266): Homolog of NCBI NO: 15228917 NR Description: expressed protein [Arabidopsis thaliana] gene_id:F5N5.17~pir||G71408~similar to unknown protein
  misc_feature (4)..(266): Homolog of NCBI NO: 28058790 NR Description: unknown protein [Arabidopsis thaliana]

SEQ ID NO: 104382 - protein, 180 aa, Arabidopsis thaliana; identical to SEQ ID NO: 36538
  peptide (1)..(180): Ceres Seq. ID no. 13614901
  misc_feature (1)..(146): Pfam Name: Protein of unknown function (DUF506) Pfam Description: Protein of unknown function (DUF506)
  misc_feature (1)..(180): Homolog of NCBI NO: 18397919 NR Description: expressed protein [Arabidopsis thaliana] unknown protein [Arabidopsis thaliana] unknown protein [Arabidopsis thaliana]
  misc_feature (1)..(180): Homolog of NCBI NO: 21554332 NR Description: unknown [Arabidopsis thaliana]
  misc_feature (1)..(178): Homolog of NCBI NO: 15230824 NR Description: hypothetical protein [Arabidopsis thaliana] gb|AAF02145.1~gene_id:MJL12.20~similar to unknown protein
  misc_feature (1)..(172): Homolog of NCBI NO: 34906942 NR Description: similar to Arabidopsis thaliana chromosome 3,
  misc_feature (1)..(146): Homolog of NCBI NO: 34902608 NR Description: Unknown protein [Oryza sativa (japonica
  misc_feature (1)..(146): Homolog of NCBI NO: 20042978 NR Description: Hypothetical protein [Oryza sativa]
  misc_feature (1)..(146): Homolog of NCBI NO: 37534384 NR Description: unknown protein [Oryza sativa (japonica
  misc_feature (1)..(148): Homolog of NCBI NO: 30682929 NR Description: expressed protein [Arabidopsis thaliana]
  misc_feature (1)..(148): Homolog of NCBI NO: 15228917 NR Description: expressed protein [Arabidopsis thaliana] gene_id:F5N5.17~pir||G71408~similar to unknown protein
  misc_feature (1)..(148): Homolog of NCBI NO: 28058790 NR Description: unknown protein [Arabidopsis thaliana]

SEQ ID NO: 104383 - DNA, 709 bp, Arabidopsis thaliana
  misc_feature (1)..(709): Ceres Seq. ID no. 13614906
  misc_feature: MA Experiment ID: 20000264 Result: Down-regulated in Transcription
  misc_feature: MA Experiment 20000264 PARAMETER Experiment Name: At_Open_Flower_P Parameter: Age (day) Value: 21
  misc_feature: MA Experiment 20000264 PARAMETER Experiment Name: At_Open_Flower_P Parameter: Plant Line Value: WS
  misc_feature: MA Experiment 20000264 PARAMETER Experiment Name: At_Open_Flower_P Parameter: Tissue Value: Open Flower vs. Whole Plant
  misc_feature: MA Experiment ID: 20000439 Result: Down-regulated in Transcription
  misc_feature: MA Experiment 20000439 PARAMETER Experiment Name: At_Roots__P Parameter: Age (day) Value: 14 vs. 21
  misc_feature: MA Experiment 20000439 PARAMETER Experiment Name: At_Roots__P Parameter: Organism Value: A. thaliana
  misc_feature: MA Experiment 20000439 PARAMETER Experiment Name: At_Roots__P Parameter: Tissue Value: Roots vs. Whole Plant
  misc_feature: MA Experiment ID: 20000794 Result: Down-regulated in Transcription
  misc_feature: MA Experiment 20000794 PARAMETER Experiment Name: At_Petals_P Parameter: Age (day) Value: 23-25 days
  misc_feature: MA Experiment 20000794 PARAMETER Experiment Name: At_Petals_P Parameter: Plant Line Value: WS
  misc_feature: MA Experiment 20000794 PARAMETER Experiment Name: At_Petals_P Parameter: Tissue Value: Petals vs. Whole plant
atgtttgtgtgttgtgttgtggcagtggaagggaactctttacccgaagaagatgtagagatgatggagaattcagatgtaatgaagacagtcacagatgaagcttctccaatggtggagccgttcattggtatggagtttgaatcagaagaggctgcaaagtctttctatgacaattacgctacatgcatgggtttcgttatgcgagtggatgctttcaggaggtcaatgcgagatgggactgtggtgtggcgcagactcgtgtgtaataaagaaggatttcgtaggtcgagacctcggagaagcgagagtagaaagcctcgggctataacaagagaagggtgtaaagctctgattgttgtgaaaagagagaaatccggaacatggcttgttactaaatttgagaaagagcataatcatcctctcttgcctctctcccctaatgttcgccggaattttcagctccctcaaacaccggacgagaaagacgcaaagattagggagctgagtgcagagctgagccgagagagaaggcgttgtactgctttgcaacagcagcttgatatggtccttaaggagatggaagaacattccaaccatctcaccattaacatcaatagtgttatccaaagtgttagagacattgagtccaatactttcaccaaacaacaaacataatgcttcatttctgttcataaaagcttaacat

SEQ ID NO: 104384 - protein, 225 aa, Arabidopsis thaliana
  peptide (1)..(225): Ceres Seq. ID no. 13614907
  misc_feature (55)..(219): Pfam Name: FAR1 family Pfam Description: FAR1 family
  misc_feature (9)..(225): Homolog of NCBI NO: 30680320 NR Description: expressed protein [Arabidopsis thaliana] unknown protein [Arabidopsis thaliana]
  misc_feature (1)..(225): Homolog of NCBI NO: 6041845 NR Description: hypothetical protein [Arabidopsis thaliana]
  misc_feature (14)..(216): Homolog of NCBI NO: 30689328 NR Description: expressed protein [Arabidopsis thaliana] unknown protein [Arabidopsis thaliana]
  misc_feature (11)..(216): Homolog of NCBI NO: 11358055 NR Description: hypothetical protein T16L24.20 - Arabidopsis >gi|6996283|emb|CAB75444.1| putative protein [Arabidopsis
  misc_feature (11)..(216): Homolog of NCBI NO: 18411179 NR Description: expressed protein [Arabidopsis thaliana] AT3g59470/T16L24_20 [Arabidopsis thaliana]
  misc_feature (56)..(216): Homolog of NCBI NO: 25370598 NR Description: hypothetical protein At2g43280 [imported] - thaliana >gi|2289005|gb|AAB64334.1| hypothetical protein thaliana] >gi|20197151|gb|AAM14941.1| hypothetical protein
  misc_feature (39)..(144): Homolog of NCBI NO: 15233732 NR Description: expressed protein [Arabidopsis thaliana]
  misc_feature (156)..(214): Homolog of NCBI NO: 15233732 NR Description: expressed protein [Arabidopsis thaliana]
  misc_feature (40)..(222): Homolog of NCBI NO: 15235502 NR Description: hypothetical protein [Arabidopsis thaliana]
  misc_feature (40)..(151): Homolog of NCBI NO: 28301931 NR Description: putative transposase [Oryza sativa (japonica
MFVCCVVAVEGNSLPEEDVEMMENSDVMKTVTDEASPMVEPFIGMEFESEEAAKSFYDNYATCMGFVMRVDAFRRSMRDGTVVWRRLVCNKEGFRRSRPRRSESRKPRAITREGCKALIVVKREKSGTWLVTKFEKEHNHPLLPLSPNVRRNFQLPQTPDEKDAKIRELSAELSRERRRCTALQQQLDMVLKEMEEHSNHLTININSVIQSVRDIESNTFTKQQT

SEQ ID NO: 104385 - protein, 205 aa, Arabidopsis thaliana
  peptide (1)..(205): Ceres Seq. ID no. 13614908
  misc_feature (35)..(199): Pfam Name: FAR1 family Pfam Description: FAR1 family
  misc_feature (1)..(205): Homolog of NCBI NO: 30680320 NR Description: expressed protein [Arabidopsis thaliana] unknown protein [Arabidopsis thaliana]
  misc_feature (1)..(205): Homolog of NCBI NO: 6041845 NR Description: hypothetical protein [Arabidopsis thaliana]
  misc_feature (1)..(196): Homolog of NCBI NO: 30689328 NR Description: expressed protein [Arabidopsis thaliana] unknown protein [Arabidopsis thaliana]
  misc_feature (1)..(196): Homolog of NCBI NO: 11358055 NR Description: hypothetical protein T16L24.20 - Arabidopsis >gi|6996283|emb|CAB75444.1| putative protein [Arabidopsis
  misc_feature (1)..(196): Homolog of NCBI NO: 18411179 NR Description: expressed protein [Arabidopsis thaliana] AT3g59470/T16L24_20 [Arabidopsis thaliana]
  misc_feature (36)..(196): Homolog of NCBI NO: 25370598 NR Description: hypothetical protein At2g43280 [imported] - thaliana >gi|2289005|gb|AAB64334.1| hypothetical protein thaliana] >gi|20197151|gb|AAM14941.1| hypothetical protein
  misc_feature (19)..(124): Homolog of NCBI NO: 15233732 NR Description: expressed protein [Arabidopsis thaliana]
  misc_feature (136)..(194): Homolog of NCBI NO: 15233732 NR Description: expressed protein [Arabidopsis thaliana]
  misc_feature (20)..(202): Homolog of NCBI NO: 15235502 NR Description: hypothetical protein [Arabidopsis thaliana]
  misc_feature (20)..(131): Homolog of NCBI NO: 28301931 NR Description: putative transposase [Oryza sativa (japonica
MMENSDVMKTVTDEASPMVEPFIGMEFESEEAAKSFYDNYATCMGFVMRVDAFRRSMRDGTVVWRRLVCNKEGFRRSRPRRSESRKPRAITREGCKALIVVKREKSGTWLVTKFEKEHNHPLLPLSPNVRRNFQLPQTPDEKDAKIRELSAELSRERRRCTALQQQLDMVLKEMEEHSNHLTININSVIQSVRDIESNTFTKQQT

SEQ ID NO: 104386 - protein, 204 aa, Arabidopsis thaliana
  peptide (1)..(204): Ceres Seq. ID no. 13614909
  misc_feature (34)..(198): Pfam Name: FAR1 family Pfam Description: FAR1 family
  misc_feature (1)..(204): Homolog of NCBI NO: 30680320 NR Description: expressed protein [Arabidopsis thaliana] unknown protein [Arabidopsis thaliana]
  misc_feature (1)..(204): Homolog of NCBI NO: 6041845 NR Description: hypothetical protein [Arabidopsis thaliana]
  misc_feature (1)..(195): Homolog of NCBI NO: 30689328 NR Description: expressed protein [Arabidopsis thaliana] unknown protein [Arabidopsis thaliana]
  misc_feature (1)..(195): Homolog of NCBI NO: 11358055 NR Description: hypothetical protein T16L24.20 - Arabidopsis >gi|6996283|emb|CAB75444.1| putative protein [Arabidopsis
  misc_feature (1)..(195): Homolog of NCBI NO: 18411179 NR Description: expressed protein [Arabidopsis thaliana] AT3g59470/T16L24_20 [Arabidopsis thaliana]
  misc_feature (35)..(195): Homolog of NCBI NO: 25370598 NR Description: hypothetical protein At2g43280 [imported] - thaliana >gi|2289005|gb|AAB64334.1| hypothetical protein thaliana] >gi|20197151|gb|AAM14941.1| hypothetical protein
  misc_feature (18)..(123): Homolog of NCBI NO: 15233732 NR Description: expressed protein [Arabidopsis thaliana]
  misc_feature (135)..(193): Homolog of NCBI NO: 15233732 NR Description: expressed protein [Arabidopsis thaliana]
  misc_feature (19)..(201): Homolog of NCBI NO: 15235502 NR Description: hypothetical protein [Arabidopsis thaliana]
  misc_feature (19)..(130): Homolog of NCBI NO: 28301931 NR Description: putative transposase [Oryza sativa (japonica
MENSDVMKTVTDEASPMVEPFIGMEFESEEAAKSFYDNYATCMGFVMRVDAFRRSMRDGTVVWRRLVCNKEGFRRSRPRRSESRKPRAITREGCKALIVVKREKSGTWLVTKFEKEHNHPLLPLSPNVRRNFQLPQTPDEKDAKIRELSAELSRERRRCTALQQQLDMVLKEMEEHSNHLTININSVIQSVRDIESNTFTKQQT

SEQ ID NO: 104387 - DNA, 1500 bp, Arabidopsis thaliana
  misc_feature (1)..(1500): Ceres Seq. ID no. 13614918
  misc_feature: MA Experiment ID: 108434 Result: Up-regulated in Transcription
  misc_feature: MA Experiment 108434 PARAMETER Experiment Name: At_Root_Tips_cDNA_P Parameter: Tissue Value: Root Tips
  misc_feature: MA Experiment ID: 108462 Result: Down-regulated in Transcription
  misc_feature: MA Experiment 108462 PARAMETER Experiment Name: At_Germinating_Seeds_cDNA_P Parameter: Age (day) Value: 2 vs. 0
  misc_feature: MA Experiment 108462 PARAMETER Experiment Name: At_Germinating_Seeds_cDNA_P Parameter: Tissue Value: Germinating Seeds
  misc_feature: MA Experiment ID: 108463 Result: Down-regulated in Transcription
  misc_feature: MA Experiment 108463 PARAMETER Experiment Name: At_Germinating_Seeds_cDNA_P Parameter: Age (day) Value: 3 vs. 0
  misc_feature: MA Experiment 108463 PARAMETER Experiment Name: At_Germinating_Seeds_cDNA_P Parameter: Tissue Value: Germinating Seeds
  misc_feature: MA Experiment ID: 108464 Result: Down-regulated in Transcription
  misc_feature: MA Experiment 108464 PARAMETER Experiment Name: At_Germinating_Seeds_cDNA_P Parameter: Age (day) Value: 4 vs. 0
  misc_feature: MA Experiment 108464 PARAMETER Experiment Name: At_Germinating_Seeds_cDNA_P Parameter: Tissue Value: Germinating Seeds
  misc_feature: MA Experiment ID: 108595 Result: Down-regulated in Transcription
  misc_feature: MA Experiment 108595 PARAMETER Experiment Name: At_Ler-pi_Ovule_cDNA_P Parameter: Plant Line Value: null
  misc_feature: MA Experiment ID: 20000111 Result: Down-regulated in Transcription
  misc_feature: MA Experiment 20000111 PARAMETER Experiment Name: At_42deg_Heat_cDNA_P Parameter: Temperature (deg C) Value: 42 vs. 22
  misc_feature: MA Experiment 20000111 PARAMETER Experiment Name: At_42deg_Heat_cDNA_P Parameter: Timepoint (hr) Value: 6
  misc_feature: MA Experiment 20000111 PARAMETER Experiment Name: At_42deg_Heat_cDNA_P Parameter: Tissue Value: Aerial
  misc_feature: MA Experiment ID: 20000173 Result: Down-regulated in Transcription
  misc_feature: MA Experiment 20000173 PARAMETER Experiment Name: At_42deg_Heat_P Parameter: Age (day) Value: 14
  misc_feature: MA Experiment 20000173 PARAMETER Experiment Name: At_42deg_Heat_P Parameter: Organism Value: A. thaliana
  misc_feature: MA Experiment 20000173 PARAMETER Experiment Name: At_42deg_Heat_P Parameter: Plant Line Value: WS
  misc_feature: MA Experiment 20000173 PARAMETER Experiment Name: At_42deg_Heat_P Parameter: Temperature (deg C) Value: 42 vs. 22
  misc_feature: MA Experiment 20000173 PARAMETER Experiment Name: At_42deg_Heat_P Parameter: Timepoint (hr) Value: 6
  misc_feature: MA Experiment 20000173 PARAMETER Experiment Name: At_42deg_Heat_P Parameter: Tissue Value: Aerial
aaaacaacatcaatggcaatgcacactgttcgattgtcgccggcgactcaacttcacggcggtatctctagcaatctgtcaccacccaatcgaaaacctaataattccatcgtccgatacggatgcggatcttcgaagcgtttccgtatcgtaacggtcttggcgtcactccgggaaaacgatgcaaacggaagggataactccgtgagagctatggaagtgaagaagatctttgaagactcgcctctgcttcctaagccgttatcatcgaaccagctcacggaatctgtctctaatggctcccgcgttcgtgttgcgtatcagggagtacgaggtgcatacagcgaatcagctgctgagaaggcttatccaaactgtgaagctgttccatgcgaagagtttgacactgcttttgaggcggttgagcggtggcttgttgacagagctgttttaccgattgagaactctttaggtggaagcatccatagaaattatgatcttctgctgcgacacaatttgcatattgtaggcgaagtcaagctagctgttcggcactgtttgttggctaaccacggtgtaaatattgaagatttgagaagggtgcttagccatccacaggctcttgcccaatgtgaaaacacgttaaccaaattggggttggtcagagaagcagtagatgatactgctggcgctgcgaagcaaattgcattcgaaaatttaaatgatgcagctgcagttgccagtgaaaaagctgcaaagatatatggtttgaacatagtcgctaaagatatccaggatgactgtgataatgttacaaggtttctaatgctcgcaagagaacccattatccctggaactaacagactctttaagacaagtatagttttctcgttagaggaagggcctggagtacttttcaaagcgcttgctgtgtttgcccttcggcaaatcaacctcacaaagattgaaagccgccctttaaggaaacatcctctccgagcatctggaggactaaaatactttgactatcttttctatgtggactttgaagcatctatggctgatgaagttgctcaaaacgcacttaggcatctcgaggagtttgctacctttttgcgggtactgggaagctacccagtggacactacaatgctctaaacatttcaaacatcttcttgtttgtgacagagatccgcttgatgatatcataatcctggtataaggagctatatccctgaggtgaggtctgagaggagtcaccaccttacaagacattccgctcttgttacaaattctgtttagttttccaaaaaagatcatctttgtttttagtaagaatgtagtcactaagtcagatatcaatgacaaataccaaagaactagtgttttttcgtgtttcatccatacatagatacttatcctgtgtcttttttagaaatttctttttgtatgacgtttcaaaattttgattgactattgttagtggtatatctttgagtt

SEQ ID NO: 104388 - protein, 385 aa, Arabidopsis thaliana; identical to SEQ ID NO: 41164
  peptide (1)..(385): Ceres Seq. ID no. 13614919
  misc_feature (105)..(282): Pfam Name: Prephenate dehydratase Pfam Description: Prephenate dehydratase
  misc_feature (5)..(385): Homolog of NCBI NO: 15231489 NR Description: prephenate dehydratase family [Arabidopsis
  misc_feature (5)..(385): Homolog of NCBI NO: 21537054 NR Description: putative P-protein: chorismate mutase, prephenate
  misc_feature (84)..(383): Homolog of NCBI NO: 34394031 NR Description: putative prephenate dehydratase [Oryza sativa
  misc_feature (14)..(381): Homolog of NCBI NO: 14596233 NR Description: Unknown protein [Arabidopsis thaliana]
  misc_feature (14)..(381): Homolog of NCBI NO: 15221096 NR Description: prephenate dehydratase family [Arabidopsis
  misc_feature (60)..(383): Homolog of NCBI NO: 18390869 NR Description: prephenate dehydratase family [Arabidopsis
  misc_feature (55)..(383): Homolog of NCBI NO: 15226259 NR Description: prephenate dehydratase family [Arabidopsis
  misc_feature (55)..(383): Homolog of NCBI NO: 21593283 NR Description: putative chorismate mutase/prephenate dehydratase
  misc_feature (84)..(385): Homolog of NCBI NO: 38347597 NR Description: OSJNBa0042I15.10 [Oryza sativa (japonica
  misc_feature (63)..(383): Homolog of NCBI NO: 15242928 NR Description: prephenate dehydratase family [Arabidopsis

SEQ ID NO: 104389 - protein, 381 aa, Arabidopsis thaliana; identical to SEQ ID NO: 41165
  peptide (1)..(381): Ceres Seq. ID no. 13614920
  misc_feature (101)..(278): Pfam Name: Prephenate dehydratase Pfam Description: Prephenate dehydratase
  misc_feature (1)..(381): Homolog of NCBI NO: 15231489 NR Description: prephenate dehydratase family [Arabidopsis
  misc_feature (1)..(381): Homolog of NCBI NO: 21537054 NR Description: putative P-protein: chorismate mutase, prephenate
  misc_feature (80)..(379): Homolog of NCBI NO: 34394031 NR Description: putative prephenate dehydratase [Oryza sativa
  misc_feature (10)..(377): Homolog of NCBI NO: 14596233 NR Description: Unknown protein [Arabidopsis thaliana]
  misc_feature (10)..(377): Homolog of NCBI NO: 15221096 NR Description: prephenate dehydratase family [Arabidopsis
  misc_feature (56)..(379): Homolog of NCBI NO: 18390869 NR Description: prephenate dehydratase family [Arabidopsis
  misc_feature (51)..(379): Homolog of NCBI NO: 15226259 NR Description: prephenate dehydratase family [Arabidopsis
  misc_feature (51)..(379): Homolog of NCBI NO: 21593283 NR Description: putative chorismate mutase/prephenate dehydratase
  misc_feature (80)..(381): Homolog of NCBI NO: 38347597 NR Description: OSJNBa0042I15.10 [Oryza sativa (japonica
  misc_feature (59)..(379): Homolog of NCBI NO: 15242928 NR Description: prephenate dehydratase family [Arabidopsis

SEQ ID NO: 104390 - protein, 379 aa, Arabidopsis thaliana; identical to SEQ ID NO: 41166
  peptide (1)..(379): Ceres Seq. ID no. 13614921
  misc_feature (99)..(276): Pfam Name: Prephenate dehydratase Pfam Description: Prephenate dehydratase
  misc_feature (1)..(379): Homolog of NCBI NO: 15231489 NR Description: prephenate dehydratase family [Arabidopsis
  misc_feature (1)..(379): Homolog of NCBI NO: 21537054 NR Description: putative P-protein: chorismate mutase, prephenate
  misc_feature (78)..(377): Homolog of NCBI NO: 34394031 NR Description: putative prephenate dehydratase [Oryza sativa
  misc_feature (8)..(375): Homolog of NCBI NO: 14596233 NR Description: Unknown protein [Arabidopsis thaliana]
  misc_feature (8)..(375): Homolog of NCBI NO: 15221096 NR Description: prephenate dehydratase family [Arabidopsis
  misc_feature (54)..(377): Homolog of NCBI NO: 18390869 NR Description: prephenate dehydratase family [Arabidopsis
  misc_feature (49)..(377): Homolog of NCBI NO: 15226259 NR Description: prephenate dehydratase family [Arabidopsis
  misc_feature (49)..(377): Homolog of NCBI NO: 21593283 NR Description: putative chorismate mutase/prephenate dehydratase
  misc_feature (78)..(379): Homolog of NCBI NO: 38347597 NR Description: OSJNBa0042I15.10 [Oryza sativa (japonica
  misc_feature (57)..(377): Homolog of NCBI NO: 15242928 NR Description: prephenate dehydratase family [Arabidopsis

SEQ ID NO: 104391 - DNA, 2427 bp, Arabidopsis thaliana
  misc_feature (1)..(2427): Ceres Seq. ID no. 13614928
  misc_feature: MA Experiment ID: 108434 Result: Down-regulated in Transcription
  misc_feature: MA Experiment 108434 PARAMETER Experiment Name: At_Root_Tips_cDNA_P Parameter: Tissue Value: Root Tips
  misc_feature: MA Experiment ID: 108463 Result: Up-regulated in Transcription
  misc_feature: MA Experiment 108463 PARAMETER Experiment Name: At_Germinating_Seeds_cDNA_P Parameter: Age (day) Value: 3 vs. 0
  misc_feature: MA Experiment 108463 PARAMETER Experiment Name: At_Germinating_Seeds_cDNA_P Parameter: Tissue Value: Germinating Seeds
  misc_feature: MA Experiment ID: 108464 Result: Up-regulated in Transcription
  misc_feature: MA Experiment 108464 PARAMETER Experiment Name: At_Germinating_Seeds_cDNA_P Parameter: Age (day) Value: 4 vs. 0
  misc_feature: MA Experiment 108464 PARAMETER Experiment Name: At_Germinating_Seeds_cDNA_P Parameter: Tissue Value: Germinating Seeds
  misc_feature: MA Experiment ID: 108474 Result: Down-regulated in Transcription
  misc_feature: MA Experiment 108474 PARAMETER Experiment Name: At_Drought_Flowers_cDNA_P Parameter: Timepoint (hr) Value: null
  misc_feature: MA Experiment 108474 PARAMETER Experiment Name: At_Drought_Flowers_cDNA_P Parameter: Treatment Value: Drought vs. No Drought
  misc_feature: MA Experiment ID: 108573 Result: Up-regulated in Transcription
  misc_feature: MA Experiment 108573 PARAMETER Experiment Name: At_Drought_cDNA_P Parameter: Timepoint (hr) Value: 6
  misc_feature: MA Experiment 108573 PARAMETER Experiment Name: At_Drought_cDNA_P Parameter: Tissue Value: Aerial
  misc_feature: MA Experiment 108573 PARAMETER Experiment Name: At_Drought_cDNA_P Parameter: Treatment Value: Drought vs. No Drought
  misc_feature: MA Experiment ID: 108577 Result: Up-regulated in Transcription
  misc_feature: MA Experiment 108577 PARAMETER Experiment Name: At_42deg_Heat_cDNA_P Parameter: Temperature (deg C) Value: 42 vs. 22
  misc_feature: MA Experiment 108577 PARAMETER Experiment Name: At_42deg_Heat_cDNA_P Parameter: Timepoint (hr) Value: 6
  misc_feature: MA Experiment 108577 PARAMETER Experiment Name: At_42deg_Heat_cDNA_P Parameter: Tissue Value: Aerial
  misc_feature: MA Experiment ID: 108595 Result: Down-regulated in Transcription
  misc_feature: MA Experiment 108595 PARAMETER Experiment Name: At_Ler-pi_Ovule_cDNA_P Parameter: Plant Line Value: null
  misc_feature: MA Experiment ID: 108605 Result: Up-regulated in Transcription
  misc_feature: MA Experiment 108605 PARAMETER Experiment Name: At_100uM_ABA_cDNA_P Parameter: Timepoint (hr) Value: 6
  misc_feature: MA Experiment 108605 PARAMETER Experiment Name: At_100uM_ABA_cDNA_P Parameter: Tissue Value: Aerial
  misc_feature: MA Experiment 108605 PARAMETER Experiment Name: At_100uM_ABA_cDNA_P Parameter: Treatment Value: 100uM ABA vs. No Treatment
  misc_feature: MA Experiment ID: 108607 Result: Up-regulated in Transcription
  misc_feature: MA Experiment 108607 PARAMETER Experiment Name: At_100uM_ABA_cDNA_P Parameter: Timepoint (hr) Value: 4
  misc_feature: MA Experiment 108607 PARAMETER Experiment Name: At_100uM_ABA_cDNA_P Parameter: Tissue Value: Aerial
  misc_feature: MA Experiment 108607 PARAMETER Experiment Name: At_100uM_ABA_cDNA_P Parameter: Treatment Value: 100uM ABA vs. No Treatment
  misc_feature: MA Experiment ID: 108668 Result: Up-regulated in Transcription
  misc_feature: MA Experiment 108668 PARAMETER Experiment Name: At_2mM_SA_cDNA_P Parameter: Plant Line Value: WS
  misc_feature: MA Experiment 108668 PARAMETER Experiment Name: At_2mM_SA_cDNA_P Parameter: Timepoint (hr) Value: 6
  misc_feature: MA Experiment 108668 PARAMETER Experiment Name: At_2mM_SA_cDNA_P Parameter: Treatment Value: 2mM SA vs. No Treatment
  misc_feature: MA Experiment ID: 20000089 Result: Down-regulated in Transcription
  misc_feature: MA Experiment ID: 20000090 Result: Down-regulated in Transcription
  misc_feature: MA Experiment ID: 20000169 Result: Up-regulated in Transcription
  misc_feature: MA Experiment 20000169 PARAMETER Experiment Name: At_100uM_ABA_P Parameter: Age (day) Value: 14
  misc_feature: MA Experiment 20000169 PARAMETER Experiment Name: At_100uM_ABA_P Parameter: Organism Value: A. thaliana
  misc_feature: MA Experiment 20000169 PARAMETER Experiment Name: At_100uM_ABA_P Parameter: Plant Line Value: WS
  misc_feature: MA Experiment 20000169 PARAMETER Experiment Name: At_100uM_ABA_P Parameter: Timepoint (hr) Value: 6
  misc_feature: MA Experiment 20000169 PARAMETER Experiment Name: At_100uM_ABA_P Parameter: Tissue Value: Aerial
  misc_feature: MA Experiment 20000169 PARAMETER Experiment Name: At_100uM_ABA_P Parameter: Treatment Value: 100uM ABA vs. No Treatment
  misc_feature: MA Experiment ID: 20000182 Result: Up-regulated in Transcription
  misc_feature: MA Experiment 20000182 PARAMETER Experiment Name: At_2mM_SA_P Parameter: Age (day) Value: 14
  misc_feature: MA Experiment 20000182 PARAMETER Experiment Name: At_2mM_SA_P Parameter: Organism Value: A. thaliana
  misc_feature: MA Experiment 20000182 PARAMETER Experiment Name: At_2mM_SA_P Parameter: Plant Line Value: WS
  misc_feature: MA Experiment 20000182 PARAMETER Experiment Name: At_2mM_SA_P Parameter: Timepoint (hr) Value: 6
  misc_feature: MA Experiment 20000182 PARAMETER Experiment Name: At_2mM_SA_P Parameter: Tissue Value: Aerial
  misc_feature: MA Experiment 20000182 PARAMETER Experiment Name: At_2mM_SA_P Parameter: Treatment Value: 2mM SA vs. No Treatment
  misc_feature: MA Experiment ID: 20000185 Result: Down-regulated in Transcription
  misc_feature: MA Experiment 20000185 PARAMETER Experiment Name: At_Roots__P Parameter: Age (day) Value: 7 vs. 21
  misc_feature: MA Experiment 20000185 PARAMETER Experiment Name: At_Roots__P Parameter: Organism Value: A. thaliana
  misc_feature: MA Experiment 20000185 PARAMETER Experiment Name: At_Roots__P Parameter: Tissue Value: Roots vs. Whole Plant
  misc_feature: MA Experiment ID: 20000234 Result: Down-regulated in Transcription
  misc_feature: MA Experiment 20000234 PARAMETER Experiment Name: At_Siliques_P Parameter: Age (day) Value: 21
  misc_feature: MA Experiment 20000234 PARAMETER Experiment Name: At_Siliques_P Parameter: Organism Value: A. thaliana
  misc_feature: MA Experiment 20000234 PARAMETER Experiment Name: At_Siliques_P Parameter: Plant Line Value: WS
  misc_feature: MA Experiment 20000234 PARAMETER Experiment Name: At_Siliques_P Parameter: Tissue Value: Less Than 5mm Siliques vs. Whole Plant
  misc_feature: MA Experiment ID: 20000265 Result: Up-regulated in Transcription
  misc_feature: MA Experiment 20000265 PARAMETER Experiment Name: At_Open_Flower_P Parameter: Age (day) Value: 21
  misc_feature: MA Experiment 20000265 PARAMETER Experiment Name: At_Open_Flower_P Parameter: Plant Line Value: WS
  misc_feature: MA Experiment 20000265 PARAMETER Experiment Name: At_Open_Flower_P Parameter: Tissue Value: Closed Flower vs. Whole Plant
  misc_feature: MA Experiment ID: 20000439 Result: Down-regulated in Transcription
  misc_feature: MA Experiment 20000439 PARAMETER Experiment Name: At_Roots__P Parameter: Age (day) Value: 14 vs. 21
  misc_feature: MA Experiment 20000439 PARAMETER Experiment Name: At_Roots__P Parameter: Organism Value: A. thaliana
  misc_feature: MA Experiment 20000439 PARAMETER Experiment Name: At_Roots__P Parameter: Tissue Value: Roots vs. Whole Plant
  misc_feature: MA Experiment ID: 20000445 Result: Up-regulated in Transcription
  misc_feature: MA Experiment 20000445 PARAMETER Experiment Name: At_100uM_NAA__P Parameter: Age (day) Value: 14
  misc_feature: MA Experiment 20000445 PARAMETER Experiment Name: At_100uM_NAA__P Parameter: Organism Value: A. thaliana
  misc_feature: MA Experiment 20000445 PARAMETER Experiment Name: At_100uM_NAA__P Parameter: Plant Line Value: WS
  misc_feature: MA Experiment 20000445 PARAMETER Experiment Name: At_100uM_NAA__P Parameter: Timepoint (hr) Value: 6
  misc_feature: MA Experiment 20000445 PARAMETER Experiment Name: At_100uM_NAA__P Parameter: Tissue Value: Aerial
  misc_feature: MA Experiment 20000445 PARAMETER Experiment Name: At_100uM_NAA__P Parameter: Treatment Value: 100uM NAA vs. No Treatment
  misc_feature: MA Experiment ID: 20000495 Result: Down-regulated in Transcription
  misc_feature: MA Experiment 20000495 PARAMETER Experiment Name: At_Guard_Cells_P Parameter: Harvest Date Value: 8/2/2002
  misc_feature: MA Experiment 20000495 PARAMETER Experiment Name: At_Guard_Cells_P Parameter: Organism Value: A. thaliana
  misc_feature: MA Experiment 20000495 PARAMETER Experiment Name: At_Guard_Cells_P Parameter: Tissue Value: Guard Cells vs. Leaves
  misc_feature: MA Experiment ID: 20000794 Result: Up-regulated in Transcription
  misc_feature: MA Experiment 20000794 PARAMETER Experiment Name: At_Petals_P Parameter: Age (day) Value: 23-25 days
  misc_feature: MA Experiment 20000794 PARAMETER Experiment Name: At_Petals_P Parameter: Plant Line Value: WS
  misc_feature: MA Experiment 20000794 PARAMETER Experiment Name: At_Petals_P Parameter: Tissue Value: Petals vs. Whole plant
  misc_feature: MA Experiment ID: 20001560 Result: Down-regulated in Transcription
  misc_feature: MA Experiment 20001560 PARAMETER Experiment Name: At_Drought_Soil_Dry_P Parameter: Age (day) Value: 28
  misc_feature: MA Experiment 20001560 PARAMETER Experiment Name: At_Drought_Soil_Dry_P Parameter: Organism Value: A. thaliana
  misc_feature: MA Experiment 20001560 PARAMETER Experiment Name: At_Drought_Soil_Dry_P Parameter: Plant Line Value: WS
  misc_feature: MA Experiment 20001560 PARAMETER Experiment Name: At_Drought_Soil_Dry_P Parameter: Post Timepoint (hr) Value: None
  misc_feature: MA Experiment 20001560 PARAMETER Experiment Name: At_Drought_Soil_Dry_P Parameter: Post-Treatment Value: None
  misc_feature: MA Experiment 20001560 PARAMETER Experiment Name: At_Drought_Soil_Dry_P Parameter: Timepoint (day) Value: 14
  misc_feature: MA Experiment 20001560 PARAMETER Experiment Name: At_Drought_Soil_Dry_P Parameter: Treatment Value: Drought vs. No Drought
agtcataaggacgacaccattacgcaacttagtcctcttacctctctctctctcgactctgttccaagaaattcctctacttaatacagctgattctacagattcctgctacgaaatttctgggtctgggttgatctttgtctcaccagtcaacccaattcaggactttgataaaggtggaaatggcggctttattagcttctcagagctgctgctatggcggtgagaccgcaagagtcaccaaagctattggtttcagtagctctttggagaatcatttcactggggaagccactcagtgttatggcagcaagtctaagagatttcgtattgagatgagacagtcggaattgccctctaaggttggaatcaatggacgttcagtcaaaatggttcctgcgagtgaggtggtgaagaggaaagatggtgtgaatggatcggctgggaaaggtgttaatggagcgagtttggttagtagtagaaacattaatggtgcggcgtcaactttggttaaggcaccaaagaaaacaacagaatcgtaccttcctccaccggttgaaggagttagggttcttccttctgatgaaggttttagctgggctgatgagaattatagctcacttcaacgcagtattgatgtttggtcatttgttatttccctgaggattcgtatcttgttcgataattcgaaatgggcttatgttggaggattcacagaagaaaaacagaaaagcagaagaagagaaacagcttcatggttgagagagagtgtattgcagcttggtccaacgtttatcaaactgggacagttgtcttcaactaggtcagacttgtttccgcgcgaattcgtggatgagctttccaagttgcaggacagagtccccgctttttctccagagaaagcaaagcgcttcattgaggctgaacttggggctcctattagtgtaatgtataaagaatttgaagagcaacccatagctgcagctagccttggtcaggtacacagagctgttttgcacaatggcgagaaagtggtagtaaaagtacaaagacccggactaaagaaacttttcgatattgatctacgaaatctgaagctgattgccgagtatttccagaaaagtgaatcatttggtacaaacgattgggttggtatctatgaagaatgtgccttaattttgtatcaagagattgactacataaacgaagctaagaacgctgacagattccggagagacttccggaatataaactgggtccgcgtacctttggtttattgggattactctgccatgaaggtcttgactttggagtatgtaccaggtgttaagatcaacaacttggacgccttagctgcacggggttttaaccgttctagaatcgcatcacgggccattgaagcttatcttatacagatactcaaaaccggcttctttcatgcggatccgcacccaggaaaccttgcaattgatgtagatgaatcaatcatctactatgacttcggcatgatgggagagatcaaaacatttactcggaagagattacttgatctcttctattctgtttatgaaaaagatgcaaaaaaggtcatgcaaaaccttatagaccttgaagcacttcaacccactggagatctttcatcggtaaggagatctgttcagtttttcttggacaacctattaagccaatcaccagatcagcaacagactttggcagctattggagaggatctgtttgcaatttcccaggatcagccattccgtttcccatcaactttcacctttgtcatccgagcattttccacacttgagggtattggttacatccttgatccagaattttcctttgtgaaggttgcggctccttatgcgcaggaactcctggatctaaaacaaaggcaacgctcgggaactcagcttgtccaagaaataagaaagcaggctgatgatgccaggtcttctactctgtctatgccatatcgagtgcagcgaatagaagagtttgtgaaagaactcgattcaggcgatctgaaactccgtgttcgggttcttgagtcggaaagagcagcccggaaagcgacaatactgcagatggcgacgatgtatacagttcttggaggaactctacttaatattggggttacatttagcaaccaaggaagtcagcttgttgccaatggatccttcattggagcagggatattcatgttattggtactgaggtctatgcaaagggtaaataagcttgataaatttgagaagatgatatgatgatgactggtggtctggtggatagtttattcttttaaagctccaaatatcagatatagaatttgtgatgtataggtatagcatgtatctttagctcccatacacaatatttataaattgtataaaaactgtttctaaggaaaggaaagtcaaagat

SEQ ID NO: 104392 - protein, 695 aa, Arabidopsis thaliana; identical to SEQ ID NO: 77178
  peptide (1)..(695): Ceres Seq. ID no. 13614929
  misc_feature (247)..(365): Pfam Name: ABC1 family Pfam Description: ABC1 family
  misc_feature (130)..(695): Homolog of NCBI NO: 19424003 NR Description: unknown protein [Arabidopsis thaliana]
  misc_feature (133)..(690): Homolog of NCBI NO: 23039589 NR Description: hypothetical protein [Trichodesmium erythraeum
  misc_feature (133)..(690): Homolog of NCBI NO: 23130618 NR Description: hypothetical protein [Nostoc punctiforme]
  misc_feature (133)..(690): Homolog of NCBI NO: 17232007 NR Description: hypothetical protein [Nostoc sp. PCC 7120]
  misc_feature (105)..(679): Homolog of NCBI NO: 16330264 NR Description: ABC1-like [Synechocystis sp. PCC 6803]
  misc_feature (79)..(512): Homolog of NCBI NO: 22328063 NR Description: ABC transporter-related [Arabidopsis thaliana]
  misc_feature (506)..(695): Homolog of NCBI NO: 22328063 NR Description: ABC transporter-related [Arabidopsis thaliana]
  misc_feature (79)..(415): Homolog of NCBI NO: 8843758 NR Description: ABC transporter-like [Arabidopsis thaliana]
  misc_feature (506)..(695): Homolog of NCBI NO: 8843758 NR Description: ABC transporter-like [Arabidopsis thaliana]
  misc_feature (399)..(512): Homolog of NCBI NO: 8843758 NR Description: ABC transporter-like [Arabidopsis thaliana]

SEQ ID NO: 104393 - protein, 644 aa, Arabidopsis thaliana; identical to SEQ ID NO: 38197
  peptide (1)..(644): Ceres Seq. ID no. 13614930
  misc_feature (196)..(314): Pfam Name: ABC1 family Pfam Description: ABC1 family
  misc_feature (79)..(644): Homolog of NCBI NO: 19424003 NR Description: unknown protein [Arabidopsis thaliana]
  misc_feature (82)..(639): Homolog of NCBI NO: 23039589 NR Description: hypothetical protein [Trichodesmium erythraeum
  misc_feature (82)..(639): Homolog of NCBI NO: 23130618 NR Description: hypothetical protein [Nostoc punctiforme]
  misc_feature (82)..(639): Homolog of NCBI NO: 17232007 NR Description: hypothetical protein [Nostoc sp. PCC 7120]
  misc_feature (54)..(628): Homolog of NCBI NO: 16330264 NR Description: ABC1-like [Synechocystis sp. PCC 6803]
  misc_feature (28)..(461): Homolog of NCBI NO: 22328063 NR Description: ABC transporter-related [Arabidopsis thaliana]
  misc_feature (455)..(644): Homolog of NCBI NO: 22328063 NR Description: ABC transporter-related [Arabidopsis thaliana]
  misc_feature (28)..(364): Homolog of NCBI NO: 8843758 NR Description: ABC transporter-like [Arabidopsis thaliana]
  misc_feature (455)..(644): Homolog of NCBI NO: 8843758 NR Description: ABC transporter-like [Arabidopsis thaliana]
  misc_feature (348)..(461): Homolog of NCBI NO: 8843758 NR Description: ABC transporter-like [Arabidopsis thaliana]

SEQ ID NO: 104394 - protein, 626 aa, Arabidopsis thaliana; identical to SEQ ID NO: 38198
  peptide (1)..(626): Ceres Seq. ID no. 13614931
  misc_feature (178)..(296): Pfam Name: ABC1 family Pfam Description: ABC1 family
  misc_feature (61)..(626): Homolog of NCBI NO: 19424003 NR Description: unknown protein [Arabidopsis thaliana]
  misc_feature (64)..(621): Homolog of NCBI NO: 23039589 NR Description: hypothetical protein [Trichodesmium erythraeum
  misc_feature (64)..(621): Homolog of NCBI NO: 23130618 NR Description: hypothetical protein [Nostoc punctiforme]
  misc_feature (64)..(621): Homolog of NCBI NO: 17232007 NR Description: hypothetical protein [Nostoc sp. PCC 7120]
  misc_feature (36)..(610): Homolog of NCBI NO: 16330264 NR Description: ABC1-like [Synechocystis sp. PCC 6803]
  misc_feature (10)..(443): Homolog of NCBI NO: 22328063 NR Description: ABC transporter-related [Arabidopsis thaliana]
  misc_feature (437)..(626): Homolog of NCBI NO: 22328063 NR Description: ABC transporter-related [Arabidopsis thaliana]
  misc_feature (10)..(346): Homolog of NCBI NO: 8843758 NR Description: ABC transporter-like [Arabidopsis thaliana]
  misc_feature (437)..(626): Homolog of NCBI NO: 8843758 NR Description: ABC transporter-like [Arabidopsis thaliana]
  misc_feature (330)..(443): Homolog of NCBI NO: 8843758 NR Description: ABC transporter-like [Arabidopsis thaliana]

SEQ ID NO: 104395 - DNA, 2604 bp, Arabidopsis thaliana
  misc_feature (1)..(2604): Ceres Seq. ID no. 13614932
  misc_feature: MA Experiment ID: 108462 Result: Down-regulated in Transcription
  misc_feature: MA Experiment 108462 PARAMETER Experiment Name: At_Germinating_Seeds_cDNA_P Parameter: Age (day) Value: 2 vs. 0
  misc_feature: MA Experiment 108462 PARAMETER Experiment Name: At_Germinating_Seeds_cDNA_P Parameter: Tissue Value: Germinating Seeds
  misc_feature: MA Experiment ID: 108463 Result: Down-regulated in Transcription
  misc_feature: MA Experiment 108463 PARAMETER Experiment Name: At_Germinating_Seeds_cDNA_P Parameter: Age (day) Value: 3 vs. 0
  misc_feature: MA Experiment 108463 PARAMETER Experiment Name: At_Germinating_Seeds_cDNA_P Parameter: Tissue Value: Germinating Seeds
  misc_feature: MA Experiment ID: 108573 Result: Up-regulated in Transcription
  misc_feature: MA Experiment 108573 PARAMETER Experiment Name: At_Drought_cDNA_P Parameter: Timepoint (hr) Value: 6
  misc_feature: MA Experiment 108573 PARAMETER Experiment Name: At_Drought_cDNA_P Parameter: Tissue Value: Aerial
  misc_feature: MA Experiment 108573 PARAMETER Experiment Name: At_Drought_cDNA_P Parameter: Treatment Value: Drought vs. No Drought
  misc_feature: MA Experiment ID: 108595 Result: Down-regulated in Transcription
  misc_feature: MA Experiment 108595 PARAMETER Experiment Name: At_Ler-pi_Ovule_cDNA_P Parameter: Plant Line Value: null
  misc_feature: MA Experiment ID: 20000224 Result: Down-regulated in Transcription
  misc_feature: MA Experiment ID: 20001451 Result: Down-regulated in Transcription
  misc_feature: MA Experiment 20001451 PARAMETER Experiment Name: At_Far-red-induction_P Parameter: Age (day) Value: 7
  misc_feature: MA Experiment 20001451 PARAMETER Experiment Name: At_Far-red-induction_P Parameter: Light Value: Far-red vs. White
  misc_feature: MA Experiment 20001451 PARAMETER Experiment Name: At_Far-red-induction_P Parameter: Organism Value: A. thaliana
  misc_feature: MA Experiment 20001451 PARAMETER Experiment Name: At_Far-red-induction_P Parameter: Plant Line Value: Columbia
  misc_feature: MA Experiment 20001451 PARAMETER Experiment Name: At_Far-red-induction_P Parameter: Timepoint (hr) Value: 24
  misc_feature: MA Experiment 20001451 PARAMETER Experiment Name: At_Far-red-induction_P Parameter: Tissue Value: Whole Plant
atgacgatatcaacggttatagcattcatgtccatgttcctagtatttgttatgtctggtccgatagtggtggagggacgtgcttttttcgtgttcggtgactcgctcgtcgacagtggcaacaacaactatctggtgacaactgcacgtgccgactctccaccgtatggaatcgattttccaactcggagaccaaccggccggttttccaacggtcttaacattccagatcttatcagtgaggcaatcggtaacgaagagccaccgttaccttaccttagtccagagctaaggggccggagtcttcttaacggtgctaatttcgcctccgctggtatcggaattctcaatgataccggatttcaattcatcaacattataagaatgtaccaacaactcgattacttccaacaataccaacaacgtgtgagtcgcttgattgggaaaccgcaaactcagcggctcgtgagtcaagcgcttgtattaatcacggtcggtggaaacgattttgtgaacaactatttcttgtttccatattccgctagatcacgccaattcactctaccggattacgtccgactcctaatttctgaatacaaaaaaatactattgaggttaaattcacttggagtgggtcgagttctagtgacaggagctggaccactaggatgtgcaccggccgaactggcgagatcaggtacgtcgaatggaagatgctcggccgagctacaacgagctgcatctctatatgatcctcagctacttcaaatgataaatgaacttaacaaaaaaattgggagaaatgtgtttattgctgctaacactaaccaaatgcaagaggattttctaagcactccacgaagatatggatttgtaacatcgaaggttgcttgttgcggacaagggccgtacaatgggatgggtttgtgtacggttctatcaaacttgtgtccgaaccgtgagttatacgtcttttgggatgcgtttcatccgactgagaaagcaaaccgcatgatagtccgacatatcttgaccggtaccaccaagtatatgaaccccatgaaccttaagcatgaaactttgaaaacaaaatccctacagagagatagattgggaattgaatttgggaatccaggtttagggatgaatcgatcaacgatgatgattatgaggattgaagagtcggcgattgttttgtctctgctcaaatcggatctccggccgatggaagacgttttatcggaattcgactctaagttcgaaagcgctcgttacctcagtgtctgcaattctctttccatgatgttgcaggatcagcagatgtttaagaatactgaacgtctaattgcatttggtatcatataccagtgttattcttcacagaagccatctttcaacccgtttttatctgaaatgataagtgctgcttgtaatgaacagctggaaaagtctgaaagggcatttcttctccacctgttacaatggaatagttacaacaacgtgaaagagattctcaaactctcagctgttgattatatcagatcgtttgatccttcaactcatgattttccggaactaggagagctgcaacgagagtatggcgacaaagccgatcctggaccatctagtcacatttttgcagactattccctgaaaaagctattgcatgatcctgatgttcctcgtgggtgtgatcctaactctccagagtttgatgtgcaagctggagtgaatcccagaattggatctggtgatagggatgaggcactatctggattcttaggaaatttgacaatggggggattaggtcctaggtggatccgtccatgtccaccaaggtacccagttcatcagagcgagttgctttggattgaccctgataacaagcatgagcttgtttgggacgataaaatgtgtgctgatactagcagtggtgcaacagttagagacttgcttgttaagggtttaaaggtgacactttcacctacggagcaagaggacatcattacagaattggcaaatgacccaaagcttgtctttcactgcggaataactccacggaagctgccgcaattagtagagcacaatcctcagatagcagttgaaattctcaccaagttgaataactccacagagattaatgactattatgaagctctaggaaatatggacatgagcctgcactcaatggaagttgtgaataggctcacaactgcagttgaacttcccaaggacttcatacggatgtacatcactaattgcatatcgtcttgtgagaacgctaagcaagacaaatacatgcagaataggcttgtacggcttgtttgcgtcttcttgcaaagcttaattcgtaacaagatcatcaacgtgaaggatctattcatagaagttcaagctttctgcattgagttttctcgggttcgagaagcagctggtctcttcaggcttttgaaacaattggatgaataatttactctttcttcttcttcttcttcttctaatcatcttcgtctccattttattgtattccctatttttgtagctaaagaaagtactttattttgaatccaagacagttttcgctttttctagagtttcattctc

SEQ ID NO: 104396 - protein, 822 aa, Arabidopsis thaliana
  peptide (1)..(822): Ceres Seq. ID no. 13614933
  misc_feature (29)..(343): Pfam Name: GDSL-like Lipase/Acylhydrolase Pfam Description: GDSL-like Lipase/Acylhydrolase
  misc_feature (382)..(822): Homolog of NCBI NO: 15238813 NR Description: expressed protein [Arabidopsis thaliana]
  misc_feature (382)..(822): Homolog of NCBI NO: 30686822 NR Description: expressed protein [Arabidopsis thaliana]
  misc_feature (382)..(822): Homolog of NCBI NO: 21539503 NR Description: putative protein [Arabidopsis thaliana]
  misc_feature (1)..(356): Homolog of NCBI NO: 15238814 NR Description: GDSL-motif lipase/hydrolase protein [Arabidopsis
  misc_feature (10)..(365): Homolog of NCBI NO: 15229265 NR Description: GDSL-motif lipase/hydrolase protein [Arabidopsis
  misc_feature (1)..(356): Homolog of NCBI NO: 15242808 NR Description: GDSL-motif lipase/hydrolase protein [Arabidopsis
  misc_feature (3)..(356): Homolog of NCBI NO: 15235421 NR Description: GDSL-motif lipase/hydrolase protein [Arabidopsis
  misc_feature (1)..(356): Homolog of NCBI NO: 32489520 NR Description: OSJNBa0043L24.11 [Oryza sativa (japonica
  misc_feature (27)..(356): Homolog of NCBI NO: 28071322 NR Description: P0705A05.30 [Oryza sativa (japonica
  misc_feature (7)..(356): Homolog of NCBI NO: 37535146 NR Description: putative early nodulin gene (Enod) related
MTISTVIAFMSMFLVFVMSGPIVVEGRAFFVFGDSLVDSGNNNYLVTTARADSPPYGIDFPTRRPTGRFSNGLNIPDLISEAIGNEEPPLPYLSPELRGRSLLNGANFASAGIGILNDTGFQFINIIRMYQQLDYFQQYQQRVSRLIGKPQTQRLVSQALVLITVGGNDFVNNYFLFPYSARSRQFTLPDYVRLLISEYKKILLRLNSLGVGRVLVTGAGPLGCAPAELARSGTSNGRCSAELQRAASLYDPQLLQMINELNKKIGRNVFIAANTNQMQEDFLSTPRRYGFVTSKVACCGQGPYNGMGLCTVLSNLCPNRELYVFWDAFHPTEKANRMIVRHILTGTTKYMNPMNLKHETLKTKSLQRDRLGIEFGNPGLGMNRSTMMIMRIEESAIVLSLLKSDLRPMEDVLSEFDSKFESARYLSVCNSLSMMLQDQQMFKNTERLIAFGIIYQCYSSQKPSFNPFLSEMISAACNEQLEKSERAFLLHLLQWNSYNNVKEILKLSAVDYIRSFDPSTHDFPELGELQREYGDKADPGPSSHIFADYSLKKLLHDPDVPRGCDPNSPEFDVQAGVNPRIGSGDRDEALSGFLGNLTMGGLGPRWIRPCPPRYPVHQSELLWIDPDNKHELVWDDKMCADTSSGATVRDLLVKGLKVTLSPTEQEDIITELANDPKLVFHCGITPRKLPQLVEHNPQIAVEILTKLNNSTEINDYYEALGNMDMSLHSMEVVNRLTTAVELPKDFIRMYITNCISSCENAKQDKYMQNRLVRLVCVFLQSLIRNKIINVKDLFIEVQAFCIEFSRVREAAGLFRLLKQLDE

SEQ ID NO: 104397 - protein, 813 aa, Arabidopsis thaliana
  peptide (1)..(813): Ceres Seq. ID no. 13614934
  misc_feature (20)..(334): Pfam Name: GDSL-like Lipase/Acylhydrolase Pfam Description: GDSL-like Lipase/Acylhydrolase
  misc_feature (373)..(813): Homolog of NCBI NO: 15238813 NR Description: expressed protein [Arabidopsis thaliana]
  misc_feature (373)..(813): Homolog of NCBI NO: 30686822 NR Description: expressed protein [Arabidopsis thaliana]
  misc_feature (373)..(813): Homolog of NCBI NO: 21539503 NR Description: putative protein [Arabidopsis thaliana]
  misc_feature (1)..(347): Homolog of NCBI NO: 15238814 NR Description: GDSL-motif lipase/hydrolase protein [Arabidopsis
  misc_feature (1)..(356): Homolog of NCBI NO: 15229265 NR Description: GDSL-motif lipase/hydrolase protein [Arabidopsis
  misc_feature (1)..(347): Homolog of NCBI NO: 15242808 NR Description: GDSL-motif lipase/hydrolase protein [Arabidopsis
  misc_feature (1)..(347): Homolog of NCBI NO: 15235421 NR Description: GDSL-motif lipase/hydrolase protein [Arabidopsis
  misc_feature (1)..(347): Homolog of NCBI NO: 32489520 NR Description: OSJNBa0043L24.11 [Oryza sativa (japonica
  misc_feature (18)..(347): Homolog of NCBI NO: 28071322 NR Description: P0705A05.30 [Oryza sativa (japonica
  misc_feature (1)..(347): Homolog of NCBI NO: 37535146 NR Description: putative early nodulin gene (Enod) related
MSMFLVFVMSGPIVVEGRAFFVFGDSLVDSGNNNYLVTTARADSPPYGIDFPTRRPTGRFSNGLNIPDLISEAIGNEEPPLPYLSPELRGRSLLNGANFASAGIGILNDTGFQFINIIRMYQQLDYFQQYQQRVSRLIGKPQTQRLVSQALVLITVGGNDFVNNYFLFPYSARSRQFTLPDYVRLLISEYKKILLRLNSLGVGRVLVTGAGPLGCAPAELARSGTSNGRCSAELQRAASLYDPQLLQMINELNKKIGRNVFIAANTNQMQEDFLSTPRRYGFVTSKVACCGQGPYNGMGLCTVLSNLCPNRELYVFWDAFHPTEKANRMIVRHILTGTTKYMNPMNLKHETLKTKSLQRDRLGIEFGNPGLGMNRSTMMIMRIEESAIVLSLLKSDLRPMEDVLSEFDSKFESARYLSVCNSLSMMLQDQQMFKNTERLIAFGIIYQCYSSQKPSFNPFLSEMISAACNEQLEKSERAFLLHLLQWNSYNNVKEILKLSAVDYIRSFDPSTHDFPELGELQREYGDKADPGPSSHIFADYSLKKLLHDPDVPRGCDPNSPEFDVQAGVNPRIGSGDRDEALSGFLGNLTMGGLGPRWIRPCPPRYPVHQSELLWIDPDNKHELVWDDKMCADTSSGATVRDLLVKGLKVTLSPTEQEDIITELANDPKLVFHCGITPRKLPQLVEHNPQIAVEILTKLNNSTEINDYYEALGNMDMSLHSMEVVNRLTTAVELPKDFIRMYITNCISSCENAKQDKYMQNRLVRLVCVFLQSLIRNKIINVKDLFIEVQAFCIEFSRVREAAGLFRLLKQLDE

SEQ ID NO: 104398 - protein, 811 aa, Arabidopsis thaliana
  peptide (1)..(811): Ceres Seq. ID no. 13614935
  misc_feature (18)..(332): Pfam Name: GDSL-like Lipase/Acylhydrolase Pfam Description: GDSL-like Lipase/Acylhydrolase
  misc_feature (371)..(811): Homolog of NCBI NO: 15238813 NR Description: expressed protein [Arabidopsis thaliana]
  misc_feature (371)..(811): Homolog of NCBI NO: 30686822 NR Description: expressed protein [Arabidopsis thaliana]
  misc_feature (371)..(811): Homolog of NCBI NO: 21539503 NR Description: putative protein [Arabidopsis thaliana]
  misc_feature (1)..(345): Homolog of NCBI NO: 15238814 NR Description: GDSL-motif lipase/hydrolase protein [Arabidopsis
  misc_feature (1)..(354): Homolog of NCBI NO: 15229265 NR Description: GDSL-motif lipase/hydrolase protein [Arabidopsis
  misc_feature (1)..(345): Homolog of NCBI NO: 15242808 NR Description: GDSL-motif lipase/hydrolase protein [Arabidopsis
  misc_feature (1)..(345): Homolog of NCBI NO: 15235421 NR Description: GDSL-motif lipase/hydrolase protein [Arabidopsis
  misc_feature (1)..(345): Homolog of NCBI NO: 32489520 NR Description: OSJNBa0043L24.11 [Oryza sativa (japonica
  misc_feature (16)..(345): Homolog of NCBI NO: 28071322 NR Description: P0705A05.30 [Oryza sativa (japonica
  misc_feature (1)..(345): Homolog of NCBI NO: 37535146 NR Description: putative early nodulin gene (Enod) related
MFLVFVMSGPIVVEGRAFFVFGDSLVDSGNNNYLVTTARADSPPYGIDFPTRRPTGRFSNGLNIPDLISEAIGNEEPPLPYLSPELRGRSLLNGANFASAGIGILNDTGFQFINIIRMYQQLDYFQQYQQRVSRLIGKPQTQRLVSQALVLITVGGNDFVNNYFLFPYSARSRQFTLPDYVRLLISEYKKILLRLNSLGVGRVLVTGAGPLGCAPAELARSGTSNGRCSAELQRAASLYDPQLLQMINELNKKIGRNVFIAANTNQMQEDFLSTPRRYGFVTSKVACCGQGPYNGMGLCTVLSNLCPNRELYVFWDAFHPTEKANRMIVRHILTGTTKYMNPMNLKHETLKTKSLQRDRLGIEFGNPGLGMNRSTMMIMRIEESAIVLSLLKSDLRPMEDVLSEFDSKFESARYLSVCNSLSMMLQDQQMFKNTERLIAFGIIYQCYSSQKPSFNPFLSEMISAACNEQLEKSERAFLLHLLQWNSYNNVKEILKLSAVDYIRSFDPSTHDFPELGELQREYGDKADPGPSSHIFADYSLKKLLHDPDVPRGCDPNSPEFDVQAGVNPRIGSGDRDEALSGFLGNLTMGGLGPRWIRPCPPRYPVHQSELLWIDPDNKHELVWDDKMCADTSSGATVRDLLVKGLKVTLSPTEQEDIITELANDPKLVFHCGITPRKLPQLVEHNPQIAVEILTKLNNSTEINDYYEALGNMDMSLHSMEVVNRLTTAVELPKDFIRMYITNCISSCENAKQDKYMQNRLVRLVCVFLQSLIRNKIINVKDLFIEVQAFCIEFSRVREAAGLFRLLKQLDE

SEQ ID NO: 104399 - DNA, 1668 bp, Arabidopsis thaliana
  misc_feature (1)..(1668): Ceres Seq. ID no. 13614936
  misc_feature: MA Experiment ID: 108461 Result: Up-regulated in Transcription
  misc_feature: MA Experiment 108461 PARAMETER Experiment Name: At_Germinating_Seeds_cDNA_P Parameter: Age (day) Value: 1 vs. 0
  misc_feature: MA Experiment 108461 PARAMETER Experiment Name: At_Germinating_Seeds_cDNA_P Parameter: Tissue Value: Germinating Seeds
  misc_feature: MA Experiment ID: 108577 Result: Down-regulated in Transcription
  misc_feature: MA Experiment 108577 PARAMETER Experiment Name: At_42deg_Heat_cDNA_P Parameter: Temperature (deg C) Value: 42 vs. 22
  misc_feature: MA Experiment 108577 PARAMETER Experiment Name: At_42deg_Heat_cDNA_P Parameter: Timepoint (hr) Value: 6
  misc_feature: MA Experiment 108577 PARAMETER Experiment Name: At_42deg_Heat_cDNA_P Parameter: Tissue Value: Aerial
  misc_feature: MA Experiment ID: 108585 Result: Down-regulated in Transcription
  misc_feature: MA Experiment 108585 PARAMETER Experiment Name: At_5mM_NaNP_cDNA_P Parameter: Timepoint (hr) Value: 6
  misc_feature: MA Experiment 108585 PARAMETER Experiment Name: At_5mM_NaNP_cDNA_P Parameter: Tissue Value: Aerial
  misc_feature: MA Experiment 108585 PARAMETER Experiment Name: At_5mM_NaNP_cDNA_P Parameter: Treatment Value: null
  misc_feature: MA Experiment ID: 20000093 Result: Down-regulated in Transcription
  misc_feature: MA Experiment 20000093 PARAMETER Experiment Name: At_42deg_Heat_cDNA_P Parameter: Temperature (deg C) Value: 42 vs. 22
  misc_feature: MA Experiment 20000093 PARAMETER Experiment Name: At_42deg_Heat_cDNA_P Parameter: Timepoint (hr) Value: 0.5
  misc_feature: MA Experiment 20000093 PARAMETER Experiment Name: At_42deg_Heat_cDNA_P Parameter: Tissue Value: Aerial
  misc_feature: MA Experiment ID: 20000111 Result: Down-regulated in Transcription
  misc_feature: MA Experiment 20000111 PARAMETER Experiment Name: At_42deg_Heat_cDNA_P Parameter: Temperature (deg C) Value: 42 vs. 22
  misc_feature: MA Experiment 20000111 PARAMETER Experiment Name: At_42deg_Heat_cDNA_P Parameter: Timepoint (hr) Value: 6
  misc_feature: MA Experiment 20000111 PARAMETER Experiment Name: At_42deg_Heat_cDNA_P Parameter: Tissue Value: Aerial
  misc_feature: MA Experiment ID: 20000112 Result: Down-regulated in Transcription
  misc_feature: MA Experiment 20000112 PARAMETER Experiment Name: At_42deg_Heat_cDNA_P Parameter: Temperature (deg C) Value: 42 vs. 22
  misc_feature: MA Experiment 20000112 PARAMETER Experiment Name: At_42deg_Heat_cDNA_P Parameter: Timepoint (hr) Value: 2
  misc_feature: MA Experiment 20000112 PARAMETER Experiment Name: At_42deg_Heat_cDNA_P Parameter: Tissue Value: Aerial
  misc_feature: MA Experiment ID: 20000113 Result: Down-regulated in Transcription
  misc_feature: MA Experiment 20000113 PARAMETER Experiment Name: At_42deg_Heat_cDNA_P Parameter: Temperature (deg C) Value: 42 vs. 22
  misc_feature: MA Experiment 20000113 PARAMETER Experiment Name: At_42deg_Heat_cDNA_P Parameter: Timepoint (hr) Value: 8
  misc_feature: MA Experiment 20000113 PARAMETER Experiment Name: At_42deg_Heat_cDNA_P Parameter: Tissue Value: Aerial
  misc_feature: MA Experiment ID: 20000144 Result: Down-regulated in Transcription
  misc_feature: MA Experiment 20000144 PARAMETER Experiment Name: At_42deg_Heat_cDNA_P Parameter: Temperature (deg C) Value: 42 vs. 22
  misc_feature: MA Experiment 20000144 PARAMETER Experiment Name: At_42deg_Heat_cDNA_P Parameter: Timepoint (hr) Value: 1
  misc_feature: MA Experiment 20000144 PARAMETER Experiment Name: At_42deg_Heat_cDNA_P Parameter: Tissue Value: Aerial
  misc_feature: MA Experiment ID: 20000171 Result: Down-regulated in Transcription
  misc_feature: MA Experiment 20000171 PARAMETER Experiment Name: At_42deg_Heat_P Parameter: Age (day) Value: 14
  misc_feature: MA Experiment 20000171 PARAMETER Experiment Name: At_42deg_Heat_P Parameter: Organism Value: A. thaliana
  misc_feature: MA Experiment 20000171 PARAMETER Experiment Name: At_42deg_Heat_P Parameter: Plant Line Value: WS
  misc_feature: MA Experiment 20000171 PARAMETER Experiment Name: At_42deg_Heat_P Parameter: Temperature (deg C) Value: 42 vs. 22
  misc_feature: MA Experiment 20000171 PARAMETER Experiment Name: At_42deg_Heat_P Parameter: Timepoint (hr) Value: 1
  misc_feature: MA Experiment 20000171 PARAMETER Experiment Name: At_42deg_Heat_P Parameter: Tissue Value: Aerial
  misc_feature: MA Experiment ID: 20000173 Result: Down-regulated in Transcription
  misc_feature: MA Experiment 20000173 PARAMETER Experiment Name: At_42deg_Heat_P Parameter: Age (day) Value: 14
  misc_feature: MA Experiment 20000173 PARAMETER Experiment Name: At_42deg_Heat_P Parameter: Organism Value: A. thaliana
  misc_feature: MA Experiment 20000173 PARAMETER Experiment Name: At_42deg_Heat_P Parameter: Plant Line Value: WS
  misc_feature: MA Experiment 20000173 PARAMETER Experiment Name: At_42deg_Heat_P Parameter: Temperature (deg C) Value: 42 vs. 22
  misc_feature: MA Experiment 20000173 PARAMETER Experiment Name: At_42deg_Heat_P Parameter: Timepoint (hr) Value: 6
  misc_feature: MA Experiment 20000173 PARAMETER Experiment Name: At_42deg_Heat_P Parameter: Tissue Value: Aerial
  misc_feature: MA Experiment ID: 20000234 Result: Up-regulated in Transcription
  misc_feature: MA Experiment 20000234 PARAMETER Experiment Name: At_Siliques_P Parameter: Age (day) Value: 21
  misc_feature: MA Experiment 20000234 PARAMETER Experiment Name: At_Siliques_P Parameter: Organism Value: A. thaliana
  misc_feature: MA Experiment 20000234 PARAMETER Experiment Name: At_Siliques_P Parameter: Plant Line Value: WS
  misc_feature: MA Experiment 20000234 PARAMETER Experiment Name: At_Siliques_P Parameter: Tissue Value: Less Than 5mm Siliques vs. Whole Plant
  misc_feature: MA Experiment ID: 20000265 Result: Up-regulated in Transcription
  misc_feature: MA Experiment 20000265 PARAMETER Experiment Name: At_Open_Flower_P Parameter: Age (day) Value: 21
  misc_feature: MA Experiment 20000265 PARAMETER Experiment Name: At_Open_Flower_P Parameter: Plant Line Value: WS
  misc_feature: MA Experiment 20000265 PARAMETER Experiment Name: At_Open_Flower_P Parameter: Tissue Value: Closed Flower vs. Whole Plant
  misc_feature: MA Experiment ID: 20000286 Result: Up-regulated in Transcription
  misc_feature: MA Experiment 20000286 PARAMETER Experiment Name: At_Open_Flower_P Parameter: Age (day) Value: 21
  misc_feature: MA Experiment 20000286 PARAMETER Experiment Name: At_Open_Flower_P Parameter: Plant Line Value: WS
  misc_feature: MA Experiment 20000286 PARAMETER Experiment Name: At_Open_Flower_P Parameter: Tissue Value: Half Open vs. Whole Plant
  misc_feature: MA Experiment ID: 20000438 Result: Up-regulated in Transcription
  misc_feature: MA Experiment 20000438 PARAMETER Experiment Name: At_Shoots__P Parameter: Age (day) Value: 14
  misc_feature: MA Experiment 20000438 PARAMETER Experiment Name: At_Shoots__P Parameter: Tissue Value: Shoots vs. Whole Plant
  misc_feature: MA Experiment ID: 20000794 Result: Up-regulated in Transcription
  misc_feature: MA Experiment 20000794 PARAMETER Experiment Name: At_Petals_P Parameter: Age (day) Value: 23-25 days
  misc_feature: MA Experiment 20000794 PARAMETER Experiment Name: At_Petals_P Parameter: Plant Line Value: WS
  misc_feature: MA Experiment 20000794 PARAMETER Experiment Name: At_Petals_P Parameter: Tissue Value: Petals vs. Whole plant
  misc_feature: MA Experiment ID: 20001248 Result: Down-regulated in Transcription
  misc_feature: MA Experiment 20001248 PARAMETER Experiment Name: At_Far-red-induction_P Parameter: Age (day) Value: 7
  misc_feature: MA Experiment 20001248 PARAMETER Experiment Name: At_Far-red-induction_P Parameter: Light Value: Far-red vs. White
  misc_feature: MA Experiment 20001248 PARAMETER Experiment Name: At_Far-red-induction_P Parameter: Organism Value: A. thaliana
  misc_feature: MA Experiment 20001248 PARAMETER Experiment Name: At_Far-red-induction_P Parameter: Plant Line Value: Columbia
  misc_feature: MA Experiment 20001248 PARAMETER Experiment Name: At_Far-red-induction_P Parameter: Timepoint (hr) Value: 4
  misc_feature: MA Experiment 20001248 PARAMETER Experiment Name: At_Far-red-induction_P Parameter: Tissue Value: Whole Plant
  misc_feature: MA Experiment ID: 20001450 Result: Down-regulated in Transcription
  misc_feature: MA Experiment 20001450 PARAMETER Experiment Name: At_Far-red-induction_P Parameter: Age (day) Value: 7
  misc_feature: MA Experiment 20001450 PARAMETER Experiment Name: At_Far-red-induction_P Parameter: Light Value: Far-red vs. White
  misc_feature: MA Experiment 20001450 PARAMETER Experiment Name: At_Far-red-induction_P Parameter: Organism Value: A. thaliana
  misc_feature: MA Experiment 20001450 PARAMETER Experiment Name: At_Far-red-induction_P Parameter: Plant Line Value: Columbia
  misc_feature: MA Experiment 20001450 PARAMETER Experiment Name: At_Far-red-induction_P Parameter: Timepoint (hr) Value: 8
  misc_feature: MA Experiment 20001450 PARAMETER Experiment Name: At_Far-red-induction_P Parameter: Tissue Value: Whole Plant
  misc_feature: MA Experiment ID: 20001558 Result: Up-regulated in Transcription
  misc_feature: MA Experiment 20001558 PARAMETER Experiment Name: At_Drought_Soil_Dry_P Parameter: Age (day) Value: 27
  misc_feature: MA Experiment 20001558 PARAMETER Experiment Name: At_Drought_Soil_Dry_P Parameter: Organism Value: A. thaliana
  misc_feature: MA Experiment 20001558 PARAMETER Experiment Name: At_Drought_Soil_Dry_P Parameter: Plant Line Value: WS
  misc_feature: MA Experiment 20001558 PARAMETER Experiment Name: At_Drought_Soil_Dry_P Parameter: Post Timepoint (hr) Value: 6
  misc_feature: MA Experiment 20001558 PARAMETER Experiment Name: At_Drought_Soil_Dry_P Parameter: Post-Treatment Value: Re-Water vs. No Drought
  misc_feature: MA Experiment 20001558 PARAMETER Experiment Name: At_Drought_Soil_Dry_P Parameter: Timepoint (day) Value: 13
  misc_feature: MA Experiment 20001558 PARAMETER Experiment Name: At_Drought_Soil_Dry_P Parameter: Treatment Value: Drought vs. No Drought
  misc_feature: MA Experiment ID: 20001560 Result: Up-regulated in Transcription
  misc_feature: MA Experiment 20001560 PARAMETER Experiment Name: At_Drought_Soil_Dry_P Parameter: Age (day) Value: 28
  misc_feature: MA Experiment 20001560 PARAMETER Experiment Name: At_Drought_Soil_Dry_P Parameter: Organism Value: A. thaliana
  misc_feature: MA Experiment 20001560 PARAMETER Experiment Name: At_Drought_Soil_Dry_P Parameter: Plant Line Value: WS
  misc_feature: MA Experiment 20001560 PARAMETER Experiment Name: At_Drought_Soil_Dry_P Parameter: Post Timepoint (hr) Value: None
  misc_feature: MA Experiment 20001560 PARAMETER Experiment Name: At_Drought_Soil_Dry_P Parameter: Post-Treatment Value: None
  misc_feature: MA Experiment 20001560 PARAMETER Experiment Name: At_Drought_Soil_Dry_P Parameter: Timepoint (day) Value: 14
  misc_feature: MA Experiment 20001560 PARAMETER Experiment Name: At_Drought_Soil_Dry_P Parameter: Treatment Value: Drought vs. No Drought
tttctaatatctctttccatttcttgaaatggtcctcctctcaccttaactttataagaatctgaccacctctcaggtttccagtttcttcactttctcgttctctggacactgaatgtgatacatatatagaagaagaaagctataagagattgatcgatggaggtgaatgttcttgcatccaagagaagtcttctcctttttcttcttattgtaagtctctctttgagccagaaggtcagacatatctctgcctttaacgacaccaaaccatacagacaagtcagtagcttgagacttgcgaggatccaaaagcacttgaacaagatcaacaagtctcctgtcttcaccattcagagtccagatggtgatgtaatagattgtgtacccaaaagaaagcagccagctttggatcatccactcttaaagcatcacaagattcagaaagcaccgaagaaaatgccgaagatgaagggaaaagatgatgatgttaaagaagcagagaatgtattggaaggtgcatggcaaatgtggcacgtgaacggcacgaggtgccctaaggggaccgttcccatacgacgcaacacaatgaacgatgtgctcagagccaagtctttgtttgactttggcaaaaagcgacggagtatttaccttgatcaacggacagaaaagcctgatgcccttggtaccaatggacatgagcatgcgatcgcttatacagaatcatcgtcggagatatatggagcaaaggcgactataaacgtttgggatccaaagatagaagaagtgaatgagtttagtctctctcagatttggattctctctggatctttcgtaggtcctgatctcaatagtattgaagctggctggcaggtcagtccggagctgtatggtgacaacagaccaagattgttcacttattggacgagtgattcatatcaagcaacaggatgttacaatcttctatgttcgggatttatccaaacaaataacaagattgccattggagcagccatatctcctctttctacgttcaaaggaaaccagtttgatatcacaatactcatttggaaggatccgaaaatggggaattggtggatgggtttaggggatagcacactagtcgggtattggccagccgagctattcacgcacttggccgaccacgcgactaccgtggaatggggcggtgaagtcgtcaacacacgtgcttcaggcaggcacacgacgacccaaatgggctctggtcattttccagacgaagggtttgggaaagcaagttattttcggaatttggaagttgtggattcggacaacagtctcgtaccggtgcatgatgtcaagatactagccgagaacaccgaatgttacgacattaagagttcgtatagtaatgaatggggaacttatttttactatggtgggccggggtttaatcctaggtgtaattgaaattaaagtgtacatagttcgggttggaggagtggaggaaaaaaaagagggggtcgaaatatgtaatttttttcaagtatgggtagtgaaagattgaatattggcttattgtttttgatttgtcatattgttggttgaaatctagtaatttattgccctcataggaaaaagaagtgtgtatgcaataatgaaagtatgagacaaatttttctttgc

SEQ ID NO: 104400 - protein, 430 aa, Arabidopsis thaliana; identical to SEQ ID NO: 41204
  peptide (1)..(430): Ceres Seq. ID no. 13614937
  misc_feature (193)..(388): Pfam Name: Arabidopsis proteins of unknown function Pfam Description: Arabidopsis proteins of unknown function
  misc_feature (1)..(430): Homolog of NCBI NO: 15238835 NR Description: expressed protein [Arabidopsis thaliana]
  misc_feature (7)..(429): Homolog of NCBI NO: 34393554 NR Description: putative carboxyl-terminal proteinase [Oryza
  misc_feature (43)..(429): Homolog of NCBI NO: 18400044 NR Description: expressed protein [Arabidopsis thaliana] gb|AAC16072.1~gene_id:MRP15.17~strong similarity to unknown [Arabidopsis thaliana] >gi|18700165|gb|AAL77694.1|
  misc_feature (43)..(429): Homolog of NCBI NO: 21593294 NR Description: putative carboxyl-terminal peptidase [Arabidopsis
  misc_feature (50)..(429): Homolog of NCBI NO: 15241244 NR Description: expressed protein [Arabidopsis thaliana]
  misc_feature (50)..(429): Homolog of NCBI NO: 15222707 NR Description: expressed protein [Arabidopsis thaliana]
  misc_feature (12)..(429): Homolog of NCBI NO: 21389708 NR Description: putative carboxyl-terminal proteinase [Gossypium
  misc_feature (48)..(429): Homolog of NCBI NO: 34393299 NR Description: putative DD1A protein [Oryza sativa (japonica
  misc_feature (129)..(429): Homolog of NCBI NO: 6573746 NR Description: F20B24.18 [Arabidopsis thaliana]
  misc_feature (8)..(117): Homolog of NCBI NO: 6573746 NR Description: F20B24.18 [Arabidopsis thaliana]

SEQ ID NO: 104401 - protein, 330 aa, Arabidopsis thaliana; identical to SEQ ID NO: 41205
  peptide (1)..(330): Ceres Seq. ID no. 13614938
  misc_feature (93)..(288): Pfam Name: Arabidopsis proteins of unknown function Pfam Description: Arabidopsis proteins of unknown function
  misc_feature (1)..(330): Homolog of NCBI NO: 15238835 NR Description: expressed protein [Arabidopsis thaliana]
  misc_feature (1)..(329): Homolog of NCBI NO: 34393554 NR Description: putative carboxyl-terminal proteinase [Oryza
  misc_feature (1)..(329): Homolog of NCBI NO: 18400044 NR Description: expressed protein [Arabidopsis thaliana] gb|AAC16072.1~gene_id:MRP15.17~strong similarity to unknown [Arabidopsis thaliana] >gi|18700165|gb|AAL77694.1|
  misc_feature (1)..(329): Homolog of NCBI NO: 21593294 NR Description: putative carboxyl-terminal peptidase [Arabidopsis
  misc_feature (1)..(329): Homolog of NCBI NO: 15241244 NR Description: expressed protein [Arabidopsis thaliana]
  misc_feature (1)..(329): Homolog of NCBI NO: 15222707 NR Description: expressed protein [Arabidopsis thaliana]
  misc_feature (1)..(329): Homolog of NCBI NO: 21389708 NR Description: putative carboxyl-terminal proteinase [Gossypium
  misc_feature (1)..(329): Homolog of NCBI NO: 34393299 NR Description: putative DD1A protein [Oryza sativa (japonica
  misc_feature (29)..(329): Homolog of NCBI NO: 6573746 NR Description: F20B24.18 [Arabidopsis thaliana]
  misc_feature (1)..(17): Homolog of NCBI NO: 6573746 NR Description: F20B24.18 [Arabidopsis thaliana]

SEQ ID NO: 104402 - protein, 327 aa, Arabidopsis thaliana; identical to SEQ ID NO: 41206
  peptide (1)..(327): Ceres Seq. ID no. 13614939
  misc_feature (90)..(285): Pfam Name: Arabidopsis proteins of unknown function Pfam Description: Arabidopsis proteins of unknown function
  misc_feature (1)..(327): Homolog of NCBI NO: 15238835 NR Description: expressed protein [Arabidopsis thaliana]
  misc_feature (1)..(326): Homolog of NCBI NO: 34393554 NR Description: putative carboxyl-terminal proteinase [Oryza
  misc_feature (1)..(326): Homolog of NCBI NO: 18400044 NR Description: expressed protein [Arabidopsis thaliana] gb|AAC16072.1~gene_id:MRP15.17~strong similarity to unknown [Arabidopsis thaliana] >gi|18700165|gb|AAL77694.1|
  misc_feature (1)..(326): Homolog of NCBI NO: 21593294 NR Description: putative carboxyl-terminal peptidase [Arabidopsis
  misc_feature (1)..(326): Homolog of NCBI NO: 15241244 NR Description: expressed protein [Arabidopsis thaliana]
  misc_feature (1)..(326): Homolog of NCBI NO: 15222707 NR Description: expressed protein [Arabidopsis thaliana]
  misc_feature (1)..(326): Homolog of NCBI NO: 21389708 NR Description: putative carboxyl-terminal proteinase [Gossypium
  misc_feature (1)..(326): Homolog of NCBI NO: 34393299 NR Description: putative DD1A protein [Oryza sativa (japonica
  misc_feature (26)..(326): Homolog of NCBI NO: 6573746 NR Description: F20B24.18 [Arabidopsis thaliana]
  misc_feature (1)..(14): Homolog of NCBI NO: 6573746 NR Description: F20B24.18 [Arabidopsis thaliana]

SEQ ID NO: 104403 - DNA, 2004 bp, Arabidopsis thaliana
  misc_feature (1)..(2004): Ceres Seq. ID no. 13614943
  misc_feature: MA Experiment ID: 108488 Result: Up-regulated in Transcription
  misc_feature: MA Experiment ID: 108595 Result: Down-regulated in Transcription
  misc_feature: MA Experiment 108595 PARAMETER Experiment Name: At_Ler-pi_Ovule_cDNA_P Parameter: Plant Line Value: null
  misc_feature: MA Experiment ID: 20000113 Result: Down-regulated in Transcription
  misc_feature: MA Experiment 20000113 PARAMETER Experiment Name: At_42deg_Heat_cDNA_P Parameter: Temperature (deg C) Value: 42 vs. 22
  misc_feature: MA Experiment 20000113 PARAMETER Experiment Name: At_42deg_Heat_cDNA_P Parameter: Timepoint (hr) Value: 8
  misc_feature: MA Experiment 20000113 PARAMETER Experiment Name: At_42deg_Heat_cDNA_P Parameter: Tissue Value: Aerial
  misc_feature: MA Experiment ID: 20000496 Result: Up-regulated in Transcription
  misc_feature: MA Experiment 20000496 PARAMETER Experiment Name: At_Guard_Cells_P Parameter: Harvest Date Value: 7/19/2002
  misc_feature: MA Experiment 20000496 PARAMETER Experiment Name: At_Guard_Cells_P Parameter: Organism Value: Canola
  misc_feature: MA Experiment 20000496 PARAMETER Experiment Name: At_Guard_Cells_P Parameter: Tissue Value: Guard Cells vs. Leaves
  misc_feature: MA Experiment ID: 20001560 Result: Up-regulated in Transcription
  misc_feature: MA Experiment 20001560 PARAMETER Experiment Name: At_Drought_Soil_Dry_P Parameter: Age (day) Value: 28
  misc_feature: MA Experiment 20001560 PARAMETER Experiment Name: At_Drought_Soil_Dry_P Parameter: Organism Value: A. thaliana
  misc_feature: MA Experiment 20001560 PARAMETER Experiment Name: At_Drought_Soil_Dry_P Parameter: Plant Line Value: WS
  misc_feature: MA Experiment 20001560 PARAMETER Experiment Name: At_Drought_Soil_Dry_P Parameter: Post Timepoint (hr) Value: None
  misc_feature: MA Experiment 20001560 PARAMETER Experiment Name: At_Drought_Soil_Dry_P Parameter: Post-Treatment Value: None
  misc_feature: MA Experiment 20001560 PARAMETER Experiment Name: At_Drought_Soil_Dry_P Parameter: Timepoint (day) Value: 14
  misc_feature: MA Experiment 20001560 PARAMETER Experiment Name: At_Drought_Soil_Dry_P Parameter: Treatment Value: Drought vs. No Drought
acattcattttctctggtctttgattgcttttcttttcactgcttaggttctttgtctgttaggtttagagagatcctttccaaagatccaaagctggaaactttctagtcaatgctgcttaagatctgactttttcccttcaatgtcgctctgaaatcccctaaatttttgggcccatcaggtgaataaagcggaggtcagaagatgggttctggtttaaatgacacattatctcggaactacaatggtttggagctatgggagataatagtgattgttctctccgcgatattcgttgtagttttagctatatcgctatggcttactttcagaagaaaaacctctagatcttcttctaatctaatccctgttagtcgccagattcctcctagtgttcctgaagagattaaagagattagagtcgacgaggtttcttcaagcaatggtgggaatggatacccctctattagtgagaaatttggcgataaagaacccgaaaaagggataaaagcagagtcagaaaatggcgatagtagccggtcaggctcgtttaatcacttggagaaaaaagacggatcgagcgtatcttctgctaatcctttgacagctccatctcctttgtctggtcttcctgagttttctcaccttggatggggacattggttcactcttagagatcttcagatggctactaatcagttttcaagggataatatcatcggtgatggtggatatggagttgtttaccgcggtaaccttgttaatggtactcctgttgctgttaaaaagttgctcaacaatttaggacaagctgataaagacttcagagttgaagttgaagctataggtcacgttcgacataaaaacttggtccgccttctcggatattgtatggaaggaacgcagaggatgctggtgtatgagtatgttaacaatggaaatttggagcaatggctccgtggagacaatcaaaatcatgagtatcttacatgggaggcacgagtgaaaattcttattgggacagccaaagcgctcgcgtaccttcacgaggcgattgagccaaaagtggtgcacagagacattaagtctagtaacattctgattgatgacaaattcaattctaaaatttctgactttggacttgctaaactacttggtgctgataagagttttataactactagagttatgggtaccttcggttacgtagctccagagtatgcgaattccggtcttctgaatgagaaaagcgatgtctacagcttcggggttgtactcttggaagctataactggtagatatccggtagactatgctcgtccaccacccgaggtacatttggtggagtggctgaagatgatggtccaacaaagacgatcagaagaagtggttgatccaaaccttgaaacaaaaccatctacaagtgctttgaaaagaacactattgactgctttgagatgtgttgatccaatgtctgagaaaagaccgaggatgagccaagttgcacgtatgcttgaatccgaagaatacccaattgctagagaggataggagaagacgaaggagtcagaacgggacaacaagagattcagatcctccgaggaacagcacagacactgacaagagtgagtaccatgacctaaagcctgaaggtggatagccattggaaataatggaggtgtaaattgtcgtaaagtctcgagctttatgggaagtttcaagtccttagttcttctccagatcttctgcgttatttgatgtttcttttcttttgtaataaggagagagagagagagtgaatgagttagtgagtgttcatcgttcgtttgttgcttgtatagtatttgtttgttgtattatcgtttgcttctccacgttttgcaatgtaggttgtttttggactaagtaaacgctatttgcaggttttgtagggtatgtaagtctttgagagaaacgacgtgtaatttgcaatttgcttgtggaagatattgttatttgagagag

SEQ ID NO: 104404 - protein, 484 aa, Arabidopsis thaliana; identical to SEQ ID NO: 29831
  peptide (1)..(484): Ceres Seq. ID no. 13614944
  misc_feature (166)..(437): Pfam Name: Protein kinase domain Pfam Description: Protein kinase domain
  misc_feature (1)..(484): Homolog of NCBI NO: 15238840 NR Description: protein kinase family [Arabidopsis thaliana]
  misc_feature (1)..(473): Homolog of NCBI NO: 22331140 NR Description: protein kinase family [Arabidopsis thaliana]
  misc_feature (1)..(475): Homolog of NCBI NO: 18405946 NR Description: protein kinase family [Arabidopsis thaliana]
  misc_feature (1)..(475): Homolog of NCBI NO: 21593085 NR Description: Putative protein kinase [Arabidopsis thaliana]
  misc_feature (1)..(475): Homolog of NCBI NO: 25404144 NR Description: probable protein kinase F25P12.84 [imported] - thaliana >gi|9954741|gb|AAG09092.1|AC009323_3 Putative protein
  misc_feature (22)..(481): Homolog of NCBI NO: 34894708 NR Description: Putative protein kinase [Oryza sativa (japonica group)] >gi|12328581|dbj|BAB21240.1| Putative protein kinase
  misc_feature (15)..(474): Homolog of NCBI NO: 15217511 NR Description: protein kinase family [Arabidopsis thaliana]
  misc_feature (3)..(455): Homolog of NCBI NO: 15228043 NR Description: protein kinase family [Arabidopsis thaliana]
  misc_feature (21)..(482): Homolog of NCBI NO: 15231637 NR Description: protein kinase family [Arabidopsis thaliana]
  misc_feature (110)..(442): Homolog of NCBI NO: 34912364 NR Description: putative receptor-like protein kinase [Oryza

SEQ ID NO: 104405 - protein, 324 aa, Arabidopsis thaliana; identical to SEQ ID NO: 29832
  peptide (1)..(324): Ceres Seq. ID no. 13614945
  misc_feature (6)..(277): Pfam Name: Protein kinase domain Pfam Description: Protein kinase domain
  misc_feature (1)..(324): Homolog of NCBI NO: 15238840 NR Description: protein kinase family [Arabidopsis thaliana]
  misc_feature (1)..(313): Homolog of NCBI NO: 22331140 NR Description: protein kinase family [Arabidopsis thaliana]
  misc_feature (1)..(315): Homolog of NCBI NO: 18405946 NR Description: protein kinase family [Arabidopsis thaliana]
  misc_feature (1)..(315): Homolog of NCBI NO: 21593085 NR Description: Putative protein kinase [Arabidopsis thaliana]
  misc_feature (1)..(315): Homolog of NCBI NO: 25404144 NR Description: probable protein kinase F25P12.84 [imported] - thaliana >gi|9954741|gb|AAG09092.1|AC009323_3 Putative protein
  misc_feature (1)..(321): Homolog of NCBI NO: 34894708 NR Description: Putative protein kinase [Oryza sativa (japonica group)] >gi|12328581|dbj|BAB21240.1| Putative protein kinase
  misc_feature (1)..(314): Homolog of NCBI NO: 15217511 NR Description: protein kinase family [Arabidopsis thaliana]
  misc_feature (1)..(295): Homolog of NCBI NO: 15228043 NR Description: protein kinase family [Arabidopsis thaliana]
  misc_feature (1)..(322): Homolog of NCBI NO: 15231637 NR Description: protein kinase family [Arabidopsis thaliana]
  misc_feature (1)..(282): Homolog of NCBI NO: 34912364 NR Description: putative receptor-like protein kinase [Oryza

SEQ ID NO: 104406 - protein, 255 aa, Arabidopsis thaliana; identical to SEQ ID NO: 29833
  peptide (1)..(255): Ceres Seq. ID no. 13614946
  misc_feature (1)..(208): Pfam Name: Protein kinase domain Pfam Description: Protein kinase domain
  misc_feature (1)..(255): Homolog of NCBI NO: 15238840 NR Description: protein kinase family [Arabidopsis thaliana]
  misc_feature (1)..(244): Homolog of NCBI NO: 22331140 NR Description: protein kinase family [Arabidopsis thaliana]
  misc_feature (1)..(246): Homolog of NCBI NO: 18405946 NR Description: protein kinase family [Arabidopsis thaliana]
  misc_feature (1)..(246): Homolog of NCBI NO: 21593085 NR Description: Putative protein kinase [Arabidopsis thaliana]
  misc_feature (1)..(246): Homolog of NCBI NO: 25404144 NR Description: probable protein kinase F25P12.84 [imported] - thaliana >gi|9954741|gb|AAG09092.1|AC009323_3 Putative protein
  misc_feature (1)..(252): Homolog of NCBI NO: 34894708 NR Description: Putative protein kinase [Oryza sativa (japonica group)] >gi|12328581|dbj|BAB21240.1| Putative protein kinase
  misc_feature (1)..(245): Homolog of NCBI NO: 15217511 NR Description: protein kinase family [Arabidopsis thaliana]
  misc_feature (1)..(226): Homolog of NCBI NO: 15228043 NR Description: protein kinase family [Arabidopsis thaliana]
  misc_feature (1)..(253): Homolog of NCBI NO: 15231637 NR Description: protein kinase family [Arabidopsis thaliana]
  misc_feature (1)..(213): Homolog of NCBI NO: 34912364 NR Description: putative receptor-like protein kinase [Oryza

SEQ ID NO: 104407 - DNA, 1562 bp, Arabidopsis thaliana
  misc_feature (1)..(1562): Ceres Seq. ID no. 13614947
  misc_feature: MA Experiment ID: 20000184 Result: Down-regulated in Transcription
  misc_feature: MA Experiment 20000184 PARAMETER Experiment Name: At_Shoots__P Parameter: Age (day) Value: 7
  misc_feature: MA Experiment 20000184 PARAMETER Experiment Name: At_Shoots__P Parameter: Tissue Value: Shoots vs. Whole Plant
  misc_feature: MA Experiment ID: 20000234 Result: Down-regulated in Transcription
  misc_feature: MA Experiment 20000234 PARAMETER Experiment Name: At_Siliques_P Parameter: Age (day) Value: 21
  misc_feature: MA Experiment 20000234 PARAMETER Experiment Name: At_Siliques_P Parameter: Organism Value: A. thaliana
  misc_feature: MA Experiment 20000234 PARAMETER Experiment Name: At_Siliques_P Parameter: Plant Line Value: WS
  misc_feature: MA Experiment 20000234 PARAMETER Experiment Name: At_Siliques_P Parameter: Tissue Value: Less Than 5mm Siliques vs. Whole Plant
  misc_feature: MA Experiment ID: 20000265 Result: Down-regulated in Transcription
  misc_feature: MA Experiment 20000265 PARAMETER Experiment Name: At_Open_Flower_P Parameter: Age (day) Value: 21
  misc_feature: MA Experiment 20000265 PARAMETER Experiment Name: At_Open_Flower_P Parameter: Plant Line Value: WS
  misc_feature: MA Experiment 20000265 PARAMETER Experiment Name: At_Open_Flower_P Parameter: Tissue Value: Closed Flower vs. Whole Plant
  misc_feature: MA Experiment ID: 20000794 Result: Up-regulated in Transcription
  misc_feature: MA Experiment 20000794 PARAMETER Experiment Name: At_Petals_P Parameter: Age (day) Value: 23-25 days
  misc_feature: MA Experiment 20000794 PARAMETER Experiment Name: At_Petals_P Parameter: Plant Line Value: WS
  misc_feature: MA Experiment 20000794 PARAMETER Experiment Name: At_Petals_P Parameter: Tissue Value: Petals vs. Whole plant
  misc_feature: MA Experiment ID: 20001558 Result: Down-regulated in Transcription
  misc_feature: MA Experiment 20001558 PARAMETER Experiment Name: At_Drought_Soil_Dry_P Parameter: Age (day) Value: 27
  misc_feature: MA Experiment 20001558 PARAMETER Experiment Name: At_Drought_Soil_Dry_P Parameter: Organism Value: A. thaliana
  misc_feature: MA Experiment 20001558 PARAMETER Experiment Name: At_Drought_Soil_Dry_P Parameter: Plant Line Value: WS
  misc_feature: MA Experiment 20001558 PARAMETER Experiment Name: At_Drought_Soil_Dry_P Parameter: Post Timepoint (hr) Value: 6
  misc_feature: MA Experiment 20001558 PARAMETER Experiment Name: At_Drought_Soil_Dry_P Parameter: Post-Treatment Value: Re-Water vs. No Drought
  misc_feature: MA Experiment 20001558 PARAMETER Experiment Name: At_Drought_Soil_Dry_P Parameter: Timepoint (day) Value: 13
  misc_feature: MA Experiment 20001558 PARAMETER Experiment Name: At_Drought_Soil_Dry_P Parameter: Treatment Value: Drought vs. No Drought
  misc_feature: MA Experiment ID: 20001560 Result: Down-regulated in Transcription
  misc_feature: MA Experiment 20001560 PARAMETER Experiment Name: At_Drought_Soil_Dry_P Parameter: Age (day) Value: 28
  misc_feature: MA Experiment 20001560 PARAMETER Experiment Name: At_Drought_Soil_Dry_P Parameter: Organism Value: A. thaliana
  misc_feature: MA Experiment 20001560 PARAMETER Experiment Name: At_Drought_Soil_Dry_P Parameter: Plant Line Value: WS
  misc_feature: MA Experiment 20001560 PARAMETER Experiment Name: At_Drought_Soil_Dry_P Parameter: Post Timepoint (hr) Value: None
  misc_feature: MA Experiment 20001560 PARAMETER Experiment Name: At_Drought_Soil_Dry_P Parameter: Post-Treatment Value: None
  misc_feature: MA Experiment 20001560 PARAMETER Experiment Name: At_Drought_Soil_Dry_P Parameter: Timepoint (day) Value: 14
  misc_feature: MA Experiment 20001560 PARAMETER Experiment Name: At_Drought_Soil_Dry_P Parameter: Treatment Value: Drought vs. No Drought
acttgaatagagatcattcgtatttcatcgacgtttctaattcgcaatcacaattgttttcttcaaggaattggtttgcttgctttgatcctcagttttgtcaaaggtcttttttttttttcctggacttgctaaaatctcttgtggcttttgctctgatacttgttagtttgggtttcgtgagtctcgctttataaaggatatgggacaaaagagatggttcttcttgttggcaatttttgtttgtcttgtttcatcttcatgtggtagagttctcaagtttaagagcgatgatggtcgacctgtgtacaatcatacgcttgccatcacacttgtggagtatacttctgcggtctatatgtctgatttgtcagaactcttcacttggacatgcgaaagatgcaatggtttgacaaagggttttgaggtaatagagataatagttgacgttgagcactgcttacaggcatatgttggggtggctaaggatttgaatgctatcattattgcatttcggggaactcaagaacaccatacaaaattgggtctcagacttgttctggaaacagctcgatctaaattaccctgatatgccagatgcaatggtgcaccatggcttttatagtgcttatcacaatacaactgtacggcctgcagttttggatgcagtaaaacgagcaaaggaatcctatggggccaacctcaacatcatggtgactggtcattcaatgggaggagccatggcttccttttgtgcgctagacctagttgttaatgaaggagaagaaaacgtacaagttatgacatttgggcaacctcgtgttgggaatgctgcttttgcatcttatttcaatttgcttgtgcctaataccttccggatcatacatgaccgtgacatagttcctcatctgcctccttactatcatcttttccctcaaaaaacatatcaccacttccccacagaggtgtggttgacagaactaagtattttgaatattgttatccgtggtgtggaaaaagtttgtgacaacaccggtgaagatcctacatgcagcagatcggtaatgggaaatagcatatctgaccatttaacgtactttggagtggagttgatgggtgagacttggaggcaatgtaacatagtgatgggccatgagatggagagttacagtaggaaagattcaaagggtaacatattcctttcgcggacagttccttccacggaggtaatcaaaacaaaaagtatatccaaaaccggaatctcaagtctataggagttggttgattcgagactcgaacaagaatgcttgcttgaaagggaggttgggagattcaaatgtgcaggaagaagaagggttctttcattctttgtggtcgtcaaagaaagtgaaacaaatgacaatcaagacattgtaaataagtcgtaggttgataccataataccatgtagcaaaaacaatacactgttcatttgttattcccttaatttaaatccatgatcacatatgtattggattcaaccttgtaaatatgtgaatgaatatccaattgctgtggatggt

SEQ ID NO: 104408 - protein, 259 aa, Arabidopsis thaliana
  peptide (1)..(259): Ceres Seq. ID no. 13614948
  misc_feature (8)..(259): Homolog of NCBI NO: 15238889 NR Description: lipase (class 3) family [Arabidopsis thaliana]
  misc_feature (8)..(259): Homolog of NCBI NO: 18418946 NR Description: lipase (class 3) family [Arabidopsis thaliana] AT5g18630/T1A4_10 [Arabidopsis thaliana]
  misc_feature (8)..(188): Homolog of NCBI NO: 30686925 NR Description: lipase (class 3) family [Arabidopsis thaliana]
  misc_feature (8)..(238): Homolog of NCBI NO: 21425569 NR Description: triacylglycerol Lipase [Triticum aestivum]
  misc_feature (8)..(238): Homolog of NCBI NO: 21425571 NR Description: triacylglycerol lipase [Triticum aestivum]
  misc_feature (8)..(250): Homolog of NCBI NO: 34395192 NR Description: putative triacylglycerol lipase [Oryza sativa
  misc_feature (11)..(250): Homolog of NCBI NO: 34899296 NR Description: putative triacylglycerol lipase [Oryza sativa
  misc_feature (8)..(238): Homolog of NCBI NO: 34907212 NR Description: P0492G09.26 [Oryza sativa (japonica
  misc_feature (14)..(204): Homolog of NCBI NO: 21166167 NR Description: triacylglycerol lipase-like protein lipase [Dictyostelium discoideum] >gi|28829565|gb|AAO52083.1|
  misc_feature (12)..(204): Homolog of NCBI NO: 230348 NR Description: Triacylglycerol Acylhydrolase (E.C.3.1.1.3)
MLSLLHFGELKNTIQNWVSDLFWKQLDLNYPDMPDAMVHHGFYSAYHNTTVRPAVLDAVKRAKESYGANLNIMVTGHSMGGAMASFCALDLVVNEGEENVQVMTFGQPRVGNAAFASYFNLLVPNTFRIIHDRDIVPHLPPYYHLFPQKTYHHFPTEVWLTELSILNIVIRGVEKVCDNTGEDPTCSRSVMGNSISDHLTYFGVELMGETWRQCNIVMGHEMESYSRKDSKGNIFLSRTVPSTEVIKTKSISKTGISSL

SEQ ID NO: 104409 - protein, 227 aa, Arabidopsis thaliana
  peptide (1)..(227): Ceres Seq. ID no. 13614949
  misc_feature (1)..(227): Homolog of NCBI NO: 15238889 NR Description: lipase (class 3) family [Arabidopsis thaliana]
  misc_feature (1)..(227): Homolog of NCBI NO: 18418946 NR Description: lipase (class 3) family [Arabidopsis thaliana] AT5g18630/T1A4_10 [Arabidopsis thaliana]
  misc_feature (1)..(156): Homolog of NCBI NO: 30686925 NR Description: lipase (class 3) family [Arabidopsis thaliana]
  misc_feature (1)..(206): Homolog of NCBI NO: 21425569 NR Description: triacylglycerol Lipase [Triticum aestivum]
  misc_feature (1)..(206): Homolog of NCBI NO: 21425571 NR Description: triacylglycerol lipase [Triticum aestivum]
  misc_feature (1)..(218): Homolog of NCBI NO: 34395192 NR Description: putative triacylglycerol lipase [Oryza sativa
  misc_feature (1)..(218): Homolog of NCBI NO: 34899296 NR Description: putative triacylglycerol lipase [Oryza sativa
  misc_feature (1)..(206): Homolog of NCBI NO: 34907212 NR Description: P0492G09.26 [Oryza sativa (japonica
  misc_feature (1)..(172): Homolog of NCBI NO: 21166167 NR Description: triacylglycerol lipase-like protein lipase [Dictyostelium discoideum] >gi|28829565|gb|AAO52083.1|
  misc_feature (1)..(172): Homolog of NCBI NO: 230348 NR Description: Triacylglycerol Acylhydrolase (E.C.3.1.1.3)
MPDAMVHHGFYSAYHNTTVRPAVLDAVKRAKESYGANLNIMVTGHSMGGAMASFCALDLVVNEGEENVQVMTFGQPRVGNAAFASYFNLLVPNTFRIIHDRDIVPHLPPYYHLFPQKTYHHFPTEVWLTELSILNIVIRGVEKVCDNTGEDPTCSRSVMGNSISDHLTYFGVELMGETWRQCNIVMGHEMESYSRKDSKGNIFLSRTVPSTEVIKTKSISKTGISSL

SEQ ID NO: 104410 - protein, 223 aa, Arabidopsis thaliana
  peptide (1)..(223): Ceres Seq. ID no. 13614950
  misc_feature (1)..(223): Homolog of NCBI NO: 15238889 NR Description: lipase (class 3) family [Arabidopsis thaliana]
  misc_feature (1)..(223): Homolog of NCBI NO: 18418946 NR Description: lipase (class 3) family [Arabidopsis thaliana] AT5g18630/T1A4_10 [Arabidopsis thaliana]
  misc_feature (1)..(152): Homolog of NCBI NO: 30686925 NR Description: lipase (class 3) family [Arabidopsis thaliana]
  misc_feature (1)..(202): Homolog of NCBI NO: 21425569 NR Description: triacylglycerol Lipase [Triticum aestivum]
  misc_feature (1)..(202): Homolog of NCBI NO: 21425571 NR Description: triacylglycerol lipase [Triticum aestivum]
  misc_feature (1)..(214): Homolog of NCBI NO: 34395192 NR Description: putative triacylglycerol lipase [Oryza sativa
  misc_feature (1)..(214): Homolog of NCBI NO: 34899296 NR Description: putative triacylglycerol lipase [Oryza sativa
  misc_feature (1)..(202): Homolog of NCBI NO: 34907212 NR Description: P0492G09.26 [Oryza sativa (japonica
  misc_feature (1)..(168): Homolog of NCBI NO: 21166167 NR Description: triacylglycerol lipase-like protein lipase [Dictyostelium discoideum] >gi|28829565|gb|AAO52083.1|
  misc_feature (1)..(168): Homolog of NCBI NO: 230348 NR Description: Triacylglycerol Acylhydrolase (E.C.3.1.1.3)
MVHHGFYSAYHNTTVRPAVLDAVKRAKESYGANLNIMVTGHSMGGAMASFCALDLVVNEGEENVQVMTFGQPRVGNAAFASYFNLLVPNTFRIIHDRDIVPHLPPYYHLFPQKTYHHFPTEVWLTELSILNIVIRGVEKVCDNTGEDPTCSRSVMGNSISDHLTYFGVELMGETWRQCNIVMGHEMESYSRKDSKGNIFLSRTVPSTEVIKTKSISKTGISSL

SEQ ID NO: 104411 - DNA, 1439 bp, Arabidopsis thaliana
  misc_feature (1)..(1439): Ceres Seq. ID no. 13614951
  misc_feature: MA Experiment ID: 108461 Result: Up-regulated in Transcription
  misc_feature: MA Experiment 108461 PARAMETER Experiment Name: At_Germinating_Seeds_cDNA_P Parameter: Age (day) Value: 1 vs. 0
  misc_feature: MA Experiment 108461 PARAMETER Experiment Name: At_Germinating_Seeds_cDNA_P Parameter: Tissue Value: Germinating Seeds
  misc_feature: MA Experiment ID: 108462 Result: Up-regulated in Transcription
  misc_feature: MA Experiment 108462 PARAMETER Experiment Name: At_Germinating_Seeds_cDNA_P Parameter: Age (day) Value: 2 vs. 0
  misc_feature: MA Experiment 108462 PARAMETER Experiment Name: At_Germinating_Seeds_cDNA_P Parameter: Tissue Value: Germinating Seeds
  misc_feature: MA Experiment ID: 108463 Result: Up-regulated in Transcription
  misc_feature: MA Experiment 108463 PARAMETER Experiment Name: At_Germinating_Seeds_cDNA_P Parameter: Age (day) Value: 3 vs. 0
  misc_feature: MA Experiment 108463 PARAMETER Experiment Name: At_Germinating_Seeds_cDNA_P Parameter: Tissue Value: Germinating Seeds
  misc_feature: MA Experiment ID: 108464 Result: Up-regulated in Transcription
  misc_feature: MA Experiment 108464 PARAMETER Experiment Name: At_Germinating_Seeds_cDNA_P Parameter: Age (day) Value: 4 vs. 0
  misc_feature: MA Experiment 108464 PARAMETER Experiment Name: At_Germinating_Seeds_cDNA_P Parameter: Tissue Value: Germinating Seeds
  misc_feature: MA Experiment ID: 20000070 Result: Down-regulated in Transcription
  misc_feature: MA Experiment 20000070 PARAMETER Experiment Name: At_100uM_ABA_Mutants_cDNA_P Parameter: Plant Line Value: CS24
  misc_feature: MA Experiment 20000070 PARAMETER Experiment Name: At_100uM_ABA_Mutants_cDNA_P Parameter: Timepoint (hr) Value: 6
  misc_feature: MA Experiment 20000070 PARAMETER Experiment Name: At_100uM_ABA_Mutants_cDNA_P Parameter: Tissue Value: Aerial
  misc_feature: MA Experiment 20000070 PARAMETER Experiment Name: At_100uM_ABA_Mutants_cDNA_P Parameter: Treatment Value: 100uM ABA vs. No Treatment
  misc_feature: MA Experiment ID: 20000087 Result: Down-regulated in Transcription
  misc_feature: MA Experiment 20000087 PARAMETER Experiment Name: At_100uM_ABA_Mutants_cDNA_P Parameter: Plant Line Value: WS
  misc_feature: MA Experiment 20000087 PARAMETER Experiment Name: At_100uM_ABA_Mutants_cDNA_P Parameter: Timepoint (hr) Value: 6
  misc_feature: MA Experiment 20000087 PARAMETER Experiment Name: At_100uM_ABA_Mutants_cDNA_P Parameter: Tissue Value: Aerial
  misc_feature: MA Experiment 20000087 PARAMETER Experiment Name: At_100uM_ABA_Mutants_cDNA_P Parameter: Treatment Value: 100uM ABA vs. No Treatment
  misc_feature: MA Experiment ID: 20000117 Result: Down-regulated in Transcription
  misc_feature: MA Experiment 20000117 PARAMETER Experiment Name: At_100uM_ABA_Mutants_cDNA_P Parameter: Plant Line Value: Columbia
  misc_feature: MA Experiment 20000117 PARAMETER Experiment Name: At_100uM_ABA_Mutants_cDNA_P Parameter: Timepoint (hr) Value: 6
  misc_feature: MA Experiment 20000117 PARAMETER Experiment Name: At_100uM_ABA_Mutants_cDNA_P Parameter: Tissue Value: Aerial
  misc_feature: MA Experiment 20000117 PARAMETER Experiment Name: At_100uM_ABA_Mutants_cDNA_P Parameter: Treatment Value: 100uM ABA vs. No Treatment
  misc_feature: MA Experiment ID: 20000179 Result: Up-regulated in Transcription
  misc_feature: MA Experiment 20000179 PARAMETER Experiment Name: At_Germinating_Seeds_P Parameter: Age (hr) Value: 6 vs. 0
  misc_feature: MA Experiment 20000179 PARAMETER Experiment Name: At_Germinating_Seeds_P Parameter: Tissue Value: Germinating Seeds
  misc_feature: MA Experiment ID: 20000180 Result: Up-regulated in Transcription
  misc_feature: MA Experiment 20000180 PARAMETER Experiment Name: At_Germinating_Seeds_P Parameter: Age (hr) Value: 24 vs. 0
  misc_feature: MA Experiment 20000180 PARAMETER Experiment Name: At_Germinating_Seeds_P Parameter: Tissue Value: Germinating Seeds
  misc_feature: MA Experiment ID: 20000182 Result: Down-regulated in Transcription
  misc_feature: MA Experiment 20000182 PARAMETER Experiment Name: At_2mM_SA_P Parameter: Age (day) Value: 14
  misc_feature: MA Experiment 20000182 PARAMETER Experiment Name: At_2mM_SA_P Parameter: Organism Value: A. thaliana
  misc_feature: MA Experiment 20000182 PARAMETER Experiment Name: At_2mM_SA_P Parameter: Plant Line Value: WS
  misc_feature: MA Experiment 20000182 PARAMETER Experiment Name: At_2mM_SA_P Parameter: Timepoint (hr) Value: 6
  misc_feature: MA Experiment 20000182 PARAMETER Experiment Name: At_2mM_SA_P Parameter: Tissue Value: Aerial
  misc_feature: MA Experiment 20000182 PARAMETER Experiment Name: At_2mM_SA_P Parameter: Treatment Value: 2mM SA vs. No Treatment
  misc_feature: MA Experiment ID: 20000185 Result: Down-regulated in Transcription
  misc_feature: MA Experiment 20000185 PARAMETER Experiment Name: At_Roots__P Parameter: Age (day) Value: 7 vs. 21
  misc_feature: MA Experiment 20000185 PARAMETER Experiment Name: At_Roots__P Parameter: Organism Value: A. thaliana
  misc_feature: MA Experiment 20000185 PARAMETER Experiment Name: At_Roots__P Parameter: Tissue Value: Roots vs. Whole Plant
  misc_feature: MA Experiment ID: 20000234 Result: Up-regulated in Transcription
  misc_feature: MA Experiment 20000234 PARAMETER Experiment Name: At_Siliques_P Parameter: Age (day) Value: 21
  misc_feature: MA Experiment 20000234 PARAMETER Experiment Name: At_Siliques_P Parameter: Organism Value: A. thaliana
  misc_feature: MA Experiment 20000234 PARAMETER Experiment Name: At_Siliques_P Parameter: Plant Line Value: WS
  misc_feature: MA Experiment 20000234 PARAMETER Experiment Name: At_Siliques_P Parameter: Tissue Value: Less Than 5mm Siliques vs. Whole Plant
  misc_feature: MA Experiment ID: 20000235 Result: Up-regulated in Transcription
  misc_feature: MA Experiment 20000235 PARAMETER Experiment Name: At_Siliques_P Parameter: Age (day) Value: 21
  misc_feature: MA Experiment 20000235 PARAMETER Experiment Name: At_Siliques_P Parameter: Organism Value: A. thaliana
  misc_feature: MA Experiment 20000235 PARAMETER Experiment Name: At_Siliques_P Parameter: Plant Line Value: WS
  misc_feature: MA Experiment 20000235 PARAMETER Experiment Name: At_Siliques_P Parameter: Tissue Value: 5-10mm Siliques vs. Whole Plant
  misc_feature: MA Experiment ID: 20000437 Result: Down-regulated in Transcription
  misc_feature: MA Experiment 20000437 PARAMETER Experiment Name: At_Drought_P Parameter: Age (day) Value: 8
  misc_feature: MA Experiment 20000437 PARAMETER Experiment Name: At_Drought_P Parameter: Organism Value: A. thaliana
  misc_feature: MA Experiment 20000437 PARAMETER Experiment Name: At_Drought_P Parameter: Plant Line Value: WS
  misc_feature: MA Experiment 20000437 PARAMETER Experiment Name: At_Drought_P Parameter: Timepoint (hr) Value: 24
  misc_feature: MA Experiment 20000437 PARAMETER Experiment Name: At_Drought_P Parameter: Tissue Value: Whole Plant
  misc_feature: MA Experiment 20000437 PARAMETER Experiment Name: At_Drought_P Parameter: Treatment Value: Drought vs. No Drought
  misc_feature: MA Experiment ID: 20000438 Result: Up-regulated in Transcription
  misc_feature: MA Experiment 20000438 PARAMETER Experiment Name: At_Shoots__P Parameter: Age (day) Value: 14
  misc_feature: MA Experiment 20000438 PARAMETER Experiment Name: At_Shoots__P Parameter: Tissue Value: Shoots vs. Whole Plant
  misc_feature: MA Experiment ID: 20000439 Result: Down-regulated in Transcription
  misc_feature: MA Experiment 20000439 PARAMETER Experiment Name: At_Roots__P Parameter: Age (day) Value: 14 vs. 21
  misc_feature: MA Experiment 20000439 PARAMETER Experiment Name: At_Roots__P Parameter: Organism Value: A. thaliana
  misc_feature: MA Experiment 20000439 PARAMETER Experiment Name: At_Roots__P Parameter: Tissue Value: Roots vs. Whole Plant
  misc_feature: MA Experiment ID: 20000794 Result: Down-regulated in Transcription
  misc_feature: MA Experiment 20000794 PARAMETER Experiment Name: At_Petals_P Parameter: Age (day) Value: 23-25 days
  misc_feature: MA Experiment 20000794 PARAMETER Experiment Name: At_Petals_P Parameter: Plant Line Value: WS
  misc_feature: MA Experiment 20000794 PARAMETER Experiment Name: At_Petals_P Parameter: Tissue Value: Petals vs. Whole plant
  misc_feature: MA Experiment ID: 20001248 Result: Down-regulated in Transcription
  misc_feature: MA Experiment 20001248 PARAMETER Experiment Name: At_Far-red-induction_P Parameter: Age (day) Value: 7
  misc_feature: MA Experiment 20001248 PARAMETER Experiment Name: At_Far-red-induction_P Parameter: Light Value: Far-red vs. White
  misc_feature: MA Experiment 20001248 PARAMETER Experiment Name: At_Far-red-induction_P Parameter: Organism Value: A. thaliana
  misc_feature: MA Experiment 20001248 PARAMETER Experiment Name: At_Far-red-induction_P Parameter: Plant Line Value: Columbia
  misc_feature: MA Experiment 20001248 PARAMETER Experiment Name: At_Far-red-induction_P Parameter: Timepoint (hr) Value: 4
  misc_feature: MA Experiment 20001248 PARAMETER Experiment Name: At_Far-red-induction_P Parameter: Tissue Value: Whole Plant
  misc_feature: MA Experiment ID: 20001450 Result: Down-regulated in Transcription
  misc_feature: MA Experiment 20001450 PARAMETER Experiment Name: At_Far-red-induction_P Parameter: Age (day) Value: 7
  misc_feature: MA Experiment 20001450 PARAMETER Experiment Name: At_Far-red-induction_P Parameter: Light Value: Far-red vs. White
  misc_feature: MA Experiment 20001450 PARAMETER Experiment Name: At_Far-red-induction_P Parameter: Organism Value: A. thaliana
  misc_feature: MA Experiment 20001450 PARAMETER Experiment Name: At_Far-red-induction_P Parameter: Plant Line Value: Columbia
  misc_feature: MA Experiment 20001450 PARAMETER Experiment Name: At_Far-red-induction_P Parameter: Timepoint (hr) Value: 8
  misc_feature: MA Experiment 20001450 PARAMETER Experiment Name: At_Far-red-induction_P Parameter: Tissue Value: Whole Plant
  misc_feature: MA Experiment ID: 20001556 Result: Up-regulated in Transcription
  misc_feature: MA Experiment 20001556 PARAMETER Experiment Name: At_Drought_Soil_Dry_P Parameter: Age (day) Value: 26
  misc_feature: MA Experiment 20001556 PARAMETER Experiment Name: At_Drought_Soil_Dry_P Parameter: Organism Value: A. thaliana
  misc_feature: MA Experiment 20001556 PARAMETER Experiment Name: At_Drought_Soil_Dry_P Parameter: Plant Line Value: WS
  misc_feature: MA Experiment 20001556 PARAMETER Experiment Name: At_Drought_Soil_Dry_P Parameter: Post Timepoint (hr) Value: None
  misc_feature: MA Experiment 20001556 PARAMETER Experiment Name: At_Drought_Soil_Dry_P Parameter: Post-Treatment Value: None
  misc_feature: MA Experiment 20001556 PARAMETER Experiment Name: At_Drought_Soil_Dry_P Parameter: Timepoint (day) Value: 12
  misc_feature: MA Experiment 20001556 PARAMETER Experiment Name: At_Drought_Soil_Dry_P Parameter: Treatment Value: Drought vs. No Drought
  misc_feature: MA Experiment ID: 20001558 Result: Up-regulated in Transcription
  misc_feature: MA Experiment 20001558 PARAMETER Experiment Name: At_Drought_Soil_Dry_P Parameter: Age (day) Value: 27
  misc_feature: MA Experiment 20001558 PARAMETER Experiment Name: At_Drought_Soil_Dry_P Parameter: Organism Value: A. thaliana
  misc_feature: MA Experiment 20001558 PARAMETER Experiment Name: At_Drought_Soil_Dry_P Parameter: Plant Line Value: WS
  misc_feature: MA Experiment 20001558 PARAMETER Experiment Name: At_Drought_Soil_Dry_P Parameter: Post Timepoint (hr) Value: 6
  misc_feature: MA Experiment 20001558 PARAMETER Experiment Name: At_Drought_Soil_Dry_P Parameter: Post-Treatment Value: Re-Water vs. No Drought
  misc_feature: MA Experiment 20001558 PARAMETER Experiment Name: At_Drought_Soil_Dry_P Parameter: Timepoint (day) Value: 13
  misc_feature: MA Experiment 20001558 PARAMETER Experiment Name: At_Drought_Soil_Dry_P Parameter: Treatment Value: Drought vs. No Drought
  misc_feature: MA Experiment ID: 20001560 Result: Up-regulated in Transcription
  misc_feature: MA Experiment 20001560 PARAMETER Experiment Name: At_Drought_Soil_Dry_P Parameter: Age (day) Value: 28
  misc_feature: MA Experiment 20001560 PARAMETER Experiment Name: At_Drought_Soil_Dry_P Parameter: Organism Value: A. thaliana
  misc_feature: MA Experiment 20001560 PARAMETER Experiment Name: At_Drought_Soil_Dry_P Parameter: Plant Line Value: WS
  misc_feature: MA Experiment 20001560 PARAMETER Experiment Name: At_Drought_Soil_Dry_P Parameter: Post Timepoint (hr) Value: None
  misc_feature: MA Experiment 20001560 PARAMETER Experiment Name: At_Drought_Soil_Dry_P Parameter: Post-Treatment Value: None
  misc_feature: MA Experiment 20001560 PARAMETER Experiment Name: At_Drought_Soil_Dry_P Parameter: Timepoint (day) Value: 14
  misc_feature: MA Experiment 20001560 PARAMETER Experiment Name: At_Drought_Soil_Dry_P Parameter: Treatment Value: Drought vs. No Drought
  misc_feature: MA Experiment ID: 20001757 Result: Up-regulated in Transcription
  misc_feature: MA Experiment 20001757 PARAMETER Experiment Name: At_50mM_NH4NO3_L-to-H_P Parameter: Timepoint (hr) Value: 6
  misc_feature: MA Experiment 20001757 PARAMETER Experiment Name: At_50mM_NH4NO3_L-to-H_P Parameter: Tissue Value: Leaf
  misc_feature: MA Experiment 20001757 PARAMETER Experiment Name: At_50mM_NH4NO3_L-to-H_P Parameter: Treatment Value: 50mM NH4NO3 vs 100mM Mannitol
  misc_feature: MA Experiment ID: 20001905 Result: Down-regulated in Transcription
  misc_feature: MA Experiment 20001905 PARAMETER Experiment Name: At_Drought_Reproduction_P Parameter: Age (day) Value: 40
  misc_feature: MA Experiment 20001905 PARAMETER Experiment Name: At_Drought_Reproduction_P Parameter: Organism Value: A. thaliana
  misc_feature: MA Experiment 20001905 PARAMETER Experiment Name: At_Drought_Reproduction_P Parameter: Plant Line Value: WS
  misc_feature: MA Experiment 20001905 PARAMETER Experiment Name: At_Drought_Reproduction_P Parameter: Timepoint (day) Value: 10
  misc_feature: MA Experiment 20001905 PARAMETER Experiment Name: At_Drought_Reproduction_P Parameter: Tissue Value: Rosettes
  misc_feature: MA Experiment 20001905 PARAMETER Experiment Name: At_Drought_Reproduction_P Parameter: Treatment Value: Drought vs. No Drought
  misc_feature: MA Experiment ID: 20001906 Result: Down-regulated in Transcription
  misc_feature: MA Experiment 20001906 PARAMETER Experiment Name: At_Drought_Reproduction_P Parameter: Age (day) Value: 35
  misc_feature: MA Experiment 20001906 PARAMETER Experiment Name: At_Drought_Reproduction_P Parameter: Organism Value: A. thaliana
  misc_feature: MA Experiment 20001906 PARAMETER Experiment Name: At_Drought_Reproduction_P Parameter: Plant Line Value: WS
  misc_feature: MA Experiment 20001906 PARAMETER Experiment Name: At_Drought_Reproduction_P Parameter: Timepoint (day) Value: 5
  misc_feature: MA Experiment 20001906 PARAMETER Experiment Name: At_Drought_Reproduction_P Parameter: Tissue Value: Siliques
  misc_feature: MA Experiment 20001906 PARAMETER Experiment Name: At_Drought_Reproduction_P Parameter: Treatment Value: Drought vs. No Drought
  misc_feature: MA Experiment ID: 20001911 Result: Down-regulated in Transcription
  misc_feature: MA Experiment 20001911 PARAMETER Experiment Name: At_Drought_Reproduction_P Parameter: Age (day) Value: 40
  misc_feature: MA Experiment 20001911 PARAMETER Experiment Name: At_Drought_Reproduction_P Parameter: Organism Value: A. thaliana
  misc_feature: MA Experiment 20001911 PARAMETER Experiment Name: At_Drought_Reproduction_P Parameter: Plant Line Value: WS
  misc_feature: MA Experiment 20001911 PARAMETER Experiment Name: At_Drought_Reproduction_P Parameter: Timepoint (day) Value: 10
  misc_feature: MA Experiment 20001911 PARAMETER Experiment Name: At_Drought_Reproduction_P Parameter: Tissue Value: Flowers
  misc_feature: MA Experiment 20001911 PARAMETER Experiment Name: At_Drought_Reproduction_P Parameter: Treatment Value: Drought vs. No Drought
aaacgagttgctacaatggcctcacactaggatcttcactttctcgcactttccctctcattttcccgatcatagaaacagcattgtacagagatttcaaagaatgtcactttgctcttccttcaacgtattcgcttcctactcaccaaaacccaaaaccatcttcaaagattccaaattcatttcacaatttcaggtaaagtcgtctcctttagcttcaacattccacacaaatgaatcctcaacgagtcttaagtataagagagcgagactcaaaccaatttcatctctagactcgggaatttcagaaatcgctacatcaccttcattcaggaacaaaagccctaaagatataaacgttttagtggttggttcaactgggtacataggtagatttgtagtgaaagagatgatcaaaagagggttcaatgtgattgctgttgcgagagagaagagtgggattagaggcaaaaacgacaaggaagagactttgaagcaattacaaggcgccaatgtgtgtttctctgatgttactgagttagatgttcttgagaaatctattgagaatctaggatttggtgttgatgttgttgtttcctgtctcgctagtcgtaatggagggattaaagattcgtggaagattgattatgaagctaccaaaaacagtcttgtagctgggaagaagtttggtgctaagcattttgttttgctctctgcgatttgtgtgcagaagcctttactggagtttcagagagcgaaactgaagttcgaagcagagttgatggatttggctgagcaacaagactctagctttacatacagcattgtgagaccaacggcttttttcaagagcttaggtggtcaagttgagattgtgaaagatgggaaaccttacgtgatgtttggagatggtaagctatgcgcttgtaaaccgatcagcgaacaagatttagcagcgtttatagcggattgcgtgttggaagagaacaagatcaatcaagttttgccaattggtggaccaggcaaggcattaacgccattagagcaaggagagattctgtttaagattcttgggagagagcctaagttcttgaaagtacctatcgagattatggattttgtgattggtgttctcgattctattgcaaagatctttccttcggttggagaggctgccgaatttgggaagattggaaggtattacgccgcagagagtatgttgattcttgatccagagactggagagtatagcgaggagaagacaccgagttacgggaaagacacgcttgaggatttctttgcgaaagtgatcagagaaggcatggcgggtcaagaactcggtgaacagttcttctagtatgaattgtttttgtgcgaaatgagtttgctgtgtagtttgtaactgatgagattataaatataaaacctgtgaatttgag

SEQ ID NO: 104412 - protein, 451 aa, Arabidopsis thaliana
  peptide (1)..(451): Ceres Seq. ID no. 13614952
  misc_feature (120)..(345): Pfam Name: Isoflavone reductase Pfam Description: Isoflavone reductase
  misc_feature (35)..(451): Homolog of NCBI NO: 15239530 NR Description: isoflavone reductase-related [Arabidopsis
  misc_feature (35)..(451): Homolog of NCBI NO: 26449404 NR Description: unknown protein [Arabidopsis thaliana]
  misc_feature (35)..(451): Homolog of NCBI NO: 21553818 NR Description: unknown [Arabidopsis thaliana]
  misc_feature (112)..(447): Homolog of NCBI NO: 21673889 NR Description: conserved hypothetical protein [Chlorobium TLS] >gi|21647026|gb|AAM72296.1| conserved hypothetical protein
  misc_feature (104)..(448): Homolog of NCBI NO: 33865497 NR Description: conserved hypothetical protein [Synechococcus sp.
  misc_feature (115)..(448): Homolog of NCBI NO: 22959007 NR Description: hypothetical protein [Rhodobacter sphaeroides]
  misc_feature (195)..(442): Homolog of NCBI NO: 21328662 NR Description: conserved hypothetical protein [uncultured
  misc_feature (120)..(378): Homolog of NCBI NO: 21673318 NR Description: conserved hypothetical protein [Chlorobium TLS] >gi|21646410|gb|AAM71725.1| conserved hypothetical protein
  misc_feature (121)..(372): Homolog of NCBI NO: 23043621 NR Description: hypothetical protein [Trichodesmium erythraeum
  misc_feature (120)..(377): Homolog of NCBI NO: 21673823 NR Description: conserved hypothetical protein [Chlorobium TLS] >gi|21646955|gb|AAM72230.1| conserved hypothetical protein
NELLQWPHTRIFTFSHFPSHFPDHRNSIVQRFQRMSLCSSFNVFASYSPKPKTIFKDSKFISQFQVKSSPLASTFHTNESSTSLKYKRARLKPISSLDSGISEIATSPSFRNKSPKDINVLVVGSTGYIGRFVVKEMIKRGFNVIAVAREKSGIRGKNDKEETLKQLQGANVCFSDVTELDVLEKSIENLGFGVDVVVSCLASRNGGIKDSWKIDYEATKNSLVAGKKFGAKHFVLLSAICVQKPLLEFQRAKLKFEAELMDLAEQQDSSFTYSIVRPTAFFKSLGGQVEIVKDGKPYVMFGDGKLCACKPISEQDLAAFIADCVLEENKINQVLPIGGPGKALTPLEQGEILFKILGREPKFLKVPIEIMDFVIGVLDSIAKIFPSVGEAAEFGKIGRYYAAESMLILDPETGEYSEEKTPSYGKDTLEDFFAKVIREGMAGQELGEQFF

SEQ ID NO: 104413 - protein, 417 aa, Arabidopsis thaliana
  peptide (1)..(417): Ceres Seq. ID no. 13614953
  misc_feature (86)..(311): Pfam Name: Isoflavone reductase Pfam Description: Isoflavone reductase
  misc_feature (1)..(417): Homolog of NCBI NO: 15239530 NR Description: isoflavone reductase-related [Arabidopsis
  misc_feature (1)..(417): Homolog of NCBI NO: 26449404 NR Description: unknown protein [Arabidopsis thaliana]
  misc_feature (1)..(417): Homolog of NCBI NO: 21553818 NR Description: unknown [Arabidopsis thaliana]
  misc_feature (78)..(413): Homolog of NCBI NO: 21673889 NR Description: conserved hypothetical protein [Chlorobium TLS] >gi|21647026|gb|AAM72296.1| conserved hypothetical protein
  misc_feature (70)..(414): Homolog of NCBI NO: 33865497 NR Description: conserved hypothetical protein [Synechococcus sp.
  misc_feature (81)..(414): Homolog of NCBI NO: 22959007 NR Description: hypothetical protein [Rhodobacter sphaeroides]
  misc_feature (161)..(408): Homolog of NCBI NO: 21328662 NR Description: conserved hypothetical protein [uncultured
  misc_feature (86)..(344): Homolog of NCBI NO: 21673318 NR Description: conserved hypothetical protein [Chlorobium TLS] >gi|21646410|gb|AAM71725.1| conserved hypothetical protein
  misc_feature (87)..(338): Homolog of NCBI NO: 23043621 NR Description: hypothetical protein [Trichodesmium erythraeum
  misc_feature (86)..(343): Homolog of NCBI NO: 21673823 NR Description: conserved hypothetical protein [Chlorobium TLS] >gi|21646955|gb|AAM72230.1| conserved hypothetical protein
MSLCSSFNVFASYSPKPKTIFKDSKFISQFQVKSSPLASTFHTNESSTSLKYKRARLKPISSLDSGISEIATSPSFRNKSPKDINVLVVGSTGYIGRFVVKEMIKRGFNVIAVAREKSGIRGKNDKEETLKQLQGANVCFSDVTELDVLEKSIENLGFGVDVVVSCLASRNGGIKDSWKIDYEATKNSLVAGKKFGAKHFVLLSAICVQKPLLEFQRAKLKFEAELMDLAEQQDSSFTYSIVRPTAFFKSLGGQVEIVKDGKPYVMFGDGKLCACKPISEQDLAAFIADCVLEENKINQVLPIGGPGKALTPLEQGEILFKILGREPKFLKVPIEIMDFVIGVLDSIAKIFPSVGEAAEFGKIGRYYAAESMLILDPETGEYSEEKTPSYGKDTLEDFFAKVIREGMAGQELGEQFF

SEQ ID NO: 104414 - protein, 315 aa, Arabidopsis thaliana
  peptide (1)..(315): Ceres Seq. ID no. 13614954
  misc_feature (1)..(209): Pfam Name: Isoflavone reductase Pfam Description: Isoflavone reductase
  misc_feature (1)..(315): Homolog of NCBI NO: 15239530 NR Description: isoflavone reductase-related [Arabidopsis
  misc_feature (1)..(315): Homolog of NCBI NO: 26449404 NR Description: unknown protein [Arabidopsis thaliana]
  misc_feature (1)..(315): Homolog of NCBI NO: 21553818 NR Description: unknown [Arabidopsis thaliana]
  misc_feature (1)..(311): Homolog of NCBI NO: 21673889 NR Description: conserved hypothetical protein [Chlorobium TLS] >gi|21647026|gb|AAM72296.1| conserved hypothetical protein
  misc_feature (1)..(312): Homolog of NCBI NO: 33865497 NR Description: conserved hypothetical protein [Synechococcus sp.
  misc_feature (1)..(312): Homolog of NCBI NO: 22959007 NR Description: hypothetical protein [Rhodobacter sphaeroides]
  misc_feature (59)..(306): Homolog of NCBI NO: 21328662 NR Description: conserved hypothetical protein [uncultured
  misc_feature (1)..(242): Homolog of NCBI NO: 21673318 NR Description: conserved hypothetical protein [Chlorobium TLS] >gi|21646410|gb|AAM71725.1| conserved hypothetical protein
  misc_feature (1)..(236): Homolog of NCBI NO: 23043621 NR Description: hypothetical protein [Trichodesmium erythraeum
  misc_feature (1)..(241): Homolog of NCBI NO: 21673823 NR Description: conserved hypothetical protein [Chlorobium TLS] >gi|21646955|gb|AAM72230.1| conserved hypothetical protein
MIKRGFNVIAVAREKSGIRGKNDKEETLKQLQGANVCFSDVTELDVLEKSIENLGFGVDVVVSCLASRNGGIKDSWKIDYEATKNSLVAGKKFGAKHFVLLSAICVQKPLLEFQRAKLKFEAELMDLAEQQDSSFTYSIVRPTAFFKSLGGQVEIVKDGKPYVMFGDGKLCACKPISEQDLAAFIADCVLEENKINQVLPIGGPGKALTPLEQGEILFKILGREPKFLKVPIEIMDFVIGVLDSIAKIFPSVGEAAEFGKIGRYYAAESMLILDPETGEYSEEKTPSYGKDTLEDFFAKVIREGMAGQELGEQFF

SEQ ID NO: 104415 - DNA, 1294 bp, Arabidopsis thaliana
  misc_feature (1)..(1294): Ceres Seq. ID no. 13614955
  misc_feature: MA Experiment ID: 108595 Result: Down-regulated in Transcription
  misc_feature: MA Experiment 108595 PARAMETER Experiment Name: At_Ler-pi_Ovule_cDNA_P Parameter: Plant Line Value: null
  misc_feature: MA Experiment ID: 20000071 Result: Up-regulated in Transcription
  misc_feature: MA Experiment 20000071 PARAMETER Experiment Name: At_100uM_ABA_Mutants_cDNA_P Parameter: Plant Line Value: CS8104
  misc_feature: MA Experiment 20000071 PARAMETER Experiment Name: At_100uM_ABA_Mutants_cDNA_P Parameter: Timepoint (hr) Value: 6
  misc_feature: MA Experiment 20000071 PARAMETER Experiment Name: At_100uM_ABA_Mutants_cDNA_P Parameter: Tissue Value: Aerial
  misc_feature: MA Experiment 20000071 PARAMETER Experiment Name: At_100uM_ABA_Mutants_cDNA_P Parameter: Treatment Value: 100uM ABA vs. No Treatment
  misc_feature: MA Experiment ID: 20000089 Result: Up-regulated in Transcription
  misc_feature: MA Experiment ID: 20000111 Result: Down-regulated in Transcription
  misc_feature: MA Experiment 20000111 PARAMETER Experiment Name: At_42deg_Heat_cDNA_P Parameter: Temperature (deg C) Value: 42 vs. 22
  misc_feature: MA Experiment 20000111 PARAMETER Experiment Name: At_42deg_Heat_cDNA_P Parameter: Timepoint (hr) Value: 6
  misc_feature: MA Experiment 20000111 PARAMETER Experiment Name: At_42deg_Heat_cDNA_P Parameter: Tissue Value: Aerial
  misc_feature: MA Experiment ID: 20000224 Result: Down-regulated in Transcription
  misc_feature: MA Experiment ID: 20000328 Result: Down-regulated in Transcription
  misc_feature: MA Experiment 20000328 PARAMETER Experiment Name: At_42deg_Heat_Sub_P Parameter: Age (day) Value: 14
  misc_feature: MA Experiment 20000328 PARAMETER Experiment Name: At_42deg_Heat_Sub_P Parameter: Organism Value: A. thaliana
  misc_feature: MA Experiment 20000328 PARAMETER Experiment Name: At_42deg_Heat_Sub_P Parameter: Plant Line Value: WS
  misc_feature: MA Experiment 20000328 PARAMETER Experiment Name: At_42deg_Heat_Sub_P Parameter: Temperature (deg C) Value: 42 vs. 22
  misc_feature: MA Experiment 20000328 PARAMETER Experiment Name: At_42deg_Heat_Sub_P Parameter: Timepoint (hr) Value: 6
  misc_feature: MA Experiment 20000328 PARAMETER Experiment Name: At_42deg_Heat_Sub_P Parameter: Tissue Value: Aerial
ataatcatctaaagactcagcctttaagtatccccagaagtcgtatgaccttacgtagcttaatccttgagatgcgttcgagaccgcatcgtgtggtccacgaccttgccgccgccgcagctgccgattccacttctgtgtcatcgcaagattatcgctggtcagagattcctgaagagcttcttagggagattctgattcgtgttgaagcggcggacggtggcggatggccgtcacgacgcagcgtggtggcttgtgccggcgtttgtcgtggctggcggctacttatgaacgaaaccgtcgttgtccctgagatctcttctaagttgactttccccatctctctcaagcagcctggtccaagggattcactggttcaatgctttatcaaacgtaatcgaattacgcaatcatatcatctctatctcggattaaccaactctttaacggatgatgggaagtttttgcttgctgcgtgtaagttgaagcacacaacttgtacggattacattatctctttacgttctgatgatatgtcgagaagaagccaagcttatgttggcaaagtgagatcgaacttcctaggaacgaaattcactgtctttgatggaaatctgctgccttcaacgggagccgcaaagttgagaaagagccgatcttataatcccgcaaaagtttcagcaaaagttcctcttggaagttatcctgtcgctcatatcacatatgagctgaatgtcttaggatcccggggaccaagaaagatgcaatgtcttatggacacaatacctacaagcacaatggagcctcaaggagtagcttcagaaccatcagagtttcccttactcggtactcggtcaaccttatccaggtctcagtcaaaaccattacgcagtagctcaagccacctgaaagaaacaccattagtgctgagcaacaagacaccacggtggcacgagcagctacgctgctggtgcttgaatttccatggccgtgtcacagtagcgtcagtgaagaactttcagctcgtggcagcaggagctagctgtggcagtggcacgggaatgtcaccggagaggcagagcgagcggattatattgcagtttgggaaagtcgggaaagatatgttcacgatggattatggatacccgatctcagctttccaggcttttgccatttgcttgagcagctttgagactagaatcgcttgtgaatgatttacaagactttgttaagatatcgctatatctatcttgtaaagagcaatttgtagccttttgtaaattgtgttcttttt

SEQ ID NO: 104416 - protein, 403 aa, Arabidopsis thaliana
  peptide (1)..(403): Ceres Seq. ID no. 13614956
  misc_feature (119)..(403): Pfam Name: Tub family Pfam Description: Tub family
  misc_feature (15)..(403): Homolog of NCBI NO: 22326885 NR Description: F-box containing tubby family protein
  misc_feature (15)..(403): Homolog of NCBI NO: 15230707 NR Description: F-box containing tubby family protein thaliana] >gi|6437549|gb|AAF08576.1|AC011623_9 unknown protein
  misc_feature (25)..(403): Homolog of NCBI NO: 30690823 NR Description: F-box containing tubby family protein thaliana] >gi|18377640|gb|AAL66970.1| putative tubby protein thaliana] >gi|20465543|gb|AAM20254.1| putative tubby protein
  misc_feature (25)..(403): Homolog of NCBI NO: 25409071 NR Description: probable Tub family protein [imported] - thaliana >gi|3738302|gb|AAC63644.1| putative tubby protein thaliana] >gi|20197552|gb|AAM15124.1| putative tubby protein
  misc_feature (25)..(403): Homolog of NCBI NO: 34899264 NR Description: contains ESTs
  misc_feature (42)..(303): Homolog of NCBI NO: 34908598 NR Description: putative tubby protein [Oryza sativa (japonica group)] >gi|21644661|dbj|BAC01219.1| putative tubby protein
  misc_feature (299)..(403): Homolog of NCBI NO: 34908598 NR Description: putative tubby protein [Oryza sativa (japonica group)] >gi|21644661|dbj|BAC01219.1| putative tubby protein
  misc_feature (52)..(298): Homolog of NCBI NO: 38637048 NR Description: putative chain A, C-terminal domain of mouse
  misc_feature (285)..(403): Homolog of NCBI NO: 38637048 NR Description: putative chain A, C-terminal domain of mouse
  misc_feature (53)..(403): Homolog of NCBI NO: 30680328 NR Description: F-box containing tubby family protein
NHLKTQPLSIPRSRMTLRSLILEMRSRPHRVVHDLAAAAAADSTSVSSQDYRWSEIPEELLREILIRVEAADGGGWPSRRSVVACAGVCRGWRLLMNETVVVPEISSKLTFPISLKQPGPRDSLVQCFIKRNRITQSYHLYLGLTNSLTDDGKFLLAACKLKHTTCTDYIISLRSDDMSRRSQAYVGKVRSNFLGTKFTVFDGNLLPSTGAAKLRKSRSYNPAKVSAKVPLGSYPVAHITYELNVLGSRGPRKMQCLMDTIPTSTMEPQGVASEPSEFPLLGTRSTLSRSQSKPLRSSSSHLKETPLVLSNKTPRWHEQLRCWCLNFHGRVTVASVKNFQLVAAGASCGSGTGMSPERQSERIILQFGKVGKDMFTMDYGYPISAFQAFAICLSSFETRIACE

SEQ ID NO: 104417 - protein, 389 aa, Arabidopsis thaliana
  peptide (1)..(389): Ceres Seq. ID no. 13614957
  misc_feature (105)..(389): Pfam Name: Tub family Pfam Description: Tub family
  misc_feature (1)..(389): Homolog of NCBI NO: 22326885 NR Description: F-box containing tubby family protein
  misc_feature (1)..(389): Homolog of NCBI NO: 15230707 NR Description: F-box containing tubby family protein thaliana] >gi|6437549|gb|AAF08576.1|AC011623_9 unknown protein
  misc_feature (11)..(389): Homolog of NCBI NO: 30690823 NR Description: F-box containing tubby family protein thaliana] >gi|18377640|gb|AAL66970.1| putative tubby protein thaliana] >gi|20465543|gb|AAM20254.1| putative tubby protein
  misc_feature (11)..(389): Homolog of NCBI NO: 25409071 NR Description: probable Tub family protein [imported] - thaliana >gi|3738302|gb|AAC63644.1| putative tubby protein thaliana] >gi|20197552|gb|AAM15124.1| putative tubby protein
  misc_feature (11)..(389): Homolog of NCBI NO: 34899264 NR Description: contains ESTs
  misc_feature (28)..(289): Homolog of NCBI NO: 34908598 NR Description: putative tubby protein [Oryza sativa (japonica group)] >gi|21644661|dbj|BAC01219.1| putative tubby protein
  misc_feature (285)..(389): Homolog of NCBI NO: 34908598 NR Description: putative tubby protein [Oryza sativa (japonica group)] >gi|21644661|dbj|BAC01219.1| putative tubby protein
  misc_feature (38)..(284): Homolog of NCBI NO: 38637048 NR Description: putative chain A, C-terminal domain of mouse
  misc_feature (271)..(389): Homolog of NCBI NO: 38637048 NR Description: putative chain A, C-terminal domain of mouse
  misc_feature (39)..(389): Homolog of NCBI NO: 30680328 NR Description: F-box containing tubby family protein
MTLRSLILEMRSRPHRVVHDLAAAAAADSTSVSSQDYRWSEIPEELLREILIRVEAADGGGWPSRRSVVACAGVCRGWRLLMNETVVVPEISSKLTFPISLKQPGPRDSLVQCFIKRNRITQSYHLYLGLTNSLTDDGKFLLAACKLKHTTCTDYIISLRSDDMSRRSQAYVGKVRSNFLGTKFTVFDGNLLPSTGAAKLRKSRSYNPAKVSAKVPLGSYPVAHITYELNVLGSRGPRKMQCLMDTIPTSTMEPQGVASEPSEFPLLGTRSTLSRSQSKPLRSSSSHLKETPLVLSNKTPRWHEQLRCWCLNFHGRVTVASVKNFQLVAAGASCGSGTGMSPERQSERIILQFGKVGKDMFTMDYGYPISAFQAFAICLSSFETRIACE

SEQ ID NO: 104418 - protein, 380 aa, Arabidopsis thaliana
  peptide (1)..(380): Ceres Seq. ID no. 13614958
  misc_feature (96)..(380): Pfam Name: Tub family Pfam Description: Tub family
  misc_feature (1)..(380): Homolog of NCBI NO: 22326885 NR Description: F-box containing tubby family protein
  misc_feature (1)..(380): Homolog of NCBI NO: 15230707 NR Description: F-box containing tubby family protein thaliana] >gi|6437549|gb|AAF08576.1|AC011623_9 unknown protein
  misc_feature (2)..(380): Homolog of NCBI NO: 30690823 NR Description: F-box containing tubby family protein thaliana] >gi|18377640|gb|AAL66970.1| putative tubby protein thaliana] >gi|20465543|gb|AAM20254.1| putative tubby protein
  misc_feature (2)..(380): Homolog of NCBI NO: 25409071 NR Description: probable Tub family protein [imported] - thaliana >gi|3738302|gb|AAC63644.1| putative tubby protein thaliana] >gi|20197552|gb|AAM15124.1| putative tubby protein
  misc_feature (2)..(380): Homolog of NCBI NO: 34899264 NR Description: contains ESTs
  misc_feature (19)..(280): Homolog of NCBI NO: 34908598 NR Description: putative tubby protein [Oryza sativa (japonica group)] >gi|21644661|dbj|BAC01219.1| putative tubby protein
  misc_feature (276)..(380): Homolog of NCBI NO: 34908598 NR Description: putative tubby protein [Oryza sativa (japonica group)] >gi|21644661|dbj|BAC01219.1| putative tubby protein
  misc_feature (29)..(275): Homolog of NCBI NO: 38637048 NR Description: putative chain A, C-terminal domain of mouse
  misc_feature (262)..(380): Homolog of NCBI NO: 38637048 NR Description: putative chain A, C-terminal domain of mouse
  misc_feature (30)..(380): Homolog of NCBI NO: 30680328 NR Description: F-box containing tubby family protein
MRSRPHRVVHDLAAAAAADSTSVSSQDYRWSEIPEELLREILIRVEAADGGGWPSRRSVVACAGVCRGWRLLMNETVVVPEISSKLTFPISLKQPGPRDSLVQCFIKRNRITQSYHLYLGLTNSLTDDGKFLLAACKLKHTTCTDYIISLRSDDMSRRSQAYVGKVRSNFLGTKFTVFDGNLLPSTGAAKLRKSRSYNPAKVSAKVPLGSYPVAHITYELNVLGSRGPRKMQCLMDTIPTSTMEPQGVASEPSEFPLLGTRSTLSRSQSKPLRSSSSHLKETPLVLSNKTPRWHEQLRCWCLNFHGRVTVASVKNFQLVAAGASCGSGTGMSPERQSERIILQFGKVGKDMFTMDYGYPISAFQAFAICLSSFETRIACE

SEQ ID NO: 104419 - DNA, 1498 bp, Arabidopsis thaliana
  misc_feature (1)..(1498): Ceres Seq. ID no. 13614959
  misc_feature: MA Experiment ID: 20001557 Result: Down-regulated in Transcription
  misc_feature: MA Experiment 20001557 PARAMETER Experiment Name: At_Drought_Soil_Dry_P Parameter: Age (day) Value: 27
  misc_feature: MA Experiment 20001557 PARAMETER Experiment Name: At_Drought_Soil_Dry_P Parameter: Organism Value: A. thaliana
  misc_feature: MA Experiment 20001557 PARAMETER Experiment Name: At_Drought_Soil_Dry_P Parameter: Plant Line Value: WS
  misc_feature: MA Experiment 20001557 PARAMETER Experiment Name: At_Drought_Soil_Dry_P Parameter: Post Timepoint (hr) Value: 3
  misc_feature: MA Experiment 20001557 PARAMETER Experiment Name: At_Drought_Soil_Dry_P Parameter: Post-Treatment Value: Re-Water vs. No Drought
  misc_feature: MA Experiment 20001557 PARAMETER Experiment Name: At_Drought_Soil_Dry_P Parameter: Timepoint (day) Value: 13
  misc_feature: MA Experiment 20001557 PARAMETER Experiment Name: At_Drought_Soil_Dry_P Parameter: Treatment Value: Drought vs. No Drought
  misc_feature: MA Experiment ID: 20001558 Result: Down-regulated in Transcription
  misc_feature: MA Experiment 20001558 PARAMETER Experiment Name: At_Drought_Soil_Dry_P Parameter: Age (day) Value: 27
  misc_feature: MA Experiment 20001558 PARAMETER Experiment Name: At_Drought_Soil_Dry_P Parameter: Organism Value: A. thaliana
  misc_feature: MA Experiment 20001558 PARAMETER Experiment Name: At_Drought_Soil_Dry_P Parameter: Plant Line Value: WS
  misc_feature: MA Experiment 20001558 PARAMETER Experiment Name: At_Drought_Soil_Dry_P Parameter: Post Timepoint (hr) Value: 6
  misc_feature: MA Experiment 20001558 PARAMETER Experiment Name: At_Drought_Soil_Dry_P Parameter: Post-Treatment Value: Re-Water vs. No Drought
  misc_feature: MA Experiment 20001558 PARAMETER Experiment Name: At_Drought_Soil_Dry_P Parameter: Timepoint (day) Value: 13
  misc_feature: MA Experiment 20001558 PARAMETER Experiment Name: At_Drought_Soil_Dry_P Parameter: Treatment Value: Drought vs. No Drought
  misc_feature: MA Experiment ID: 20001905 Result: Down-regulated in Transcription
  misc_feature: MA Experiment 20001905 PARAMETER Experiment Name: At_Drought_Reproduction_P Parameter: Age (day) Value: 40
  misc_feature: MA Experiment 20001905 PARAMETER Experiment Name: At_Drought_Reproduction_P Parameter: Organism Value: A. thaliana
  misc_feature: MA Experiment 20001905 PARAMETER Experiment Name: At_Drought_Reproduction_P Parameter: Plant Line Value: WS
  misc_feature: MA Experiment 20001905 PARAMETER Experiment Name: At_Drought_Reproduction_P Parameter: Timepoint (day) Value: 10
  misc_feature: MA Experiment 20001905 PARAMETER Experiment Name: At_Drought_Reproduction_P Parameter: Tissue Value: Rosettes
  misc_feature: MA Experiment 20001905 PARAMETER Experiment Name: At_Drought_Reproduction_P Parameter: Treatment Value: Drought vs. No Drought
gtcgatcaaacttgatttcttcaaaattgttttggtttctattggttcgattatgatggaaggctcttcaattcaaccgcccagaaattttgttctcgctaaagattcttctactggttcttcttcttcttcttcttcttctcaggttaaagaacaatctgttgaagatgtatccagatctcagccaagtggaagccaattggatgtttctatccaaataccaccaaaaccgacgcctagtttaggaattttgagaaatctgagtctgaaaaggaaagcttctctaccaaactatgagagaagattgctactaagtcctagtgtttcagaaaccagtgaaaagcctcttgttgcaagtccgatcacatcgccttactggaaaaggtgtttgtcacttccttctagtaattctgctaaactgtctctggttgtatctacaacgcctgtttccgctgtggtgcatagtgaacagcctaagtctaataaagatggtcttcatgcatctgtttcaagatccttgtccatgaacagagtgattgtacgagctgtctcttttgacgacaacaaaaatcacatttcaaatgaagcaaatggcgatcaaatcactccagttcctgcagaagaaacagaagaagaaattcctgaagaagaagcagtatgcaggatttgtcttgatgtgtgcgaagaaggtaacacactgaaaatggaatgcagttgcaaaggtgacctcagacttgttcacgagcattgtgccattaagtggtttagtacaaaaggaacacgaatctgcgatgtatgcagacaagaagtccggaacttaccagtgatactcctccgtgtcccaacaattaatcaacttaccaatagacgggaactcactcagcagagttcagagccacaaagcatcagtgttgggcaagagtttgtagtgcttgtactcatcagcaccgtctgctacttcttcttccttgaacatttactgattcgtgacttgaattcacaggcaatatttgttgcagcgccattttcattcacccttgcactcttagcctcaacttttgccgtcatcctcgcgatcagagaatacatatggacatacgcagctcttgagtttgcactagtggcattgcttgttcatctattatatgctacacttcgtgtgccggttatctatgcaatgctttttgcagggatactgggtttcgggatggcaatgtgcttaaacttgttgtgcatttgttattcctctcggcctgtgcggtttccgcggaatacaaacttagtataaagatagtctcttctgttcttaaagttcggatttgaaagggtaaattgctgcatagatagatgggttctcttacaacattgagacctgtagatatacaagttctttgtagtttgtacttttgtatgaaaataacttttgtggaattacagtgagaatgtgtgatttgtgtacatcaagtgaaagagctgttgtgaatgagattctaggttc

SEQ ID NO: 104420 - protein, 428 aa, Arabidopsis thaliana
  peptide (1)..(428): Ceres Seq. ID no. 13614960
  misc_feature (220)..(266): Pfam Name: Zinc finger, C3HC4 type (RING finger) Pfam Description: Zinc finger, C3HC4 type (RING finger)
  misc_feature (18)..(428): Homolog of NCBI NO: 30686985 NR Description: zinc finger (C3HC4-type RING finger) protein
  misc_feature (18)..(428): Homolog of NCBI NO: 26452687 NR Description: unknown protein [Arabidopsis thaliana]
  misc_feature (19)..(428): Homolog of NCBI NO: 18397535 NR Description: zinc finger (C3HC4-type RING finger) protein [Arabidopsis thaliana] >gi|6437553|gb|AAF08580.1|AC011623_13 protein [Arabidopsis thaliana]
  misc_feature (19)..(428): Homolog of NCBI NO: 21594296 NR Description: unknown [Arabidopsis thaliana]
  misc_feature (70)..(423): Homolog of NCBI NO: 18424371 NR Description: zinc finger (C3HC4-type RING finger) protein
  misc_feature (70)..(423): Homolog of NCBI NO: 30697388 NR Description: zinc finger (C3HC4-type RING finger) protein
  misc_feature (33)..(412): Homolog of NCBI NO: 32489688 NR Description: OSJNBb0004G23.1 [Oryza sativa (japonica
  misc_feature (161)..(405): Homolog of NCBI NO: 9757769 NR Description: gene_id:MOK16.9~unknown protein [Arabidopsis
  misc_feature (171)..(405): Homolog of NCBI NO: 18398630 NR Description: zinc finger (C3HC4-type RING finger) protein [Arabidopsis thaliana] >gi|15809927|gb|AAL06891.1| [Arabidopsis thaliana] >gi|21360565|gb|AAM47479.1|
  misc_feature (161)..(405): Homolog of NCBI NO: 11290062 NR Description: hypothetical protein F15A17.210 - Arabidopsis >gi|7413595|emb|CAB86085.1| putative protein [Arabidopsis
SIKLDFFKIVLVSIGSIMMEGSSIQPPRNFVLAKDSSTGSSSSSSSSQVKEQSVEDVSRSQPSGSQLDVSIQIPPKPTPSLGILRNLSLKRKASLPNYERRLLLSPSVSETSEKPLVASPITSPYWKRCLSLPSSNSAKLSLVVSTTPVSAVVHSEQPKSNKDGLHASVSRSLSMNRVIVRAVSFDDNKNHISNEANGDQITPVPAEETEEEIPEEEAVCRICLDVCEEGNTLKMECSCKGDLRLVHEHCAIKWFSTKGTRICDVCRQEVRNLPVILLRVPTINQLTNRRELTQQSSEPQSISVGQEFVVLVLISTVCYFFFLEHLLIRDLNSQAIFVAAPFSFTLALLASTFAVILAIREYIWTYAALEFALVALLVHLLYATLRVPVIYAMLFAGILGFGMAMCLNLLCICYSSRPVRFPRNTNLV

SEQ ID NO: 104421 - protein, 411 aa, Arabidopsis thaliana
  peptide (1)..(411): Ceres Seq. ID no. 13614961
  misc_feature (203)..(249): Pfam Name: Zinc finger, C3HC4 type (RING finger) Pfam Description: Zinc finger, C3HC4 type (RING finger)
  misc_feature (1)..(411): Homolog of NCBI NO: 30686985 NR Description: zinc finger (C3HC4-type RING finger) protein
  misc_feature (1)..(411): Homolog of NCBI NO: 26452687 NR Description: unknown protein [Arabidopsis thaliana]
  misc_feature (2)..(411): Homolog of NCBI NO: 18397535 NR Description: zinc finger (C3HC4-type RING finger) protein [Arabidopsis thaliana] >gi|6437553|gb|AAF08580.1|AC011623_13 protein [Arabidopsis thaliana]
  misc_feature (2)..(411): Homolog of NCBI NO: 21594296 NR Description: unknown [Arabidopsis thaliana]
  misc_feature (53)..(406): Homolog of NCBI NO: 18424371 NR Description: zinc finger (C3HC4-type RING finger) protein
  misc_feature (53)..(406): Homolog of NCBI NO: 30697388 NR Description: zinc finger (C3HC4-type RING finger) protein
  misc_feature (16)..(395): Homolog of NCBI NO: 32489688 NR Description: OSJNBb0004G23.1 [Oryza sativa (japonica
  misc_feature (144)..(388): Homolog of NCBI NO: 9757769 NR Description: gene_id:MOK16.9~unknown protein [Arabidopsis
  misc_feature (154)..(388): Homolog of NCBI NO: 18398630 NR Description: zinc finger (C3HC4-type RING finger) protein [Arabidopsis thaliana] >gi|15809927|gb|AAL06891.1| [Arabidopsis thaliana] >gi|21360565|gb|AAM47479.1|
  misc_feature (144)..(388): Homolog of NCBI NO: 11290062 NR Description: hypothetical protein F15A17.210 - Arabidopsis >gi|7413595|emb|CAB86085.1| putative protein [Arabidopsis
MMEGSSIQPPRNFVLAKDSSTGSSSSSSSSQVKEQSVEDVSRSQPSGSQLDVSIQIPPKPTPSLGILRNLSLKRKASLPNYERRLLLSPSVSETSEKPLVASPITSPYWKRCLSLPSSNSAKLSLVVSTTPVSAVVHSEQPKSNKDGLHASVSRSLSMNRVIVRAVSFDDNKNHISNEANGDQITPVPAEETEEEIPEEEAVCRICLDVCEEGNTLKMECSCKGDLRLVHEHCAIKWFSTKGTRICDVCRQEVRNLPVILLRVPTINQLTNRRELTQQSSEPQSISVGQEFVVLVLISTVCYFFFLEHLLIRDLNSQAIFVAAPFSFTLALLASTFAVILAIREYIWTYAALEFALVALLVHLLYATLRVPVIYAMLFAGILGFGMAMCLNLLCICYSSRPVRFPRNTNLV

SEQ ID NO: 104422 - protein, 410 aa, Arabidopsis thaliana
  peptide (1)..(410): Ceres Seq. ID no. 13614962
  misc_feature (202)..(248): Pfam Name: Zinc finger, C3HC4 type (RING finger) Pfam Description: Zinc finger, C3HC4 type (RING finger)
  misc_feature (1)..(410): Homolog of NCBI NO: 30686985 NR Description: zinc finger (C3HC4-type RING finger) protein
  misc_feature (1)..(410): Homolog of NCBI NO: 26452687 NR Description: unknown protein [Arabidopsis thaliana]
  misc_feature (1)..(410): Homolog of NCBI NO: 18397535 NR Description: zinc finger (C3HC4-type RING finger) protein [Arabidopsis thaliana] >gi|6437553|gb|AAF08580.1|AC011623_13 protein [Arabidopsis thaliana]
  misc_feature (1)..(410): Homolog of NCBI NO: 21594296 NR Description: unknown [Arabidopsis thaliana]
  misc_feature (52)..(405): Homolog of NCBI NO: 18424371 NR Description: zinc finger (C3HC4-type RING finger) protein
  misc_feature (52)..(405): Homolog of NCBI NO: 30697388 NR Description: zinc finger (C3HC4-type RING finger) protein
  misc_feature (15)..(394): Homolog of NCBI NO: 32489688 NR Description: OSJNBb0004G23.1 [Oryza sativa (japonica
  misc_feature (143)..(387): Homolog of NCBI NO: 9757769 NR Description: gene_id:MOK16.9~unknown protein [Arabidopsis
  misc_feature (153)..(387): Homolog of NCBI NO: 18398630 NR Description: zinc finger (C3HC4-type RING finger) protein [Arabidopsis thaliana] >gi|15809927|gb|AAL06891.1| [Arabidopsis thaliana] >gi|21360565|gb|AAM47479.1|
  misc_feature (143)..(387): Homolog of NCBI NO: 11290062 NR Description: hypothetical protein F15A17.210 - Arabidopsis >gi|7413595|emb|CAB86085.1| putative protein [Arabidopsis
MEGSSIQPPRNFVLAKDSSTGSSSSSSSSQVKEQSVEDVSRSQPSGSQLDVSIQIPPKPTPSLGILRNLSLKRKASLPNYERRLLLSPSVSETSEKPLVASPITSPYWKRCLSLPSSNSAKLSLVVSTTPVSAVVHSEQPKSNKDGLHASVSRSLSMNRVIVRAVSFDDNKNHISNEANGDQITPVPAEETEEEIPEEEAVCRICLDVCEEGNTLKMECSCKGDLRLVHEHCAIKWFSTKGTRICDVCRQEVRNLPVILLRVPTINQLTNRRELTQQSSEPQSISVGQEFVVLVLISTVCYFFFLEHLLIRDLNSQAIFVAAPFSFTLALLASTFAVILAIREYIWTYAALEFALVALLVHLLYATLRVPVIYAMLFAGILGFGMAMCLNLLCICYSSRPVRFPRNTNLV

SEQ ID NO: 104423 - DNA, 710 bp, Arabidopsis thaliana
  misc_feature (1)..(710): Ceres Seq. ID no. 13614963
  misc_feature: MA Experiment ID: 108434 Result: Up-regulated in Transcription
  misc_feature: MA Experiment 108434 PARAMETER Experiment Name: At_Root_Tips_cDNA_P Parameter: Tissue Value: Root Tips
  misc_feature: MA Experiment ID: 20001911 Result: Down-regulated in Transcription
  misc_feature: MA Experiment 20001911 PARAMETER Experiment Name: At_Drought_Reproduction_P Parameter: Age (day) Value: 40
  misc_feature: MA Experiment 20001911 PARAMETER Experiment Name: At_Drought_Reproduction_P Parameter: Organism Value: A. thaliana
  misc_feature: MA Experiment 20001911 PARAMETER Experiment Name: At_Drought_Reproduction_P Parameter: Plant Line Value: WS
  misc_feature: MA Experiment 20001911 PARAMETER Experiment Name: At_Drought_Reproduction_P Parameter: Timepoint (day) Value: 10
  misc_feature: MA Experiment 20001911 PARAMETER Experiment Name: At_Drought_Reproduction_P Parameter: Tissue Value: Flowers
  misc_feature: MA Experiment 20001911 PARAMETER Experiment Name: At_Drought_Reproduction_P Parameter: Treatment Value: Drought vs. No Drought
atggcaaaagctactctcacctggttttgttgttctcttttctctctctcttttctctctctcttttctatttccgtcggactcagtggagaagaagaagaagatccaaatcgatccgttgaaaaggaatttcgaatttgctgtgcgatgtcgagtgcggtggacgctacgggaaacccgatccctacttcggcggttttaacggcgtcagcgaagcatataggtatgaggtgtatgccggagaatgttgcgttcctcaaatgcaagaagaatgatccaaacccagagaagtgtctcgacaaaggtcgtgacgtcactcgctgcgtgcttggcttgctgaaggatcttcaccagaagtgccaaaaggagatggatgattatgttgggtgtatgtattactacacaaacgagtttgatctgtgtaggaaagagcaagaagccttcgagaaagtgtgtcccttgaaatgagaatcacaagttcttgtcatgttttgatttgtatctcataataaagcaaaatgttcatttttgaatgagctttactctctccatctcttgtttgttgtcatcccatttatttcctctcagatgctttcgtagtgagttccaaagacaactaaatgactcagttttattgttcgatggttcactaatcagcacagaatggaacaattgtttttatctgcttatattctaccatacttgacagt

SEQ ID NO: 104424 - protein, 155 aa, Arabidopsis thaliana
  peptide (1)..(155): Ceres Seq. ID no. 13614964
  misc_feature (50)..(155): Homolog of NCBI NO: 15239564 NR Description: NADH:ubiquinone oxidoreductase - like protein
  misc_feature (51)..(155): Homolog of NCBI NO: 18397530 NR Description: expressed protein [Arabidopsis thaliana] unknown protein [Arabidopsis thaliana] unknown protein [Arabidopsis thaliana]
  misc_feature (63)..(154): Homolog of NCBI NO: 37589679 NR Description: Unknown (protein for MGC:73139) [Danio rerio]
  misc_feature (63)..(154): Homolog of NCBI NO: 7657369 NR Description: NADH dehydrogenase (ubiquinone) 1 alpha
  misc_feature (63)..(154): Homolog of NCBI NO: 27706932 NR Description: similar to RIKEN cDNA 0610033L03 [Mus musculus]
  misc_feature (63)..(154): Homolog of NCBI NO: 33086512 NR Description: Aa2-258 [Rattus norvegicus]
  misc_feature (63)..(154): Homolog of NCBI NO: 28461275 NR Description: NADH dehydrogenase (ubiquinone) 1 alpha
  misc_feature (63)..(150): Homolog of NCBI NO: 38048623 NR Description: similar to Drosophila melanogaster CG3683
  misc_feature (63)..(154): Homolog of NCBI NO: 21312012 NR Description: NADH dehydrogenase (ubiquinone) 1 alpha [Mus musculus] >gi|15214580|gb|AAH12416.1| RIKEN cDNA 0610033L03
  misc_feature (63)..(150): Homolog of NCBI NO: 24762701 NR Description: CG3683-PA [Drosophila melanogaster]
MAKATLTWFCCSLFSLSFLSLFSISVGLSGEEEEDPNRSVEKEFRICCAMSSAVDATGNPIPTSAVLTASAKHIGMRCMPENVAFLKCKKNDPNPEKCLDKGRDVTRCVLGLLKDLHQKCQKEMDDYVGCMYYYTNEFDLCRKEQEAFEKVCPLK

SEQ ID NO: 104425 - protein, 106 aa, Arabidopsis thaliana; identical to SEQ ID NO: 28463
  peptide (1)..(106): Ceres Seq. ID no. 13614965
  misc_feature (1)..(106): Homolog of NCBI NO: 15239564 NR Description: NADH:ubiquinone oxidoreductase - like protein
  misc_feature (2)..(106): Homolog of NCBI NO: 18397530 NR Description: expressed protein [Arabidopsis thaliana] unknown protein [Arabidopsis thaliana] unknown protein [Arabidopsis thaliana]
  misc_feature (14)..(105): Homolog of NCBI NO: 37589679 NR Description: Unknown (protein for MGC:73139) [Danio rerio]
  misc_feature (14)..(105): Homolog of NCBI NO: 7657369 NR Description: NADH dehydrogenase (ubiquinone) 1 alpha
  misc_feature (14)..(105): Homolog of NCBI NO: 27706932 NR Description: similar to RIKEN cDNA 0610033L03 [Mus musculus]
  misc_feature (14)..(105): Homolog of NCBI NO: 33086512 NR Description: Aa2-258 [Rattus norvegicus]
  misc_feature (14)..(105): Homolog of NCBI NO: 28461275 NR Description: NADH dehydrogenase (ubiquinone) 1 alpha
  misc_feature (14)..(101): Homolog of NCBI NO: 38048623 NR Description: similar to Drosophila melanogaster CG3683
  misc_feature (14)..(105): Homolog of NCBI NO: 21312012 NR Description: NADH dehydrogenase (ubiquinone) 1 alpha [Mus musculus] >gi|15214580|gb|AAH12416.1| RIKEN cDNA 0610033L03
  misc_feature (14)..(101): Homolog of NCBI NO: 24762701 NR Description: CG3683-PA [Drosophila melanogaster]

SEQ ID NO: 104426 - protein, 80 aa, Arabidopsis thaliana; identical to SEQ ID NO: 28464
  peptide (1)..(80): Ceres Seq. ID no. 13614966
  misc_feature (1)..(80): Homolog of NCBI NO: 15239564 NR Description: NADH:ubiquinone oxidoreductase - like protein
  misc_feature (1)..(80): Homolog of NCBI NO: 18397530 NR Description: expressed protein [Arabidopsis thaliana] unknown protein [Arabidopsis thaliana] unknown protein [Arabidopsis thaliana]
  misc_feature (1)..(79): Homolog of NCBI NO: 37589679 NR Description: Unknown (protein for MGC:73139) [Danio rerio]
  misc_feature (1)..(79): Homolog of NCBI NO: 7657369 NR Description: NADH dehydrogenase (ubiquinone) 1 alpha
  misc_feature (1)..(79): Homolog of NCBI NO: 27706932 NR Description: similar to RIKEN cDNA 0610033L03 [Mus musculus]
  misc_feature (1)..(79): Homolog of NCBI NO: 33086512 NR Description: Aa2-258 [Rattus norvegicus]
  misc_feature (1)..(79): Homolog of NCBI NO: 28461275 NR Description: NADH dehydrogenase (ubiquinone) 1 alpha
  misc_feature (1)..(75): Homolog of NCBI NO: 38048623 NR Description: similar to Drosophila melanogaster CG3683
  misc_feature (1)..(79): Homolog of NCBI NO: 21312012 NR Description: NADH dehydrogenase (ubiquinone) 1 alpha [Mus musculus] >gi|15214580|gb|AAH12416.1| RIKEN cDNA 0610033L03
  misc_feature (1)..(75): Homolog of NCBI NO: 24762701 NR Description: CG3683-PA [Drosophila melanogaster]

SEQ ID NO: 104427 - DNA, 1747 bp, Arabidopsis thaliana
  misc_feature (1)..(1747): Ceres Seq. ID no. 13614967
  misc_feature: MA Experiment ID: 108594 Result: Up-regulated in Transcription
  misc_feature: MA Experiment 108594 PARAMETER Experiment Name: At_Ler-rhl_Root_cDNA_P Parameter: Plant Line Value: null
  misc_feature: MA Experiment ID: 108595 Result: Up-regulated in Transcription
  misc_feature: MA Experiment 108595 PARAMETER Experiment Name: At_Ler-pi_Ovule_cDNA_P Parameter: Plant Line Value: null
  misc_feature: MA Experiment ID: 20000166 Result: Down-regulated in Transcription
  misc_feature: MA Experiment 20000166 PARAMETER Experiment Name: At_100uM_ABA_P Parameter: Age (day) Value: 14
  misc_feature: MA Experiment 20000166 PARAMETER Experiment Name: At_100uM_ABA_P Parameter: Organism Value: A. thaliana
  misc_feature: MA Experiment 20000166 PARAMETER Experiment Name: At_100uM_ABA_P Parameter: Plant Line Value: WS
  misc_feature: MA Experiment 20000166 PARAMETER Experiment Name: At_100uM_ABA_P Parameter: Timepoint (hr) Value: 1
  misc_feature: MA Experiment 20000166 PARAMETER Experiment Name: At_100uM_ABA_P Parameter: Tissue Value: Aerial
  misc_feature: MA Experiment 20000166 PARAMETER Experiment Name: At_100uM_ABA_P Parameter: Treatment Value: 100uM ABA vs. No Treatment
  misc_feature: MA Experiment ID: 20000184 Result: Down-regulated in Transcription
  misc_feature: MA Experiment 20000184 PARAMETER Experiment Name: At_Shoots__P Parameter: Age (day) Value: 7
  misc_feature: MA Experiment 20000184 PARAMETER Experiment Name: At_Shoots__P Parameter: Tissue Value: Shoots vs. Whole Plant
  misc_feature: MA Experiment ID: 20000214 Result: Down-regulated in Transcription
  misc_feature: MA Experiment 20000214 PARAMETER Experiment Name: At_4deg_Cold_P Parameter: Timepoint (hr) Value: 6
  misc_feature: MA Experiment ID: 20000234 Result: Up-regulated in Transcription
  misc_feature: MA Experiment 20000234 PARAMETER Experiment Name: At_Siliques_P Parameter: Age (day) Value: 21
  misc_feature: MA Experiment 20000234 PARAMETER Experiment Name: At_Siliques_P Parameter: Organism Value: A. thaliana
  misc_feature: MA Experiment 20000234 PARAMETER Experiment Name: At_Siliques_P Parameter: Plant Line Value: WS
  misc_feature: MA Experiment 20000234 PARAMETER Experiment Name: At_Siliques_P Parameter: Tissue Value: Less Than 5mm Siliques vs. Whole Plant
  misc_feature: MA Experiment ID: 20000264 Result: Up-regulated in Transcription
  misc_feature: MA Experiment 20000264 PARAMETER Experiment Name: At_Open_Flower_P Parameter: Age (day) Value: 21
  misc_feature: MA Experiment 20000264 PARAMETER Experiment Name: At_Open_Flower_P Parameter: Plant Line Value: WS
  misc_feature: MA Experiment 20000264 PARAMETER Experiment Name: At_Open_Flower_P Parameter: Tissue Value: Open Flower vs. Whole Plant
  misc_feature: MA Experiment ID: 20000265 Result: Up-regulated in Transcription
  misc_feature: MA Experiment 20000265 PARAMETER Experiment Name: At_Open_Flower_P Parameter: Age (day) Value: 21
  misc_feature: MA Experiment 20000265 PARAMETER Experiment Name: At_Open_Flower_P Parameter: Plant Line Value: WS
  misc_feature: MA Experiment 20000265 PARAMETER Experiment Name: At_Open_Flower_P Parameter: Tissue Value: Closed Flower vs. Whole Plant
  misc_feature: MA Experiment ID: 20000268 Result: Down-regulated in Transcription
  misc_feature: MA Experiment 20000268 PARAMETER Experiment Name: At_100mM_NaCl__P Parameter: Age (day) Value: 14
  misc_feature: MA Experiment 20000268 PARAMETER Experiment Name: At_100mM_NaCl__P Parameter: Organism Value: A. thaliana
  misc_feature: MA Experiment 20000268 PARAMETER Experiment Name: At_100mM_NaCl__P Parameter: Plant Line Value: WS
  misc_feature: MA Experiment 20000268 PARAMETER Experiment Name: At_100mM_NaCl__P Parameter: Timepoint (hr) Value: 6
  misc_feature: MA Experiment 20000268 PARAMETER Experiment Name: At_100mM_NaCl__P Parameter: Tissue Value: Whole Plant
  misc_feature: MA Experiment 20000268 PARAMETER Experiment Name: At_100mM_NaCl__P Parameter: Treatment Value: 100mM NaCl vs. No Treatment
  misc_feature: MA Experiment ID: 20000269 Result: Up-regulated in Transcription
  misc_feature: MA Experiment 20000269 PARAMETER Experiment Name: At_1mM_KNO3_L-vs-H_Roots_P Parameter: Age (day) Value: 7,10,12
  misc_feature: MA Experiment 20000269 PARAMETER Experiment Name: At_1mM_KNO3_L-vs-H_Roots_P Parameter: Organism Value: A. thaliana
  misc_feature: MA Experiment 20000269 PARAMETER Experiment Name: At_1mM_KNO3_L-vs-H_Roots_P Parameter: Plant Line Value: WS
  misc_feature: MA Experiment 20000269 PARAMETER Experiment Name: At_1mM_KNO3_L-vs-H_Roots_P Parameter: Timepoint (day) Value: 7,10,12
  misc_feature: MA Experiment 20000269 PARAMETER Experiment Name: At_1mM_KNO3_L-vs-H_Roots_P Parameter: Tissue Value: Roots
  misc_feature: MA Experiment 20000269 PARAMETER Experiment Name: At_1mM_KNO3_L-vs-H_Roots_P Parameter: Treatment Value: 1mM KNO3 vs. 50mM KNO3
  misc_feature: MA Experiment ID: 20000286 Result: Up-regulated in Transcription
  misc_feature: MA Experiment 20000286 PARAMETER Experiment Name: At_Open_Flower_P Parameter: Age (day) Value: 21
  misc_feature: MA Experiment 20000286 PARAMETER Experiment Name: At_Open_Flower_P Parameter: Plant Line Value: WS
  misc_feature: MA Experiment 20000286 PARAMETER Experiment Name: At_Open_Flower_P Parameter: Tissue Value: Half Open vs. Whole Plant
  misc_feature: MA Experiment ID: 20000436 Result: Down-regulated in Transcription
  misc_feature: MA Experiment 20000436 PARAMETER Experiment Name: At_Drought_P Parameter: Age (day) Value: 7
  misc_feature: MA Experiment 20000436 PARAMETER Experiment Name: At_Drought_P Parameter: Organism Value: A. thaliana
  misc_feature: MA Experiment 20000436 PARAMETER Experiment Name: At_Drought_P Parameter: Plant Line Value: WS
  misc_feature: MA Experiment 20000436 PARAMETER Experiment Name: At_Drought_P Parameter: Timepoint (hr) Value: 12
  misc_feature: MA Experiment 20000436 PARAMETER Experiment Name: At_Drought_P Parameter: Tissue Value: Whole Plant
  misc_feature: MA Experiment 20000436 PARAMETER Experiment Name: At_Drought_P Parameter: Treatment Value: Drought vs. No Drought
  misc_feature: MA Experiment ID: 20000438 Result: Down-regulated in Transcription
  misc_feature: MA Experiment 20000438 PARAMETER Experiment Name: At_Shoots__P Parameter: Age (day) Value: 14
  misc_feature: MA Experiment 20000438 PARAMETER Experiment Name: At_Shoots__P Parameter: Tissue Value: Shoots vs. Whole Plant
  misc_feature: MA Experiment ID: 20000439 Result: Up-regulated in Transcription
  misc_feature: MA Experiment 20000439 PARAMETER Experiment Name: At_Roots__P Parameter: Age (day) Value: 14 vs. 21
  misc_feature: MA Experiment 20000439 PARAMETER Experiment Name: At_Roots__P Parameter: Organism Value: A. thaliana
  misc_feature: MA Experiment 20000439 PARAMETER Experiment Name: At_Roots__P Parameter: Tissue Value: Roots vs. Whole Plant
  misc_feature: MA Experiment ID: 20000453 Result: Up-regulated in Transcription
  misc_feature: MA Experiment 20000453 PARAMETER Experiment Name: At_100uM_ABA_P Parameter: Age (day) Value: 15
  misc_feature: MA Experiment 20000453 PARAMETER Experiment Name: At_100uM_ABA_P Parameter: Organism Value: A. thaliana
  misc_feature: MA Experiment 20000453 PARAMETER Experiment Name: At_100uM_ABA_P Parameter: Plant Line Value: WS
  misc_feature: MA Experiment 20000453 PARAMETER Experiment Name: At_100uM_ABA_P Parameter: Timepoint (hr) Value: 24
  misc_feature: MA Experiment 20000453 PARAMETER Experiment Name: At_100uM_ABA_P Parameter: Tissue Value: Aerial
  misc_feature: MA Experiment 20000453 PARAMETER Experiment Name: At_100uM_ABA_P Parameter: Treatment Value: 100uM ABA vs. No Treatment
  misc_feature: MA Experiment ID: 20000573 Result: Up-regulated in Transcription
  misc_feature: MA Experiment 20000573 PARAMETER Experiment Name: At_100uM_ABA_Mutants__P Parameter: Organism Value: A. thaliana
  misc_feature: MA Experiment 20000573 PARAMETER Experiment Name: At_100uM_ABA_Mutants__P Parameter: Plant Line Value: CS22 vs. Ler wt
  misc_feature: MA Experiment 20000573 PARAMETER Experiment Name: At_100uM_ABA_Mutants__P Parameter: Timepoint (hr) Value: N/A
  misc_feature: MA Experiment 20000573 PARAMETER Experiment Name: At_100uM_ABA_Mutants__P Parameter: Tissue Value: Whole Plant
  misc_feature: MA Experiment 20000573 PARAMETER Experiment Name: At_100uM_ABA_Mutants__P Parameter: Treatment Value: None
  misc_feature: MA Experiment ID: 20000574 Result: Up-regulated in Transcription
  misc_feature: MA Experiment 20000574 PARAMETER Experiment Name: At_100uM_ABA_Mutants__P Parameter: Organism Value: A. thaliana
  misc_feature: MA Experiment 20000574 PARAMETER Experiment Name: At_100uM_ABA_Mutants__P Parameter: Plant Line Value: CS23 vs. Ler wt
  misc_feature: MA Experiment 20000574 PARAMETER Experiment Name: At_100uM_ABA_Mutants__P Parameter: Timepoint (hr) Value: N/A
  misc_feature: MA Experiment 20000574 PARAMETER Experiment Name: At_100uM_ABA_Mutants__P Parameter: Tissue Value: Whole Plant
  misc_feature: MA Experiment 20000574 PARAMETER Experiment Name: At_100uM_ABA_Mutants__P Parameter: Treatment Value: None
  misc_feature: MA Experiment ID: 20000794 Result: Up-regulated in Transcription
  misc_feature: MA Experiment 20000794 PARAMETER Experiment Name: At_Petals_P Parameter: Age (day) Value: 23-25 days
  misc_feature: MA Experiment 20000794 PARAMETER Experiment Name: At_Petals_P Parameter: Plant Line Value: WS
  misc_feature: MA Experiment 20000794 PARAMETER Experiment Name: At_Petals_P Parameter: Tissue Value: Petals vs. Whole plant
  misc_feature: MA Experiment ID: 20001554 Result: Down-regulated in Transcription
  misc_feature: MA Experiment 20001554 PARAMETER Experiment Name: At_Drought_Soil_Dry_P Parameter: Age (day) Value: 21
  misc_feature: MA Experiment 20001554 PARAMETER Experiment Name: At_Drought_Soil_Dry_P Parameter: Organism Value: A. thaliana
  misc_feature: MA Experiment 20001554 PARAMETER Experiment Name: At_Drought_Soil_Dry_P Parameter: Plant Line Value: WS
  misc_feature: MA Experiment 20001554 PARAMETER Experiment Name: At_Drought_Soil_Dry_P Parameter: Post Timepoint (hr) Value: None
  misc_feature: MA Experiment 20001554 PARAMETER Experiment Name: At_Drought_Soil_Dry_P Parameter: Post-Treatment Value: None
  misc_feature: MA Experiment 20001554 PARAMETER Experiment Name: At_Drought_Soil_Dry_P Parameter: Timepoint (day) Value: 7
  misc_feature: MA Experiment 20001554 PARAMETER Experiment Name: At_Drought_Soil_Dry_P Parameter: Treatment Value: Drought vs. No Drought
  misc_feature: MA Experiment ID: 20001557 Result: Up-regulated in Transcription
  misc_feature: MA Experiment 20001557 PARAMETER Experiment Name: At_Drought_Soil_Dry_P Parameter: Age (day) Value: 27
  misc_feature: MA Experiment 20001557 PARAMETER Experiment Name: At_Drought_Soil_Dry_P Parameter: Organism Value: A. thaliana
  misc_feature: MA Experiment 20001557 PARAMETER Experiment Name: At_Drought_Soil_Dry_P Parameter: Plant Line Value: WS
  misc_feature: MA Experiment 20001557 PARAMETER Experiment Name: At_Drought_Soil_Dry_P Parameter: Post Timepoint (hr) Value: 3
  misc_feature: MA Experiment 20001557 PARAMETER Experiment Name: At_Drought_Soil_Dry_P Parameter: Post-Treatment Value: Re-Water vs. No Drought
  misc_feature: MA Experiment 20001557 PARAMETER Experiment Name: At_Drought_Soil_Dry_P Parameter: Timepoint (day) Value: 13
  misc_feature: MA Experiment 20001557 PARAMETER Experiment Name: At_Drought_Soil_Dry_P Parameter: Treatment Value: Drought vs. No Drought
  misc_feature: MA Experiment ID: 20001558 Result: Up-regulated in Transcription
  misc_feature: MA Experiment 20001558 PARAMETER Experiment Name: At_Drought_Soil_Dry_P Parameter: Age (day) Value: 27
  misc_feature: MA Experiment 20001558 PARAMETER Experiment Name: At_Drought_Soil_Dry_P Parameter: Organism Value: A. thaliana
  misc_feature: MA Experiment 20001558 PARAMETER Experiment Name: At_Drought_Soil_Dry_P Parameter: Plant Line Value: WS
  misc_feature: MA Experiment 20001558 PARAMETER Experiment Name: At_Drought_Soil_Dry_P Parameter: Post Timepoint (hr) Value: 6
  misc_feature: MA Experiment 20001558 PARAMETER Experiment Name: At_Drought_Soil_Dry_P Parameter: Post-Treatment Value: Re-Water vs. No Drought
  misc_feature: MA Experiment 20001558 PARAMETER Experiment Name: At_Drought_Soil_Dry_P Parameter: Timepoint (day) Value: 13
  misc_feature: MA Experiment 20001558 PARAMETER Experiment Name: At_Drought_Soil_Dry_P Parameter: Treatment Value: Drought vs. No Drought
  misc_feature: MA Experiment ID: 20001560 Result: Up-regulated in Transcription
  misc_feature: MA Experiment 20001560 PARAMETER Experiment Name: At_Drought_Soil_Dry_P Parameter: Age (day) Value: 28
  misc_feature: MA Experiment 20001560 PARAMETER Experiment Name: At_Drought_Soil_Dry_P Parameter: Organism Value: A. thaliana
  misc_feature: MA Experiment 20001560 PARAMETER Experiment Name: At_Drought_Soil_Dry_P Parameter: Plant Line Value: WS
  misc_feature: MA Experiment 20001560 PARAMETER Experiment Name: At_Drought_Soil_Dry_P Parameter: Post Timepoint (hr) Value: None
  misc_feature: MA Experiment 20001560 PARAMETER Experiment Name: At_Drought_Soil_Dry_P Parameter: Post-Treatment Value: None
  misc_feature: MA Experiment 20001560 PARAMETER Experiment Name: At_Drought_Soil_Dry_P Parameter: Timepoint (day) Value: 14
  misc_feature: MA Experiment 20001560 PARAMETER Experiment Name: At_Drought_Soil_Dry_P Parameter: Treatment Value: Drought vs. No Drought
  misc_feature: MA Experiment ID: 20001757 Result: Up-regulated in Transcription
  misc_feature: MA Experiment 20001757 PARAMETER Experiment Name: At_50mM_NH4NO3_L-to-H_P Parameter: Timepoint (hr) Value: 6
  misc_feature: MA Experiment 20001757 PARAMETER Experiment Name: At_50mM_NH4NO3_L-to-H_P Parameter: Tissue Value: Leaf
  misc_feature: MA Experiment 20001757 PARAMETER Experiment Name: At_50mM_NH4NO3_L-to-H_P Parameter: Treatment Value: 50mM NH4NO3 vs 100mM Mannitol
  misc_feature: MA Experiment ID: 20001906 Result: Up-regulated in Transcription
  misc_feature: MA Experiment 20001906 PARAMETER Experiment Name: At_Drought_Reproduction_P Parameter: Age (day) Value: 35
  misc_feature: MA Experiment 20001906 PARAMETER Experiment Name: At_Drought_Reproduction_P Parameter: Organism Value: A. thaliana
  misc_feature: MA Experiment 20001906 PARAMETER Experiment Name: At_Drought_Reproduction_P Parameter: Plant Line Value: WS
  misc_feature: MA Experiment 20001906 PARAMETER Experiment Name: At_Drought_Reproduction_P Parameter: Timepoint (day) Value: 5
  misc_feature: MA Experiment 20001906 PARAMETER Experiment Name: At_Drought_Reproduction_P Parameter: Tissue Value: Siliques
  misc_feature: MA Experiment 20001906 PARAMETER Experiment Name: At_Drought_Reproduction_P Parameter: Treatment Value: Drought vs. No Drought
acatctatctctttctctctctttccttgcaaattttcagctctcaaagagttaagagttagagagagagaggatggccattagggaaatcaaagatgtagagaggggtgaaatagtgaataaggtagaagatcttgggaaaccatttttgactcatgaagatgatgaaaaagagagtgagaataatgaatcatatttgatggttctcttcagtacttttgttgctgtctgtggctcctttgagtttggctcttgtgttggatactcagcgcctactcagtcatctataagacaagatctcaatctctcccttgcagagttctccatgtttggatccatcttaactatcggtgcaatgcttggtgctgttatgagtgggaaaatttcagatttctccggccgaaaaggggcaatgaggacatcagcttgcttctgcattacaggttggctcgctgtcttcttcaccaagggggcattgttacttgatgtaggaaggttctttacaggatatggaattggagttttttcttatgtggtccctgtgtacattgctgagatatctcccaagaatctccgaggtggactcacaacactgaaccaactcatgattgtgatcggctcatcggtttctttcttgatcggatctctcatttcttggaaaactcttgccctaaccggacttgctccctgcattgttttgctctttggcttgtgcttcatacccgaatctcctcgatggctggcaaaagcaggccatgagaaagagtttcgcgtagccctgcaaaagctgcgaggaaaagatgcagatatcacaaatgaagcagacggtattcaagtctcgattcaagctctagagattcttccaaaagcaagaatccaagaccttgtgtccaagaaatatggtcgatctgtcatcattggtgtttccctgatggtattccaacagtttgttggaatcaatgggatcggattctacgcaagtgaaacgtttgtaaaagccggatttacctctgggaaactaggaacaatcgctatcgcttgtgttcaggtgccaataactgttcttggaacaatcttgatagataaatctggacgaaggccactaattatgatttcagctggtggtatcttcttgggatgcatactcacaggcacatctttcttactcaagggacagagcttgttgcttgaatgggtcccttccttagccgttggaggtgtacttatctatgtagctgctttctccatcggaatgggacctgttccttgggtgataatgtctgagatatttccgataaacgtaaagggaatcgcaggaagcttagtggtactagtgaattggtctggtgcttgggctgtttcttacactttcaacttcctcatgagctggagctctccaggtacattctatttgtactcggcttttgcagctgcgacgataatatttgtggcgaagatggtgccagagacgaaagggaagacactggaagagatccaagcttgtattcgaagagaaacataagaagaaagatacaatcaatgttatgggaatgttatcaaatgaaaagactcgaactattcccgttggtgagctcaaagtggagtagagtaaaaattatcgccgggagataacgttgaaagtccgatgatgaggcataagggttttgcatgaatgttatgagaataggtttacttttatgtatttgttcacgttttaagttttcatcaaataggtttttgattggta

SEQ ID NO: 104428 - protein, 482 aa, Arabidopsis thaliana; identical to SEQ ID NO: 26636
  peptide (1)..(482): Ceres Seq. ID no. 13614968
  misc_feature (47)..(478): Pfam Name: Sugar (and other) transporter Pfam Description: Sugar (and other) transporter
  misc_feature (1)..(482): Homolog of NCBI NO: 18419741 NR Description: sugar transporter, putative [Arabidopsis >gi|17381265|gb|AAL36051.1| AT5g18840/F17K4_90 [Arabidopsis >gi|23309019|gb|AAN18269.1| At5g18840/F17K4_90 [Arabidopsis
  misc_feature (1)..(482): Homolog of NCBI NO: 21592787 NR Description: sugar transporter-like protein [Arabidopsis
  misc_feature (7)..(478): Homolog of NCBI NO: 23504385 NR Description: putative sugar transporter [Lycopersicon
  misc_feature (11)..(476): Homolog of NCBI NO: 30679397 NR Description: sugar transporter family [Arabidopsis thaliana]
  misc_feature (15)..(476): Homolog of NCBI NO: 6729025 NR Description: putative sugar transporter [Arabidopsis thaliana]
  misc_feature (43)..(478): Homolog of NCBI NO: 18407508 NR Description: sugar transporter, putative [Arabidopsis >gi|30690868|ref|NP_850483.1| sugar transporter, putative thaliana] >gi|20197560|gb|AAD13706.2| putative sugar transporter
  misc_feature (43)..(478): Homolog of NCBI NO: 21536914 NR Description: putative sugar transporter [Arabidopsis thaliana]
  misc_feature (33)..(478): Homolog of NCBI NO: 30695810 NR Description: sugar transporter, putative [Arabidopsis thaliana]
  misc_feature (1)..(326): Homolog of NCBI NO: 25405762 NR Description: hypothetical protein T22H22.15 [imported] - thaliana >gi|3776581|gb|AAC64898.1| Similar to Beta integral protein homolog gb|U43629 from A. thaliana. [Arabidopsis
  misc_feature (378)..(478): Homolog of NCBI NO: 25405762 NR Description: hypothetical protein T22H22.15 [imported] - thaliana >gi|3776581|gb|AAC64898.1| Similar to Beta integral protein homolog gb|U43629 from A. thaliana. [Arabidopsis

SEQ ID NO: 104429 - protein, 440 aa, Arabidopsis thaliana; identical to SEQ ID NO: 26637
  peptide (1)..(440): Ceres Seq. ID no. 13614969
  misc_feature (5)..(436): Pfam Name: Sugar (and other) transporter Pfam Description: Sugar (and other) transporter
  misc_feature (1)..(440): Homolog of NCBI NO: 18419741 NR Description: sugar transporter, putative [Arabidopsis >gi|17381265|gb|AAL36051.1| AT5g18840/F17K4_90 [Arabidopsis >gi|23309019|gb|AAN18269.1| At5g18840/F17K4_90 [Arabidopsis
  misc_feature (1)..(440): Homolog of NCBI NO: 21592787 NR Description: sugar transporter-like protein [Arabidopsis
  misc_feature (1)..(436): Homolog of NCBI NO: 23504385 NR Description: putative sugar transporter [Lycopersicon
  misc_feature (1)..(434): Homolog of NCBI NO: 30679397 NR Description: sugar transporter family [Arabidopsis thaliana]
  misc_feature (1)..(434): Homolog of NCBI NO: 6729025 NR Description: putative sugar transporter [Arabidopsis thaliana]
  misc_feature (1)..(436): Homolog of NCBI NO: 18407508 NR Description: sugar transporter, putative [Arabidopsis >gi|30690868|ref|NP_850483.1| sugar transporter, putative thaliana] >gi|20197560|gb|AAD13706.2| putative sugar transporter
  misc_feature (1)..(436): Homolog of NCBI NO: 21536914 NR Description: putative sugar transporter [Arabidopsis thaliana]
  misc_feature (1)..(436): Homolog of NCBI NO: 30695810 NR Description: sugar transporter, putative [Arabidopsis thaliana]
  misc_feature (1)..(284): Homolog of NCBI NO: 25405762 NR Description: hypothetical protein T22H22.15 [imported] - thaliana >gi|3776581|gb|AAC64898.1| Similar to Beta integral protein homolog gb|U43629 from A. thaliana. [Arabidopsis
  misc_feature (336)..(436): Homolog of NCBI NO: 25405762 NR Description: hypothetical protein T22H22.15 [imported] - thaliana >gi|3776581|gb|AAC64898.1| Similar to Beta integral protein homolog gb|U43629 from A. thaliana. [Arabidopsis

SEQ ID NO: 104430 - protein, 398 aa, Arabidopsis thaliana; identical to SEQ ID NO: 26638
  peptide (1)..(398): Ceres Seq. ID no. 13614970
  misc_feature (1)..(394): Pfam Name: Sugar (and other) transporter Pfam Description: Sugar (and other) transporter
  misc_feature (1)..(398): Homolog of NCBI NO: 18419741 NR Description: sugar transporter, putative [Arabidopsis >gi|17381265|gb|AAL36051.1| AT5g18840/F17K4_90 [Arabidopsis >gi|23309019|gb|AAN18269.1| At5g18840/F17K4_90 [Arabidopsis
  misc_feature (1)..(398): Homolog of NCBI NO: 21592787 NR Description: sugar transporter-like protein [Arabidopsis
  misc_feature (1)..(394): Homolog of NCBI NO: 23504385 NR Description: putative sugar transporter [Lycopersicon
  misc_feature (1)..(392): Homolog of NCBI NO: 30679397 NR Description: sugar transporter family [Arabidopsis thaliana]
  misc_feature (1)..(392): Homolog of NCBI NO: 6729025 NR Description: putative sugar transporter [Arabidopsis thaliana]
  misc_feature (1)..(394): Homolog of NCBI NO: 18407508 NR Description: sugar transporter, putative [Arabidopsis >gi|30690868|ref|NP_850483.1| sugar transporter, putative thaliana] >gi|20197560|gb|AAD13706.2| putative sugar transporter
  misc_feature (1)..(394): Homolog of NCBI NO: 21536914 NR Description: putative sugar transporter [Arabidopsis thaliana]
  misc_feature (1)..(394): Homolog of NCBI NO: 30695810 NR Description: sugar transporter, putative [Arabidopsis thaliana]
  misc_feature (1)..(242): Homolog of NCBI NO: 25405762 NR Description: hypothetical protein T22H22.15 [imported] - thaliana >gi|3776581|gb|AAC64898.1| Similar to Beta integral protein homolog gb|U43629 from A. thaliana. [Arabidopsis
  misc_feature (294)..(394): Homolog of NCBI NO: 25405762 NR Description: hypothetical protein T22H22.15 [imported] - thaliana >gi|3776581|gb|AAC64898.1| Similar to Beta integral protein homolog gb|U43629 from A. thaliana. [Arabidopsis

SEQ ID NO: 104431 - DNA, 2265 bp, Arabidopsis thaliana
  misc_feature (1)..(2265): Ceres Seq. ID no. 13614971
  misc_feature: MA Experiment ID: 108434 Result: Up-regulated in Transcription
  misc_feature: MA Experiment 108434 PARAMETER Experiment Name: At_Root_Tips_cDNA_P Parameter: Tissue Value: Root Tips
  misc_feature: MA Experiment ID: 108576 Result: Down-regulated in Transcription
  misc_feature: MA Experiment 108576 PARAMETER Experiment Name: At_42deg_Heat_cDNA_P Parameter: Temperature (deg C) Value: 42 vs. 22
  misc_feature: MA Experiment 108576 PARAMETER Experiment Name: At_42deg_Heat_cDNA_P Parameter: Timepoint (hr) Value: 1
  misc_feature: MA Experiment 108576 PARAMETER Experiment Name: At_42deg_Heat_cDNA_P Parameter: Tissue Value: Aerial
  misc_feature: MA Experiment ID: 108595 Result: Down-regulated in Transcription
  misc_feature: MA Experiment 108595 PARAMETER Experiment Name: At_Ler-pi_Ovule_cDNA_P Parameter: Plant Line Value: null
  misc_feature: MA Experiment ID: 20000087 Result: Down-regulated in Transcription
  misc_feature: MA Experiment 20000087 PARAMETER Experiment Name: At_100uM_ABA_Mutants_cDNA_P Parameter: Plant Line Value: WS
  misc_feature: MA Experiment 20000087 PARAMETER Experiment Name: At_100uM_ABA_Mutants_cDNA_P Parameter: Timepoint (hr) Value: 6
  misc_feature: MA Experiment 20000087 PARAMETER Experiment Name: At_100uM_ABA_Mutants_cDNA_P Parameter: Tissue Value: Aerial
  misc_feature: MA Experiment 20000087 PARAMETER Experiment Name: At_100uM_ABA_Mutants_cDNA_P Parameter: Treatment Value: 100uM ABA vs. No Treatment
  misc_feature: MA Experiment ID: 20000171 Result: Down-regulated in Transcription
  misc_feature: MA Experiment 20000171 PARAMETER Experiment Name: At_42deg_Heat_P Parameter: Age (day) Value: 14
  misc_feature: MA Experiment 20000171 PARAMETER Experiment Name: At_42deg_Heat_P Parameter: Organism Value: A. thaliana
  misc_feature: MA Experiment 20000171 PARAMETER Experiment Name: At_42deg_Heat_P Parameter: Plant Line Value: WS
  misc_feature: MA Experiment 20000171 PARAMETER Experiment Name: At_42deg_Heat_P Parameter: Temperature (deg C) Value: 42 vs. 22
  misc_feature: MA Experiment 20000171 PARAMETER Experiment Name: At_42deg_Heat_P Parameter: Timepoint (hr) Value: 1
  misc_feature: MA Experiment 20000171 PARAMETER Experiment Name: At_42deg_Heat_P Parameter: Tissue Value: Aerial
  misc_feature: MA Experiment ID: 20000173 Result: Down-regulated in Transcription
  misc_feature: MA Experiment 20000173 PARAMETER Experiment Name: At_42deg_Heat_P Parameter: Age (day) Value: 14
  misc_feature: MA Experiment 20000173 PARAMETER Experiment Name: At_42deg_Heat_P Parameter: Organism Value: A. thaliana
  misc_feature: MA Experiment 20000173 PARAMETER Experiment Name: At_42deg_Heat_P Parameter: Plant Line Value: WS
  misc_feature: MA Experiment 20000173 PARAMETER Experiment Name: At_42deg_Heat_P Parameter: Temperature (deg C) Value: 42 vs. 22
  misc_feature: MA Experiment 20000173 PARAMETER Experiment Name: At_42deg_Heat_P Parameter: Timepoint (hr) Value: 6
  misc_feature: MA Experiment 20000173 PARAMETER Experiment Name: At_42deg_Heat_P Parameter: Tissue Value: Aerial
  misc_feature: MA Experiment ID: 20000437 Result: Down-regulated in Transcription
  misc_feature: MA Experiment 20000437 PARAMETER Experiment Name: At_Drought_P Parameter: Age (day) Value: 8
  misc_feature: MA Experiment 20000437 PARAMETER Experiment Name: At_Drought_P Parameter: Organism Value: A. thaliana
  misc_feature: MA Experiment 20000437 PARAMETER Experiment Name: At_Drought_P Parameter: Plant Line Value: WS
  misc_feature: MA Experiment 20000437 PARAMETER Experiment Name: At_Drought_P Parameter: Timepoint (hr) Value: 24
  misc_feature: MA Experiment 20000437 PARAMETER Experiment Name: At_Drought_P Parameter: Tissue Value: Whole Plant
  misc_feature: MA Experiment 20000437 PARAMETER Experiment Name: At_Drought_P Parameter: Treatment Value: Drought vs. No Drought
  misc_feature: MA Experiment ID: 20001247 Result: Up-regulated in Transcription
  misc_feature: MA Experiment 20001247 PARAMETER Experiment Name: At_Far-red-induction_P Parameter: Age (day) Value: 7
  misc_feature: MA Experiment 20001247 PARAMETER Experiment Name: At_Far-red-induction_P Parameter: Light Value: Far-red vs. White
  misc_feature: MA Experiment 20001247 PARAMETER Experiment Name: At_Far-red-induction_P Parameter: Organism Value: A. thaliana
  misc_feature: MA Experiment 20001247 PARAMETER Experiment Name: At_Far-red-induction_P Parameter: Plant Line Value: Columbia
  misc_feature: MA Experiment 20001247 PARAMETER Experiment Name: At_Far-red-induction_P Parameter: Timepoint (hr) Value: 1
  misc_feature: MA Experiment 20001247 PARAMETER Experiment Name: At_Far-red-induction_P Parameter: Tissue Value: Whole Plant
  misc_feature: MA Experiment ID: 20001905 Result: Down-regulated in Transcription
  misc_feature: MA Experiment 20001905 PARAMETER Experiment Name: At_Drought_Reproduction_P Parameter: Age (day) Value: 40
  misc_feature: MA Experiment 20001905 PARAMETER Experiment Name: At_Drought_Reproduction_P Parameter: Organism Value: A. thaliana
  misc_feature: MA Experiment 20001905 PARAMETER Experiment Name: At_Drought_Reproduction_P Parameter: Plant Line Value: WS
  misc_feature: MA Experiment 20001905 PARAMETER Experiment Name: At_Drought_Reproduction_P Parameter: Timepoint (day) Value: 10
  misc_feature: MA Experiment 20001905 PARAMETER Experiment Name: At_Drought_Reproduction_P Parameter: Tissue Value: Rosettes
  misc_feature: MA Experiment 20001905 PARAMETER Experiment Name: At_Drought_Reproduction_P Parameter: Treatment Value: Drought vs. No Drought
  misc_feature: MA Experiment ID: 20001911 Result: Down-regulated in Transcription
  misc_feature: MA Experiment 20001911 PARAMETER Experiment Name: At_Drought_Reproduction_P Parameter: Age (day) Value: 40
  misc_feature: MA Experiment 20001911 PARAMETER Experiment Name: At_Drought_Reproduction_P Parameter: Organism Value: A. thaliana
  misc_feature: MA Experiment 20001911 PARAMETER Experiment Name: At_Drought_Reproduction_P Parameter: Plant Line Value: WS
  misc_feature: MA Experiment 20001911 PARAMETER Experiment Name: At_Drought_Reproduction_P Parameter: Timepoint (day) Value: 10
  misc_feature: MA Experiment 20001911 PARAMETER Experiment Name: At_Drought_Reproduction_P Parameter: Tissue Value: Flowers
  misc_feature: MA Experiment 20001911 PARAMETER Experiment Name: At_Drought_Reproduction_P Parameter: Treatment Value: Drought vs. No Drought
atggatgttaaggagcatagaaacaaccctagtccttgccacagaggatcacagctaaccaaatattcccttgcacgtaaaatccgacactggtctatttcgtcgtcttcgacctcgagggaatctactgtagctctcacactatccactcttcatcggcagctagatttccgggtcctcagtatcgggtcagatctagatccggatccggagacgctgagaatgaaacacttcagaactgagcgagtccgtgcgactccgaagctcttcacctacgttctcgtcggtttcatcgctctactcggcttgacttgcctctactacggctcttcgttcgctcccggatccagaaagtccgatgagttcgatggatctaataaccgcgttcgcaccggaatcggatccttgaggaatcgagatattgtgcttgcagtgagccgtttcgaagttcctaaaagtgttccgatatgtgattcgagacactcggagttgataccgtgtttggatcggaaccttcattaccagttgaaattgaaactcaatttatcgttaatggagcactatgagcatcattgtcctccatcagaacggcgtttcaattgccttgttccgcctcctgttggttataagatcccgttaaggtggcctgtgagtagagacgaggtgtggaaggcgaatatcccgcacacacaccttgctcaagagaagtctgatcagaattggatggttgttaatggtgataagatcaattttcctggtggaggaacacatttccacaacggagctgacaaatacattgtttccctggctcagatgctgaaattccctggtgacaaactcaacaatgggggaagcattcggaatgttcttgacgttggttgtggggtagctagcttcggagcctatcttctttcacatgacatcatagccatgtctcttgcccctaatgatgtccaccagaaccagatccagtttgctctagaacgagggattccatcaacacttggtgttcttgggacaaagcggcttccatacccaagcagatcatttgaacttgctcactgctctagatgtcggatagattggcttcaaagagatgggatcttgttactggaacttgataggttgctcagacctggtggctactttgtatactcgtcgcctgaagcttatgcacacgacccagagaacagaaagattgggaatgcaatgcatgatctctttaagagaatgtgttggaaggtcgtggccaaacgagaccaatctgttatatggggaaaaccgatatccaacagctgttacttgaagagggatccgggtgtcctgcctccgctttgtccttctggagatgacccagatgcaacttggaatgtctcaatgaaggcttgcatatcaccttactcagtgaggatgcacaaagaaagatggagtggactcgttccctggccacggaggctgacagctcctccaccacgtcttgaagaaattggtgtcactcctgagcaattccgtgaagatacggaaacatggcggcttagagtgatagaatactggaaactgctgaaaccaatggtgcaaaagaactccataagaaacgtgatggacatgagctcaaaccttggcggtttcgcagctgctctaaacgataaagatgtatgggtaatgaatgtcatgcccgttcaatcctctccaagaatgaagatcatttacgaccgtggccttatcggagccactcatgattggtgtgaagcctttgacacatacccacgaacgtttgatcttatccacgcatggaacaccttcacagaaacccaagcacgtggatgcagctttgaagatctgcttatcgagatggatcggatactacgcccagaaggatttgtcataattcgtgacacaactgacaatattagctatatcaagaagtatctgacattattgaaatgggataaatggtccacagagacaactccaaaaggtgatcctctgtcgaccaaagacgagatagttttgatcgccagaaagaaactttggagcttgcccgccatttcagtgtcctgaaatctaacagtcaacaggcgaatgaatgagatttacagcatcagaggcgcgtagctgaggaaaatactcagcaatggagaagtgtaaattacacgacattcatacatagttgttaacttgttatgcatttgttgtaggaaactgcaaaatcttcttattttgcgattttcatgttcctctttataattaaaatctgcttttgtg

SEQ ID NO: 104432 - protein, 686 aa, Arabidopsis thaliana
  peptide (1)..(686): Ceres Seq. ID no. 13614972
  misc_feature (163)..(675): Pfam Name: Putative methyltransferase Pfam Description: Putative methyltransferase
  misc_feature (151)..(678): Homolog of NCBI NO: 18414198 NR Description: dehydration-induced protein-related [Arabidopsis >gi|16604605|gb|AAL24095.1| putative ankyrin protein [Arabidopsis >gi|20259233|gb|AAM14332.1| putative ankyrin protein [Arabidopsis
  misc_feature (151)..(678): Homolog of NCBI NO: 22331280 NR Description: dehydration-induced protein-related [Arabidopsis
  misc_feature (151)..(678): Homolog of NCBI NO: 7488052 NR Description: probable ankyrin - Arabidopsis thaliana ankyrin like protein [Arabidopsis thaliana]
  misc_feature (94)..(678): Homolog of NCBI NO: 18390392 NR Description: dehydration-induced protein-related [Arabidopsis >gi|15450900|gb|AAK96721.1| Unknown protein [Arabidopsis >gi|17978687|gb|AAL47337.1| unknown protein [Arabidopsis
  misc_feature (94)..(678): Homolog of NCBI NO: 21536697 NR Description: ankyrin-like protein [Arabidopsis thaliana]
  misc_feature (94)..(678): Homolog of NCBI NO: 14423548 NR Description: Unknown protein [Arabidopsis thaliana]
  misc_feature (156)..(471): Homolog of NCBI NO: 25406781 NR Description: hypothetical protein [imported] - Arabidopsis >gi|2341032|gb|AAB70432.1| EST gb|ATTS0956 comes from this gene.
  misc_feature (472)..(678): Homolog of NCBI NO: 25406781 NR Description: hypothetical protein [imported] - Arabidopsis >gi|2341032|gb|AAB70432.1| EST gb|ATTS0956 comes from this gene.
  misc_feature (146)..(666): Homolog of NCBI NO: 34908262 NR Description: ankyrin-like protein [Oryza sativa (japonica
  misc_feature (152)..(677): Homolog of NCBI NO: 18405149 NR Description: dehydration-induced protein family [Arabidopsis
MDVKEHRNNPSPCHRGSQLTKYSLARKIRHWSISSSSTSRESTVALTLSTLHRQLDFRVLSIGSDLDPDPETLRMKHFRTERVRATPKLFTYVLVGFIALLGLTCLYYGSSFAPGSRKSDEFDGSNNRVRTGIGSLRNRDIVLAVSRFEVPKSVPICDSRHSELIPCLDRNLHYQLKLKLNLSLMEHYEHHCPPSERRFNCLVPPPVGYKIPLRWPVSRDEVWKANIPHTHLAQEKSDQNWMVVNGDKINFPGGGTHFHNGADKYIVSLAQMLKFPGDKLNNGGSIRNVLDVGCGVASFGAYLLSHDIIAMSLAPNDVHQNQIQFALERGIPSTLGVLGTKRLPYPSRSFELAHCSRCRIDWLQRDGILLLELDRLLRPGGYFVYSSPEAYAHDPENRKIGNAMHDLFKRMCWKVVAKRDQSVIWGKPISNSCYLKRDPGVLPPLCPSGDDPDATWNVSMKACISPYSVRMHKERWSGLVPWPRRLTAPPPRLEEIGVTPEQFREDTETWRLRVIEYWKLLKPMVQKNSIRNVMDMSSNLGGFAAALNDKDVWVMNVMPVQSSPRMKIIYDRGLIGATHDWCEAFDTYPRTFDLIHAWNTFTETQARGCSFEDLLIEMDRILRPEGFVIIRDTTDNISYIKKYLTLLKWDKWSTETTPKGDPLSTKDEIVLIARKKLWSLPAISVS

SEQ ID NO: 104433 - protein, 612 aa, Arabidopsis thaliana; identical to SEQ ID NO: 40965
  peptide (1)..(612): Ceres Seq. ID no. 13614973
  misc_feature (89)..(601): Pfam Name: Putative methyltransferase Pfam Description: Putative methyltransferase
  misc_feature (77)..(604): Homolog of NCBI NO: 18414198 NR Description: dehydration-induced protein-related [Arabidopsis >gi|16604605|gb|AAL24095.1| putative ankyrin protein [Arabidopsis >gi|20259233|gb|AAM14332.1| putative ankyrin protein [Arabidopsis
  misc_feature (77)..(604): Homolog of NCBI NO: 22331280 NR Description: dehydration-induced protein-related [Arabidopsis
  misc_feature (77)..(604): Homolog of NCBI NO: 7488052 NR Description: probable ankyrin - Arabidopsis thaliana ankyrin like protein [Arabidopsis thaliana]
  misc_feature (20)..(604): Homolog of NCBI NO: 18390392 NR Description: dehydration-induced protein-related [Arabidopsis >gi|15450900|gb|AAK96721.1| Unknown protein [Arabidopsis >gi|17978687|gb|AAL47337.1| unknown protein [Arabidopsis
  misc_feature (20)..(604): Homolog of NCBI NO: 21536697 NR Description: ankyrin-like protein [Arabidopsis thaliana]
  misc_feature (20)..(604): Homolog of NCBI NO: 14423548 NR Description: Unknown protein [Arabidopsis thaliana]
  misc_feature (82)..(397): Homolog of NCBI NO: 25406781 NR Description: hypothetical protein [imported] - Arabidopsis >gi|2341032|gb|AAB70432.1| EST gb|ATTS0956 comes from this gene.
  misc_feature (398)..(604): Homolog of NCBI NO: 25406781 NR Description: hypothetical protein [imported] - Arabidopsis >gi|2341032|gb|AAB70432.1| EST gb|ATTS0956 comes from this gene.
  misc_feature (72)..(592): Homolog of NCBI NO: 34908262 NR Description: ankyrin-like protein [Oryza sativa (japonica
  misc_feature (78)..(603): Homolog of NCBI NO: 18405149 NR Description: dehydration-induced protein family [Arabidopsis

SEQ ID NO: 104434 - protein, 502 aa, Arabidopsis thaliana; identical to SEQ ID NO: 40966
  peptide (1)..(502): Ceres Seq. ID no. 13614974
  misc_feature (1)..(491): Pfam Name: Putative methyltransferase Pfam Description: Putative methyltransferase
  misc_feature (1)..(494): Homolog of NCBI NO: 18414198 NR Description: dehydration-induced protein-related [Arabidopsis >gi|16604605|gb|AAL24095.1| putative ankyrin protein [Arabidopsis >gi|20259233|gb|AAM14332.1| putative ankyrin protein [Arabidopsis
  misc_feature (1)..(494): Homolog of NCBI NO: 22331280 NR Description: dehydration-induced protein-related [Arabidopsis
  misc_feature (1)..(494): Homolog of NCBI NO: 7488052 NR Description: probable ankyrin - Arabidopsis thaliana ankyrin like protein [Arabidopsis thaliana]
  misc_feature (1)..(494): Homolog of NCBI NO: 18390392 NR Description: dehydration-induced protein-related [Arabidopsis >gi|15450900|gb|AAK96721.1| Unknown protein [Arabidopsis >gi|17978687|gb|AAL47337.1| unknown protein [Arabidopsis
  misc_feature (1)..(494): Homolog of NCBI NO: 21536697 NR Description: ankyrin-like protein [Arabidopsis thaliana]
  misc_feature (1)..(494): Homolog of NCBI NO: 14423548 NR Description: Unknown protein [Arabidopsis thaliana]
  misc_feature (1)..(287): Homolog of NCBI NO: 25406781 NR Description: hypothetical protein [imported] - Arabidopsis >gi|2341032|gb|AAB70432.1| EST gb|ATTS0956 comes from this gene.
  misc_feature (288)..(494): Homolog of NCBI NO: 25406781 NR Description: hypothetical protein [imported] - Arabidopsis >gi|2341032|gb|AAB70432.1| EST gb|ATTS0956 comes from this gene.
  misc_feature (1)..(482): Homolog of NCBI NO: 34908262 NR Description: ankyrin-like protein [Oryza sativa (japonica
  misc_feature (1)..(493): Homolog of NCBI NO: 18405149 NR Description: dehydration-induced protein family [Arabidopsis

SEQ ID NO: 104435 - DNA, 1326 bp, Arabidopsis thaliana
  misc_feature (1)..(1326): Ceres Seq. ID no. 13614975
  misc_feature: MA Experiment ID: 108462 Result: Up-regulated in Transcription
  misc_feature: MA Experiment 108462 PARAMETER Experiment Name: At_Germinating_Seeds_cDNA_P Parameter: Age (day) Value: 2 vs. 0
  misc_feature: MA Experiment 108462 PARAMETER Experiment Name: At_Germinating_Seeds_cDNA_P Parameter: Tissue Value: Germinating Seeds
  misc_feature: MA Experiment ID: 108463 Result: Up-regulated in Transcription
  misc_feature: MA Experiment 108463 PARAMETER Experiment Name: At_Germinating_Seeds_cDNA_P Parameter: Age (day) Value: 3 vs. 0
  misc_feature: MA Experiment 108463 PARAMETER Experiment Name: At_Germinating_Seeds_cDNA_P Parameter: Tissue Value: Germinating Seeds
  misc_feature: MA Experiment ID: 108464 Result: Up-regulated in Transcription
  misc_feature: MA Experiment 108464 PARAMETER Experiment Name: At_Germinating_Seeds_cDNA_P Parameter: Age (day) Value: 4 vs. 0
  misc_feature: MA Experiment 108464 PARAMETER Experiment Name: At_Germinating_Seeds_cDNA_P Parameter: Tissue Value: Germinating Seeds
  misc_feature: MA Experiment ID: 20001451 Result: Up-regulated in Transcription
  misc_feature: MA Experiment 20001451 PARAMETER Experiment Name: At_Far-red-induction_P Parameter: Age (day) Value: 7
  misc_feature: MA Experiment 20001451 PARAMETER Experiment Name: At_Far-red-induction_P Parameter: Light Value: Far-red vs. White
  misc_feature: MA Experiment 20001451 PARAMETER Experiment Name: At_Far-red-induction_P Parameter: Organism Value: A. thaliana
  misc_feature: MA Experiment 20001451 PARAMETER Experiment Name: At_Far-red-induction_P Parameter: Plant Line Value: Columbia
  misc_feature: MA Experiment 20001451 PARAMETER Experiment Name: At_Far-red-induction_P Parameter: Timepoint (hr) Value: 24
  misc_feature: MA Experiment 20001451 PARAMETER Experiment Name: At_Far-red-induction_P Parameter: Tissue Value: Whole Plant
  misc_feature: MA Experiment ID: 20001558 Result: Down-regulated in Transcription
  misc_feature: MA Experiment 20001558 PARAMETER Experiment Name: At_Drought_Soil_Dry_P Parameter: Age (day) Value: 27
  misc_feature: MA Experiment 20001558 PARAMETER Experiment Name: At_Drought_Soil_Dry_P Parameter: Organism Value: A. thaliana
  misc_feature: MA Experiment 20001558 PARAMETER Experiment Name: At_Drought_Soil_Dry_P Parameter: Plant Line Value: WS
  misc_feature: MA Experiment 20001558 PARAMETER Experiment Name: At_Drought_Soil_Dry_P Parameter: Post Timepoint (hr) Value: 6
  misc_feature: MA Experiment 20001558 PARAMETER Experiment Name: At_Drought_Soil_Dry_P Parameter: Post-Treatment Value: Re-Water vs. No Drought
  misc_feature: MA Experiment 20001558 PARAMETER Experiment Name: At_Drought_Soil_Dry_P Parameter: Timepoint (day) Value: 13
  misc_feature: MA Experiment 20001558 PARAMETER Experiment Name: At_Drought_Soil_Dry_P Parameter: Treatment Value: Drought vs. No Drought
atcaagctccggactcaaaacccaaatctctgagaaagaatcaaagccaatattcgatcaatcaagctggagtggaagaaagggaaagtgaacccattcgtgaggggaataagatcgaggttaattaggcccaaatcgatgcctttaaatgtagtcaatgatcgtgatggctcttctcgcattcttttgaccgaccctgccggatcaactgctgaggtgcttttgtatggagggcaagtggtttcttggaaaaacgaaaggagagagaagttgctttatatgagcaccaaggcgcaattgaagccaccaaaggcgatcaggggagggttacctatcagctttccacagtttggaaattttggtgcacttgagcgacatggatttgcccgtaacagattctggtcacttgataatgatccttcacctctgcctccggctaaccagcaatcaactgttgatttagtattgaagtctactgaagatgatttgaagatatggcctcatagctttgaacttcgtgttcgcatatctatcagtcctggaaaacttacaataatcccgcgtgtgaggaacactgacacaaaggcattttcctttatgttttcacttcgtaactacttatatgtatccgatataagtgaagttcgggttgagggtctggagacgcttgattatctggacaacttgatgcgtagagaaagattcacggagcaggcagatgcaattacctttgacggcgaggttgataaagtgtacttgaacacgccgacaaagattgccatcatagatcatgagaggaaaagaactatcgagttgcgaaaggaaggcatgccaaatgcagctgtgtggaacccttgggacaagaaggccaagagtattgcagatatgggagatgaggattacacaacaatgctgtgtgtagattctggtgctatagaaagcccaattgtgttgaagccacatgaagagtggaaaggaagacaagaactctctatcgtctcctcaagctactgcagcggtcagctcgatccacgtaaggttctttatggggattactgataatatatatgaaatcaaacttggaaacatcatcagtcttatattttgatcgtcttcatggataaagcgattgatgcccaaacaaatctgatatgatatgattttgtttggagctattgccctttgtgagtttctgacaggcacacagaaagataggcaaatgtagtattttgtaacgttgccttctgtgtggcggtcagggacttattaatatgtattatggttcacccggaaacatgagtcttatattgaatcgtcttcttcatg

SEQ ID NO: 104436 - protein, 306 aa, Arabidopsis thaliana
  peptide (1)..(306): Ceres Seq. ID no. 13614976
  misc_feature (13)..(285): Pfam Name: Aldose 1-epimerase Pfam Description: Aldose 1-epimerase
  misc_feature (1)..(306): Homolog of NCBI NO: 11281678 NR Description: hypothetical protein F18O22.290 - Arabidopsis >gi|7573475|emb|CAB87789.1| putative protein [Arabidopsis
  misc_feature (1)..(306): Homolog of NCBI NO: 18417396 NR Description: aldose 1-epimerase family [Arabidopsis thaliana]
  misc_feature (1)..(306): Homolog of NCBI NO: 28393808 NR Description: unknown protein [Arabidopsis thaliana]
  misc_feature (1)..(305): Homolog of NCBI NO: 18395868 NR Description: aldose 1-epimerase family [Arabidopsis thaliana]
  misc_feature (1)..(305): Homolog of NCBI NO: 16612258 NR Description: AT3g01590/F4P13_13 [Arabidopsis thaliana]
  misc_feature (10)..(302): Homolog of NCBI NO: 15242099 NR Description: aldose 1-epimerase family [Arabidopsis thaliana]
  misc_feature (1)..(304): Homolog of NCBI NO: 38344152 NR Description: OSJNBa0041A02.19 [Oryza sativa (japonica
  misc_feature (5)..(304): Homolog of NCBI NO: 2501555 NR Description: POSSIBLE APOSPORY-ASSOCIATED PROTEIN C
  misc_feature (1)..(304): Homolog of NCBI NO: 40253263 NR Description: putative Aldose 1-epimerase [Oryza sativa
  misc_feature (10)..(302): Homolog of NCBI NO: 19387263 NR Description: putative apospory-associated protein C [Oryza
MPLNVVNDRDGSSRILLTDPAGSTAEVLLYGGQVVSWKNERREKLLYMSTKAQLKPPKAIRGGLPISFPQFGNFGALERHGFARNRFWSLDNDPSPLPPANQQSTVDLVLKSTEDDLKIWPHSFELRVRISISPGKLTIIPRVRNTDTKAFSFMFSLRNYLYVSDISEVRVEGLETLDYLDNLMRRERFTEQADAITFDGEVDKVYLNTPTKIAIIDHERKRTIELRKEGMPNAAVWNPWDKKAKSIADMGDEDYTTMLCVDSGAIESPIVLKPHEEWKGRQELSIVSSSYCSGQLDPRKVLYGDY

SEQ ID NO: 104437 - protein, 259 aa, Arabidopsis thaliana
  peptide (1)..(259): Ceres Seq. ID no. 13614977
  misc_feature (1)..(238): Pfam Name: Aldose 1-epimerase Pfam Description: Aldose 1-epimerase
  misc_feature (1)..(259): Homolog of NCBI NO: 11281678 NR Description: hypothetical protein F18O22.290 - Arabidopsis >gi|7573475|emb|CAB87789.1| putative protein [Arabidopsis
  misc_feature (1)..(259): Homolog of NCBI NO: 18417396 NR Description: aldose 1-epimerase family [Arabidopsis thaliana]
  misc_feature (1)..(259): Homolog of NCBI NO: 28393808 NR Description: unknown protein [Arabidopsis thaliana]
  misc_feature (1)..(258): Homolog of NCBI NO: 18395868 NR Description: aldose 1-epimerase family [Arabidopsis thaliana]
  misc_feature (1)..(258): Homolog of NCBI NO: 16612258 NR Description: AT3g01590/F4P13_13 [Arabidopsis thaliana]
  misc_feature (1)..(255): Homolog of NCBI NO: 15242099 NR Description: aldose 1-epimerase family [Arabidopsis thaliana]
  misc_feature (1)..(257): Homolog of NCBI NO: 38344152 NR Description: OSJNBa0041A02.19 [Oryza sativa (japonica
  misc_feature (1)..(257): Homolog of NCBI NO: 2501555 NR Description: POSSIBLE APOSPORY-ASSOCIATED PROTEIN C
  misc_feature (1)..(257): Homolog of NCBI NO: 40253263 NR Description: putative Aldose 1-epimerase [Oryza sativa
  misc_feature (1)..(255): Homolog of NCBI NO: 19387263 NR Description: putative apospory-associated protein C [Oryza
MSTKAQLKPPKAIRGGLPISFPQFGNFGALERHGFARNRFWSLDNDPSPLPPANQQSTVDLVLKSTEDDLKIWPHSFELRVRISISPGKLTIIPRVRNTDTKAFSFMFSLRNYLYVSDISEVRVEGLETLDYLDNLMRRERFTEQADAITFDGEVDKVYLNTPTKIAIIDHERKRTIELRKEGMPNAAVWNPWDKKAKSIADMGDEDYTTMLCVDSGAIESPIVLKPHEEWKGRQELSIVSSSYCSGQLDPRKVLYGDY

SEQ ID NO: 104438 - protein, 153 aa, Arabidopsis thaliana
  peptide (1)..(153): Ceres Seq. ID no. 13614978
  misc_feature (1)..(132): Pfam Name: Aldose 1-epimerase Pfam Description: Aldose 1-epimerase
  misc_feature (1)..(153): Homolog of NCBI NO: 11281678 NR Description: hypothetical protein F18O22.290 - Arabidopsis >gi|7573475|emb|CAB87789.1| putative protein [Arabidopsis
  misc_feature (1)..(153): Homolog of NCBI NO: 18417396 NR Description: aldose 1-epimerase family [Arabidopsis thaliana]
  misc_feature (1)..(153): Homolog of NCBI NO: 28393808 NR Description: unknown protein [Arabidopsis thaliana]
  misc_feature (1)..(152): Homolog of NCBI NO: 18395868 NR Description: aldose 1-epimerase family [Arabidopsis thaliana]
  misc_feature (1)..(152): Homolog of NCBI NO: 16612258 NR Description: AT3g01590/F4P13_13 [Arabidopsis thaliana]
  misc_feature (1)..(149): Homolog of NCBI NO: 15242099 NR Description: aldose 1-epimerase family [Arabidopsis thaliana]
  misc_feature (1)..(151): Homolog of NCBI NO: 38344152 NR Description: OSJNBa0041A02.19 [Oryza sativa (japonica
  misc_feature (1)..(151): Homolog of NCBI NO: 2501555 NR Description: POSSIBLE APOSPORY-ASSOCIATED PROTEIN C
  misc_feature (1)..(151): Homolog of NCBI NO: 40253263 NR Description: putative Aldose 1-epimerase [Oryza sativa
  misc_feature (1)..(149): Homolog of NCBI NO: 19387263 NR Description: putative apospory-associated protein C [Oryza
MFSLRNYLYVSDISEVRVEGLETLDYLDNLMRRERFTEQADAITFDGEVDKVYLNTPTKIAIIDHERKRTIELRKEGMPNAAVWNPWDKKAKSIADMGDEDYTTMLCVDSGAIESPIVLKPHEEWKGRQELSIVSSSYCSGQLDPRKVLYGDY

SEQ ID NO: 104439 - DNA, 1162 bp, Arabidopsis thaliana
  misc_feature (1)..(1162): Ceres Seq. ID no. 13614979
  misc_feature: MA Experiment ID: 108463 Result: Down-regulated in Transcription
  misc_feature: MA Experiment 108463 PARAMETER Experiment Name: At_Germinating_Seeds_cDNA_P Parameter: Age (day) Value: 3 vs. 0
  misc_feature: MA Experiment 108463 PARAMETER Experiment Name: At_Germinating_Seeds_cDNA_P Parameter: Tissue Value: Germinating Seeds
ccagcttgacgatgtcgttgacggagctagacgacggactggttcgcaggatggccatgggcgcagtcttctctgattttggagggaagatacattcggtgggtttccataggactgatgatctattggtcacatccagcgaagatgattcacttcgcctcttcgatatcgccaacgctaaacagctgaagattacataccataagaaacatggcaccgatcgtgtatgctttacccatcatcctagctctctaatttgctcttctcgatacaatttggagtccactggtgaatccttgagatatctctcaatgtatgataatcggatcctacgctactttaaagggcataaagacagggttgtatcactttgtatgtctcctataaatgatagcttcatgtctggttctctcgaccgaagtgttagactctgggatcttcgtgtaaatgcctgccagggaattctacatctacgtggtagacctgcagttgcgtatgaccaacaaggccttgtgtttgcaattgcaatggaaggaggtgctgttaaattatttgattccaggtgttatgacaagggtccctttgacacatttctggtgggtggggatactgctgaggttaacgatataaaattcagcaacgatgggaaatccatgctcctaacgactacaaataacaatatctacgttcttgatgcatatcgtggagagaagaaatgtggttttagtttggagccttcacagggtacacccatagaggccaccttcacaccagatggcaagtatgttctgtcaggttcaggtgatggaaccttacatgcgtggaacatcgagaacccatctgaggtggcgaggtgggagaacaacataggagtagtgtcgtgtctgaaatgggcaccacgtagagccatgttcgttgctgcttctacggttctcacattctggatcccaaacgacggtgaatcaccagcccccgccgatcctcctaccgatcaacaacagtgacgacatatatgtttccattatgcacttgtgtatcgttttttaatgttgacaattagaaaaatttggaagcagtagtatgttaatcaaatttagagtttatgaatttgagtctagatggttacaatatgttttctttaatgactatttactcttatttt

SEQ ID NO: 104440 - protein, 333 aa, Arabidopsis thaliana
  peptide (1)..(333): Ceres Seq. ID no. 13614980
  misc_feature (4)..(333): Homolog of NCBI NO: 15241434 NR Description: transducin / WD-40 repeat protein family
  misc_feature (8)..(325): Homolog of NCBI NO: 18425050 NR Description: transducin / WD-40 repeat protein family
  misc_feature (8)..(325): Homolog of NCBI NO: 30698206 NR Description: transducin / WD-40 repeat protein family
  misc_feature (8)..(325): Homolog of NCBI NO: 21536827 NR Description: WD repeat protein-like [Arabidopsis thaliana]
  misc_feature (8)..(317): Homolog of NCBI NO: 28564824 NR Description: OSJNBb0005G07.13 [Oryza sativa (japonica
  misc_feature (8)..(316): Homolog of NCBI NO: 28277563 NR Description: Similar to RIKEN cDNA 9430077D24 gene [Danio
  misc_feature (8)..(320): Homolog of NCBI NO: 19920938 NR Description: CG17293-PA [Drosophila melanogaster]
  misc_feature (14)..(316): Homolog of NCBI NO: 21618713 NR Description: RIKEN cDNA 9430077D24 gene [Mus musculus]
  misc_feature (8)..(320): Homolog of NCBI NO: 31232763 NR Description: ENSANGP00000013183 [Anopheles gambiae]
  misc_feature (35)..(316): Homolog of NCBI NO: 34877546 NR Description: similar to CG17293-PA [Rattus norvegicus]
SLTMSLTELDDGLVRRMAMGAVFSDFGGKIHSVGFHRTDDLLVTSSEDDSLRLFDIANAKQLKITYHKKHGTDRVCFTHHPSSLICSSRYNLESTGESLRYLSMYDNRILRYFKGHKDRVVSLCMSPINDSFMSGSLDRSVRLWDLRVNACQGILHLRGRPAVAYDQQGLVFAIAMEGGAVKLFDSRCYDKGPFDTFLVGGDTAEVNDIKFSNDGKSMLLTTTNNNIYVLDAYRGEKKCGFSLEPSQGTPIEATFTPDGKYVLSGSGDGTLHAWNIENPSEVARWENNIGVVSCLKWAPRRAMFVAASTVLTFWIPNDGESPAPADPPTDQQQ

SEQ ID NO: 104441 - protein, 330 aa, Arabidopsis thaliana
  peptide (1)..(330): Ceres Seq. ID no. 13614981
  misc_feature (1)..(330): Homolog of NCBI NO: 15241434 NR Description: transducin / WD-40 repeat protein family
  misc_feature (5)..(322): Homolog of NCBI NO: 18425050 NR Description: transducin / WD-40 repeat protein family
  misc_feature (5)..(322): Homolog of NCBI NO: 30698206 NR Description: transducin / WD-40 repeat protein family
  misc_feature (5)..(322): Homolog of NCBI NO: 21536827 NR Description: WD repeat protein-like [Arabidopsis thaliana]
  misc_feature (5)..(314): Homolog of NCBI NO: 28564824 NR Description: OSJNBb0005G07.13 [Oryza sativa (japonica
  misc_feature (5)..(313): Homolog of NCBI NO: 28277563 NR Description: Similar to RIKEN cDNA 9430077D24 gene [Danio
  misc_feature (5)..(317): Homolog of NCBI NO: 19920938 NR Description: CG17293-PA [Drosophila melanogaster]
  misc_feature (11)..(313): Homolog of NCBI NO: 21618713 NR Description: RIKEN cDNA 9430077D24 gene [Mus musculus]
  misc_feature (5)..(317): Homolog of NCBI NO: 31232763 NR Description: ENSANGP00000013183 [Anopheles gambiae]
  misc_feature (32)..(313): Homolog of NCBI NO: 34877546 NR Description: similar to CG17293-PA [Rattus norvegicus]
MSLTELDDGLVRRMAMGAVFSDFGGKIHSVGFHRTDDLLVTSSEDDSLRLFDIANAKQLKITYHKKHGTDRVCFTHHPSSLICSSRYNLESTGESLRYLSMYDNRILRYFKGHKDRVVSLCMSPINDSFMSGSLDRSVRLWDLRVNACQGILHLRGRPAVAYDQQGLVFAIAMEGGAVKLFDSRCYDKGPFDTFLVGGDTAEVNDIKFSNDGKSMLLTTTNNNIYVLDAYRGEKKCGFSLEPSQGTPIEATFTPDGKYVLSGSGDGTLHAWNIENPSEVARWENNIGVVSCLKWAPRRAMFVAASTVLTFWIPNDGESPAPADPPTDQQQ

SEQ ID NO: 104442 - protein, 317 aa, Arabidopsis thaliana
  peptide (1)..(317): Ceres Seq. ID no. 13614982
  misc_feature (1)..(317): Homolog of NCBI NO: 15241434 NR Description: transducin / WD-40 repeat protein family
  misc_feature (1)..(309): Homolog of NCBI NO: 18425050 NR Description: transducin / WD-40 repeat protein family
  misc_feature (1)..(309): Homolog of NCBI NO: 30698206 NR Description: transducin / WD-40 repeat protein family
  misc_feature (1)..(309): Homolog of NCBI NO: 21536827 NR Description: WD repeat protein-like [Arabidopsis thaliana]
  misc_feature (1)..(301): Homolog of NCBI NO: 28564824 NR Description: OSJNBb0005G07.13 [Oryza sativa (japonica
  misc_feature (1)..(300): Homolog of NCBI NO: 28277563 NR Description: Similar to RIKEN cDNA 9430077D24 gene [Danio
  misc_feature (1)..(304): Homolog of NCBI NO: 19920938 NR Description: CG17293-PA [Drosophila melanogaster]
  misc_feature (1)..(300): Homolog of NCBI NO: 21618713 NR Description: RIKEN cDNA 9430077D24 gene [Mus musculus]
  misc_feature (1)..(304): Homolog of NCBI NO: 31232763 NR Description: ENSANGP00000013183 [Anopheles gambiae]
  misc_feature (19)..(300): Homolog of NCBI NO: 34877546 NR Description: similar to CG17293-PA [Rattus norvegicus]
MAMGAVFSDFGGKIHSVGFHRTDDLLVTSSEDDSLRLFDIANAKQLKITYHKKHGTDRVCFTHHPSSLICSSRYNLESTGESLRYLSMYDNRILRYFKGHKDRVVSLCMSPINDSFMSGSLDRSVRLWDLRVNACQGILHLRGRPAVAYDQQGLVFAIAMEGGAVKLFDSRCYDKGPFDTFLVGGDTAEVNDIKFSNDGKSMLLTTTNNNIYVLDAYRGEKKCGFSLEPSQGTPIEATFTPDGKYVLSGSGDGTLHAWNIENPSEVARWENNIGVVSCLKWAPRRAMFVAASTVLTFWIPNDGESPAPADPPTDQQQ

SEQ ID NO: 104443 - DNA, 1838 bp, Arabidopsis thaliana
  misc_feature (1)..(1838): Ceres Seq. ID no. 13614987
  misc_feature: MA Experiment ID: 108576 Result: Up-regulated in Transcription
  misc_feature: MA Experiment 108576 PARAMETER Experiment Name: At_42deg_Heat_cDNA_P Parameter: Temperature (deg C) Value: 42 vs. 22
  misc_feature: MA Experiment 108576 PARAMETER Experiment Name: At_42deg_Heat_cDNA_P Parameter: Timepoint (hr) Value: 1
  misc_feature: MA Experiment 108576 PARAMETER Experiment Name: At_42deg_Heat_cDNA_P Parameter: Tissue Value: Aerial
  misc_feature: MA Experiment ID: 108577 Result: Up-regulated in Transcription
  misc_feature: MA Experiment 108577 PARAMETER Experiment Name: At_42deg_Heat_cDNA_P Parameter: Temperature (deg C) Value: 42 vs. 22
  misc_feature: MA Experiment 108577 PARAMETER Experiment Name: At_42deg_Heat_cDNA_P Parameter: Timepoint (hr) Value: 6
  misc_feature: MA Experiment 108577 PARAMETER Experiment Name: At_42deg_Heat_cDNA_P Parameter: Tissue Value: Aerial
  misc_feature: MA Experiment ID: 20000072 Result: Down-regulated in Transcription
  misc_feature: MA Experiment 20000072 PARAMETER Experiment Name: At_100uM_ABA_Mutants_cDNA_P Parameter: Plant Line Value: CS8105
  misc_feature: MA Experiment 20000072 PARAMETER Experiment Name: At_100uM_ABA_Mutants_cDNA_P Parameter: Timepoint (hr) Value: 6
  misc_feature: MA Experiment 20000072 PARAMETER Experiment Name: At_100uM_ABA_Mutants_cDNA_P Parameter: Tissue Value: Aerial
  misc_feature: MA Experiment 20000072 PARAMETER Experiment Name: At_100uM_ABA_Mutants_cDNA_P Parameter: Treatment Value: 100uM ABA vs. No Treatment
  misc_feature: MA Experiment ID: 20000090 Result: Down-regulated in Transcription
  misc_feature: MA Experiment ID: 20000093 Result: Up-regulated in Transcription
  misc_feature: MA Experiment 20000093 PARAMETER Experiment Name: At_42deg_Heat_cDNA_P Parameter: Temperature (deg C) Value: 42 vs. 22
  misc_feature: MA Experiment 20000093 PARAMETER Experiment Name: At_42deg_Heat_cDNA_P Parameter: Timepoint (hr) Value: 0.5
  misc_feature: MA Experiment 20000093 PARAMETER Experiment Name: At_42deg_Heat_cDNA_P Parameter: Tissue Value: Aerial
  misc_feature: MA Experiment ID: 20000111 Result: Up-regulated in Transcription
  misc_feature: MA Experiment 20000111 PARAMETER Experiment Name: At_42deg_Heat_cDNA_P Parameter: Temperature (deg C) Value: 42 vs. 22
  misc_feature: MA Experiment 20000111 PARAMETER Experiment Name: At_42deg_Heat_cDNA_P Parameter: Timepoint (hr) Value: 6
  misc_feature: MA Experiment 20000111 PARAMETER Experiment Name: At_42deg_Heat_cDNA_P Parameter: Tissue Value: Aerial
  misc_feature: MA Experiment ID: 20000112 Result: Up-regulated in Transcription
  misc_feature: MA Experiment 20000112 PARAMETER Experiment Name: At_42deg_Heat_cDNA_P Parameter: Temperature (deg C) Value: 42 vs. 22
  misc_feature: MA Experiment 20000112 PARAMETER Experiment Name: At_42deg_Heat_cDNA_P Parameter: Timepoint (hr) Value: 2
  misc_feature: MA Experiment 20000112 PARAMETER Experiment Name: At_42deg_Heat_cDNA_P Parameter: Tissue Value: Aerial
  misc_feature: MA Experiment ID: 20000171 Result: Up-regulated in Transcription
  misc_feature: MA Experiment 20000171 PARAMETER Experiment Name: At_42deg_Heat_P Parameter: Age (day) Value: 14
  misc_feature: MA Experiment 20000171 PARAMETER Experiment Name: At_42deg_Heat_P Parameter: Organism Value: A. thaliana
  misc_feature: MA Experiment 20000171 PARAMETER Experiment Name: At_42deg_Heat_P Parameter: Plant Line Value: WS
  misc_feature: MA Experiment 20000171 PARAMETER Experiment Name: At_42deg_Heat_P Parameter: Temperature (deg C) Value: 42 vs. 22
  misc_feature: MA Experiment 20000171 PARAMETER Experiment Name: At_42deg_Heat_P Parameter: Timepoint (hr) Value: 1
  misc_feature: MA Experiment 20000171 PARAMETER Experiment Name: At_42deg_Heat_P Parameter: Tissue Value: Aerial
  misc_feature: MA Experiment ID: 20000438 Result: Down-regulated in Transcription
  misc_feature: MA Experiment 20000438 PARAMETER Experiment Name: At_Shoots__P Parameter: Age (day) Value: 14
  misc_feature: MA Experiment 20000438 PARAMETER Experiment Name: At_Shoots__P Parameter: Tissue Value: Shoots vs. Whole Plant
  misc_feature: MA Experiment ID: 20001248 Result: Up-regulated in Transcription
  misc_feature: MA Experiment 20001248 PARAMETER Experiment Name: At_Far-red-induction_P Parameter: Age (day) Value: 7
  misc_feature: MA Experiment 20001248 PARAMETER Experiment Name: At_Far-red-induction_P Parameter: Light Value: Far-red vs. White
  misc_feature: MA Experiment 20001248 PARAMETER Experiment Name: At_Far-red-induction_P Parameter: Organism Value: A. thaliana
  misc_feature: MA Experiment 20001248 PARAMETER Experiment Name: At_Far-red-induction_P Parameter: Plant Line Value: Columbia
  misc_feature: MA Experiment 20001248 PARAMETER Experiment Name: At_Far-red-induction_P Parameter: Timepoint (hr) Value: 4
  misc_feature: MA Experiment 20001248 PARAMETER Experiment Name: At_Far-red-induction_P Parameter: Tissue Value: Whole Plant
accagctctactcattgattttacacactcaccagcacctctatttctttctcactctccaagtctcctctgtgaaagctgaaagctcatcttcttccacgtgatttgtcttcccgatcaccaaacctttccggtaattactctcccttgcgttcgacgccatcttccttggagttctcttcaatcaaccggtaaatcttccactgattttgaagaagattcttccatgttcgatctggttcgtctccagagatcgagagttgaattgcctcgaaacagctctagtttcaccagagacgcgcgaccgatagaaataaagagactcgaagctgcgtgtaccggagacgaatggcgggaaaattgacttgagcgcgattttctgtgtggatccaaaatgaagaagaaggtgtctcagcagaagttactgtacagatggaagaggaaggtatacgccacgttgatgttcgctttctgctttgggactttcgtatttatacaagctcgtttcgcatctatacaagctcgtttcaatcgaatctctgcgtctctcgattcgcttaaaaagcctcgtctagatcagagaccacagattgccttcctcttcattgcccggaatcgactccctctcgagtttgtctgggatgctttctttaagggtgaggatggaaagttctcaatatatgttcattctagacctggatttgttctcaacgaggctacaacgcgatccaagtactttttggatcggcaacttaatgacagtatacaggtagattggggtgaatcaaccatgattgaagcagaacgtgtattgcttagacatgcacttagagattcatttaatcaccgctttgtttttctttctgatagctgcatacctctgtacagtttcagctacacgtataactacatcatgtcaacaccaactagtttcgttgatagctttgcagatacaaaagatagccgttataatcctagaatgaatcccattattcctgttcgtaactggagaaaaggatcacagtgggtcgttctgaatagaaaacacgcagaaattgtggtgaatgatacctctgtctttcctatgtttcagcagcattgcaggagaaaatcacttccagagttttggcgagatcgtcctgtaccagctgaaggttggaaggaacacaactgtatacctgatgagcactatgttcagacattgctatctcaaaagggtgtagatagcgaactcacacgaagatcactgacacactcagcttgggacctttcatcctcgaaaagtaatgaacgtcgtggatggcatcctatgacttacaagttttctgatgctactcctgatcttatacagtccattaagggaatcgacaatatcaactacgagactgaataccggcgagaatggtgtagcagtaaagggaaaccatcaccgtgcttcctcttcgccaggaagttcactcgtcccgccgctctccgcctactccgtgaaactatcttgttagagggcaaagagcatgacaataagtagatccttcaccatttaaagcatatattacacataggtacgtaagataaccaagagttactatgtttgtacaattgtactactgtgatttcatctgtaatacttacgatgacgaatttacatagaaacttacaccatttggtaaatgagtaaaagccagccttgataaaagatggacggtagagaaagagctcagcaggggtgacctgagaacacatgaaaacgagagctgtaacaatgacgtagcgtcattacagccgttgattactcgtgtgttctcatatcaaccctgtcgagatccactaccttcatg

SEQ ID NO: 104444 - protein, 377 aa, Arabidopsis thaliana
  peptide (1)..(377): Ceres Seq. ID no. 13614988
  misc_feature (103)..(212): Pfam Name: Arabidopsis protein of unknown function, DUF266 Pfam Description: Arabidopsis protein of unknown function, DUF266
  misc_feature (1)..(377): Homolog of NCBI NO: 15241437 NR Description: expressed protein [Arabidopsis thaliana]
  misc_feature (1)..(322): Homolog of NCBI NO: 30684956 NR Description: expressed protein [Arabidopsis thaliana]
  misc_feature (17)..(368): Homolog of NCBI NO: 30682534 NR Description: expressed protein [Arabidopsis thaliana] unknown protein [Arabidopsis thaliana]
  misc_feature (17)..(238): Homolog of NCBI NO: 25402693 NR Description: hypothetical protein [imported] - Arabidopsis >gi|3157941|gb|AAC17624.1| Contains similarity to hypothetical
  misc_feature (270)..(368): Homolog of NCBI NO: 25402693 NR Description: hypothetical protein [imported] - Arabidopsis >gi|3157941|gb|AAC17624.1| Contains similarity to hypothetical
  misc_feature (65)..(322): Homolog of NCBI NO: 34911442 NR Description: P0431H09.21 [Oryza sativa (japonica
  misc_feature (58)..(364): Homolog of NCBI NO: 17065016 NR Description: Unknown protein [Arabidopsis thaliana]
  misc_feature (58)..(364): Homolog of NCBI NO: 22327910 NR Description: expressed protein [Arabidopsis thaliana] Unknown protein [Arabidopsis thaliana]
  misc_feature (58)..(363): Homolog of NCBI NO: 38346557 NR Description: OSJNBa0035M09.18 [Oryza sativa (japonica
  misc_feature (31)..(363): Homolog of NCBI NO: 26452247 NR Description: unknown protein [Arabidopsis thaliana] Unknown protein [Arabidopsis thaliana]
MKKKVSQQKLLYRWKRKVYATLMFAFCFGTFVFIQARFASIQARFNRISASLDSLKKPRLDQRPQIAFLFIARNRLPLEFVWDAFFKGEDGKFSIYVHSRPGFVLNEATTRSKYFLDRQLNDSIQVDWGESTMIEAERVLLRHALRDSFNHRFVFLSDSCIPLYSFSYTYNYIMSTPTSFVDSFADTKDSRYNPRMNPIIPVRNWRKGSQWVVLNRKHAEIVVNDTSVFPMFQQHCRRKSLPEFWRDRPVPAEGWKEHNCIPDEHYVQTLLSQKGVDSELTRRSLTHSAWDLSSSKSNERRGWHPMTYKFSDATPDLIQSIKGIDNINYETEYRREWCSSKGKPSPCFLFARKFTRPAALRLLRETILLEGKEHDNK

SEQ ID NO: 104445 - protein, 355 aa, Arabidopsis thaliana
  peptide (1)..(355): Ceres Seq. ID no. 13614989
  misc_feature (81)..(190): Pfam Name: Arabidopsis protein of unknown function, DUF266 Pfam Description: Arabidopsis protein of unknown function, DUF266
  misc_feature (1)..(355): Homolog of NCBI NO: 15241437 NR Description: expressed protein [Arabidopsis thaliana]
  misc_feature (1)..(300): Homolog of NCBI NO: 30684956 NR Description: expressed protein [Arabidopsis thaliana]
  misc_feature (1)..(346): Homolog of NCBI NO: 30682534 NR Description: expressed protein [Arabidopsis thaliana] unknown protein [Arabidopsis thaliana]
  misc_feature (1)..(216): Homolog of NCBI NO: 25402693 NR Description: hypothetical protein [imported] - Arabidopsis >gi|3157941|gb|AAC17624.1| Contains similarity to hypothetical
  misc_feature (248)..(346): Homolog of NCBI NO: 25402693 NR Description: hypothetical protein [imported] - Arabidopsis >gi|3157941|gb|AAC17624.1| Contains similarity to hypothetical
  misc_feature (43)..(300): Homolog of NCBI NO: 34911442 NR Description: P0431H09.21 [Oryza sativa (japonica
  misc_feature (36)..(342): Homolog of NCBI NO: 17065016 NR Description: Unknown protein [Arabidopsis thaliana]
  misc_feature (36)..(342): Homolog of NCBI NO: 22327910 NR Description: expressed protein [Arabidopsis thaliana] Unknown protein [Arabidopsis thaliana]
  misc_feature (36)..(341): Homolog of NCBI NO: 38346557 NR Description: OSJNBa0035M09.18 [Oryza sativa (japonica
  misc_feature (9)..(341): Homolog of NCBI NO: 26452247 NR Description: unknown protein [Arabidopsis thaliana] Unknown protein [Arabidopsis thaliana]
MFAFCFGTFVFIQARFASIQARFNRISASLDSLKKPRLDQRPQIAFLFIARNRLPLEFVWDAFFKGEDGKFSIYVHSRPGFVLNEATTRSKYFLDRQLNDSIQVDWGESTMIEAERVLLRHALRDSFNHRFVFLSDSCIPLYSFSYTYNYIMSTPTSFVDSFADTKDSRYNPRMNPIIPVRNWRKGSQWVVLNRKHAEIVVNDTSVFPMFQQHCRRKSLPEFWRDRPVPAEGWKEHNCIPDEHYVQTLLSQKGVDSELTRRSLTHSAWDLSSSKSNERRGWHPMTYKFSDATPDLIQSIKGIDNINYETEYRREWCSSKGKPSPCFLFARKFTRPAALRLLRETILLEGKEHDNK

SEQ ID NO: 104446 - protein, 245 aa, Arabidopsis thaliana; identical to SEQ ID NO: 31081
  peptide (1)..(245): Ceres Seq. ID no. 13614990
  misc_feature (1)..(80): Pfam Name: Arabidopsis protein of unknown function, DUF266 Pfam Description: Arabidopsis protein of unknown function, DUF266
  misc_feature (1)..(245): Homolog of NCBI NO: 15241437 NR Description: expressed protein [Arabidopsis thaliana]
  misc_feature (1)..(190): Homolog of NCBI NO: 30684956 NR Description: expressed protein [Arabidopsis thaliana]
  misc_feature (1)..(236): Homolog of NCBI NO: 30682534 NR Description: expressed protein [Arabidopsis thaliana] unknown protein [Arabidopsis thaliana]
  misc_feature (1)..(106): Homolog of NCBI NO: 25402693 NR Description: hypothetical protein [imported] - Arabidopsis >gi|3157941|gb|AAC17624.1| Contains similarity to hypothetical
  misc_feature (138)..(236): Homolog of NCBI NO: 25402693 NR Description: hypothetical protein [imported] - Arabidopsis >gi|3157941|gb|AAC17624.1| Contains similarity to hypothetical
  misc_feature (1)..(190): Homolog of NCBI NO: 34911442 NR Description: P0431H09.21 [Oryza sativa (japonica
  misc_feature (1)..(232): Homolog of NCBI NO: 17065016 NR Description: Unknown protein [Arabidopsis thaliana]
  misc_feature (1)..(232): Homolog of NCBI NO: 22327910 NR Description: expressed protein [Arabidopsis thaliana] Unknown protein [Arabidopsis thaliana]
  misc_feature (1)..(231): Homolog of NCBI NO: 38346557 NR Description: OSJNBa0035M09.18 [Oryza sativa (japonica
  misc_feature (1)..(231): Homolog of NCBI NO: 26452247 NR Description: unknown protein [Arabidopsis thaliana] Unknown protein [Arabidopsis thaliana]

SEQ ID NO: 104447 - DNA, 1162 bp, Arabidopsis thaliana
  misc_feature (1)..(1162): Ceres Seq. ID no. 13614995
  misc_feature: MA Experiment ID: 108572 Result: Down-regulated in Transcription
  misc_feature: MA Experiment 108572 PARAMETER Experiment Name: At_Drought_cDNA_P Parameter: Timepoint (hr) Value: 1
  misc_feature: MA Experiment 108572 PARAMETER Experiment Name: At_Drought_cDNA_P Parameter: Tissue Value: Aerial
  misc_feature: MA Experiment 108572 PARAMETER Experiment Name: At_Drought_cDNA_P Parameter: Treatment Value: Drought vs. No Drought
  misc_feature: MA Experiment ID: 108574 Result: Down-regulated in Transcription
  misc_feature: MA Experiment 108574 PARAMETER Experiment Name: At_Wounding__cDNA_P Parameter: Timepoint (hr) Value: 1
  misc_feature: MA Experiment 108574 PARAMETER Experiment Name: At_Wounding__cDNA_P Parameter: Tissue Value: Aerial
  misc_feature: MA Experiment 108574 PARAMETER Experiment Name: At_Wounding__cDNA_P Parameter: Treatment Value: Wounding vs. No Wounding
  misc_feature: MA Experiment ID: 108577 Result: Down-regulated in Transcription
  misc_feature: MA Experiment 108577 PARAMETER Experiment Name: At_42deg_Heat_cDNA_P Parameter: Temperature (deg C) Value: 42 vs. 22
  misc_feature: MA Experiment 108577 PARAMETER Experiment Name: At_42deg_Heat_cDNA_P Parameter: Timepoint (hr) Value: 6
  misc_feature: MA Experiment 108577 PARAMETER Experiment Name: At_42deg_Heat_cDNA_P Parameter: Tissue Value: Aerial
  misc_feature: MA Experiment ID: 108594 Result: Up-regulated in Transcription
  misc_feature: MA Experiment 108594 PARAMETER Experiment Name: At_Ler-rhl_Root_cDNA_P Parameter: Plant Line Value: null
  misc_feature: MA Experiment ID: 108609 Result: Up-regulated in Transcription
  misc_feature: MA Experiment 108609 PARAMETER Experiment Name: At_100uM_ABA_cDNA_P Parameter: Timepoint (hr) Value: 24
  misc_feature: MA Experiment 108609 PARAMETER Experiment Name: At_100uM_ABA_cDNA_P Parameter: Tissue Value: Aerial
  misc_feature: MA Experiment 108609 PARAMETER Experiment Name: At_100uM_ABA_cDNA_P Parameter: Treatment Value: 100uM ABA vs. No Treatment
  misc_feature: MA Experiment ID: 108668 Result: Down-regulated in Transcription
  misc_feature: MA Experiment 108668 PARAMETER Experiment Name: At_2mM_SA_cDNA_P Parameter: Plant Line Value: WS
  misc_feature: MA Experiment 108668 PARAMETER Experiment Name: At_2mM_SA_cDNA_P Parameter: Timepoint (hr) Value: 6
  misc_feature: MA Experiment 108668 PARAMETER Experiment Name: At_2mM_SA_cDNA_P Parameter: Treatment Value: 2mM SA vs. No Treatment
  misc_feature: MA Experiment ID: 20000173 Result: Down-regulated in Transcription
  misc_feature: MA Experiment 20000173 PARAMETER Experiment Name: At_42deg_Heat_P Parameter: Age (day) Value: 14
  misc_feature: MA Experiment 20000173 PARAMETER Experiment Name: At_42deg_Heat_P Parameter: Organism Value: A. thaliana
  misc_feature: MA Experiment 20000173 PARAMETER Experiment Name: At_42deg_Heat_P Parameter: Plant Line Value: WS
  misc_feature: MA Experiment 20000173 PARAMETER Experiment Name: At_42deg_Heat_P Parameter: Temperature (deg C) Value: 42 vs. 22
  misc_feature: MA Experiment 20000173 PARAMETER Experiment Name: At_42deg_Heat_P Parameter: Timepoint (hr) Value: 6
  misc_feature: MA Experiment 20000173 PARAMETER Experiment Name: At_42deg_Heat_P Parameter: Tissue Value: Aerial
  misc_feature: MA Experiment ID: 20000185 Result: Down-regulated in Transcription
  misc_feature: MA Experiment 20000185 PARAMETER Experiment Name: At_Roots__P Parameter: Age (day) Value: 7 vs. 21
  misc_feature: MA Experiment 20000185 PARAMETER Experiment Name: At_Roots__P Parameter: Organism Value: A. thaliana
  misc_feature: MA Experiment 20000185 PARAMETER Experiment Name: At_Roots__P Parameter: Tissue Value: Roots vs. Whole Plant
  misc_feature: MA Experiment ID: 20000267 Result: Down-regulated in Transcription
  misc_feature: MA Experiment 20000267 PARAMETER Experiment Name: At_Drought_P Parameter: Age (day) Value: 7
  misc_feature: MA Experiment 20000267 PARAMETER Experiment Name: At_Drought_P Parameter: Organism Value: A. thaliana
  misc_feature: MA Experiment 20000267 PARAMETER Experiment Name: At_Drought_P Parameter: Plant Line Value: WS
  misc_feature: MA Experiment 20000267 PARAMETER Experiment Name: At_Drought_P Parameter: Timepoint (hr) Value: 6
  misc_feature: MA Experiment 20000267 PARAMETER Experiment Name: At_Drought_P Parameter: Tissue Value: Whole Plant
  misc_feature: MA Experiment 20000267 PARAMETER Experiment Name: At_Drought_P Parameter: Treatment Value: Drought vs. No Drought
  misc_feature: MA Experiment ID: 20000308 Result: Up-regulated in Transcription
  misc_feature: MA Experiment 20000308 PARAMETER Experiment Name: At_100mM_NaCl__P Parameter: Age (day) Value: 17
  misc_feature: MA Experiment 20000308 PARAMETER Experiment Name: At_100mM_NaCl__P Parameter: Organism Value: A. thaliana
  misc_feature: MA Experiment 20000308 PARAMETER Experiment Name: At_100mM_NaCl__P Parameter: Plant Line Value: WS
  misc_feature: MA Experiment 20000308 PARAMETER Experiment Name: At_100mM_NaCl__P Parameter: Timepoint (hr) Value: 72
  misc_feature: MA Experiment 20000308 PARAMETER Experiment Name: At_100mM_NaCl__P Parameter: Tissue Value: Whole Plant
  misc_feature: MA Experiment 20000308 PARAMETER Experiment Name: At_100mM_NaCl__P Parameter: Treatment Value: 100mM NaCl vs. No Treatment
  misc_feature: MA Experiment ID: 20000436 Result: Down-regulated in Transcription
  misc_feature: MA Experiment 20000436 PARAMETER Experiment Name: At_Drought_P Parameter: Age (day) Value: 7
  misc_feature: MA Experiment 20000436 PARAMETER Experiment Name: At_Drought_P Parameter: Organism Value: A. thaliana
  misc_feature: MA Experiment 20000436 PARAMETER Experiment Name: At_Drought_P Parameter: Plant Line Value: WS
  misc_feature: MA Experiment 20000436 PARAMETER Experiment Name: At_Drought_P Parameter: Timepoint (hr) Value: 12
  misc_feature: MA Experiment 20000436 PARAMETER Experiment Name: At_Drought_P Parameter: Tissue Value: Whole Plant
  misc_feature: MA Experiment 20000436 PARAMETER Experiment Name: At_Drought_P Parameter: Treatment Value: Drought vs. No Drought
  misc_feature: MA Experiment ID: 20000439 Result: Down-regulated in Transcription
  misc_feature: MA Experiment 20000439 PARAMETER Experiment Name: At_Roots__P Parameter: Age (day) Value: 14 vs. 21
  misc_feature: MA Experiment 20000439 PARAMETER Experiment Name: At_Roots__P Parameter: Organism Value: A. thaliana
  misc_feature: MA Experiment 20000439 PARAMETER Experiment Name: At_Roots__P Parameter: Tissue Value: Roots vs. Whole Plant
  misc_feature: MA Experiment ID: 20000443 Result: Up-regulated in Transcription
  misc_feature: MA Experiment 20000443 PARAMETER Experiment Name: At_1uM_BR-BRZ__P Parameter: Tissue Value: Shoot Apices
  misc_feature: MA Experiment 20000443 PARAMETER Experiment Name: At_1uM_BR-BRZ__P Parameter: Treatment Value: 1uM BRZ vs. No Treatment
  misc_feature: MA Experiment ID: 20000453 Result: Up-regulated in Transcription
  misc_feature: MA Experiment 20000453 PARAMETER Experiment Name: At_100uM_ABA_P Parameter: Age (day) Value: 15
  misc_feature: MA Experiment 20000453 PARAMETER Experiment Name: At_100uM_ABA_P Parameter: Organism Value: A. thaliana
  misc_feature: MA Experiment 20000453 PARAMETER Experiment Name: At_100uM_ABA_P Parameter: Plant Line Value: WS
  misc_feature: MA Experiment 20000453 PARAMETER Experiment Name: At_100uM_ABA_P Parameter: Timepoint (hr) Value: 24
  misc_feature: MA Experiment 20000453 PARAMETER Experiment Name: At_100uM_ABA_P Parameter: Tissue Value: Aerial
  misc_feature: MA Experiment 20000453 PARAMETER Experiment Name: At_100uM_ABA_P Parameter: Treatment Value: 100uM ABA vs. No Treatment
  misc_feature: MA Experiment ID: 20000495 Result: Up-regulated in Transcription
  misc_feature: MA Experiment 20000495 PARAMETER Experiment Name: At_Guard_Cells_P Parameter: Harvest Date Value: 8/2/2002
  misc_feature: MA Experiment 20000495 PARAMETER Experiment Name: At_Guard_Cells_P Parameter: Organism Value: A. thaliana
  misc_feature: MA Experiment 20000495 PARAMETER Experiment Name: At_Guard_Cells_P Parameter: Tissue Value: Guard Cells vs. Leaves
  misc_feature: MA Experiment ID: 20000573 Result: Up-regulated in Transcription
  misc_feature: MA Experiment 20000573 PARAMETER Experiment Name: At_100uM_ABA_Mutants__P Parameter: Organism Value: A. thaliana
  misc_feature: MA Experiment 20000573 PARAMETER Experiment Name: At_100uM_ABA_Mutants__P Parameter: Plant Line Value: CS22 vs. Ler wt
  misc_feature: MA Experiment 20000573 PARAMETER Experiment Name: At_100uM_ABA_Mutants__P Parameter: Timepoint (hr) Value: N/A
  misc_feature: MA Experiment 20000573 PARAMETER Experiment Name: At_100uM_ABA_Mutants__P Parameter: Tissue Value: Whole Plant
  misc_feature: MA Experiment 20000573 PARAMETER Experiment Name: At_100uM_ABA_Mutants__P Parameter: Treatment Value: None
  misc_feature: MA Experiment ID: 20000574 Result: Up-regulated in Transcription
  misc_feature: MA Experiment 20000574 PARAMETER Experiment Name: At_100uM_ABA_Mutants__P Parameter: Organism Value: A. thaliana
  misc_feature: MA Experiment 20000574 PARAMETER Experiment Name: At_100uM_ABA_Mutants__P Parameter: Plant Line Value: CS23 vs. Ler wt
  misc_feature: MA Experiment 20000574 PARAMETER Experiment Name: At_100uM_ABA_Mutants__P Parameter: Timepoint (hr) Value: N/A
  misc_feature: MA Experiment 20000574 PARAMETER Experiment Name: At_100uM_ABA_Mutants__P Parameter: Tissue Value: Whole Plant
  misc_feature: MA Experiment 20000574 PARAMETER Experiment Name: At_100uM_ABA_Mutants__P Parameter: Treatment Value: None
  misc_feature: MA Experiment ID: 20000794 Result: Down-regulated in Transcription
  misc_feature: MA Experiment 20000794 PARAMETER Experiment Name: At_Petals_P Parameter: Age (day) Value: 23-25 days
  misc_feature: MA Experiment 20000794 PARAMETER Experiment Name: At_Petals_P Parameter: Plant Line Value: WS
  misc_feature: MA Experiment 20000794 PARAMETER Experiment Name: At_Petals_P Parameter: Tissue Value: Petals vs. Whole plant
  misc_feature: MA Experiment ID: 20001248 Result: Up-regulated in Transcription
  misc_feature: MA Experiment 20001248 PARAMETER Experiment Name: At_Far-red-induction_P Parameter: Age (day) Value: 7
  misc_feature: MA Experiment 20001248 PARAMETER Experiment Name: At_Far-red-induction_P Parameter: Light Value: Far-red vs. White
  misc_feature: MA Experiment 20001248 PARAMETER Experiment Name: At_Far-red-induction_P Parameter: Organism Value: A. thaliana
  misc_feature: MA Experiment 20001248 PARAMETER Experiment Name: At_Far-red-induction_P Parameter: Plant Line Value: Columbia
  misc_feature: MA Experiment 20001248 PARAMETER Experiment Name: At_Far-red-induction_P Parameter: Timepoint (hr) Value: 4
  misc_feature: MA Experiment 20001248 PARAMETER Experiment Name: At_Far-red-induction_P Parameter: Tissue Value: Whole Plant
  misc_feature: MA Experiment ID: 20001450 Result: Up-regulated in Transcription
  misc_feature: MA Experiment 20001450 PARAMETER Experiment Name: At_Far-red-induction_P Parameter: Age (day) Value: 7
  misc_feature: MA Experiment 20001450 PARAMETER Experiment Name: At_Far-red-induction_P Parameter: Light Value: Far-red vs. White
  misc_feature: MA Experiment 20001450 PARAMETER Experiment Name: At_Far-red-induction_P Parameter: Organism Value: A. thaliana
  misc_feature: MA Experiment 20001450 PARAMETER Experiment Name: At_Far-red-induction_P Parameter: Plant Line Value: Columbia
  misc_feature: MA Experiment 20001450 PARAMETER Experiment Name: At_Far-red-induction_P Parameter: Timepoint (hr) Value: 8
  misc_feature: MA Experiment 20001450 PARAMETER Experiment Name: At_Far-red-induction_P Parameter: Tissue Value: Whole Plant
  misc_feature: MA Experiment ID: 20001557 Result: Up-regulated in Transcription
  misc_feature: MA Experiment 20001557 PARAMETER Experiment Name: At_Drought_Soil_Dry_P Parameter: Age (day) Value: 27
  misc_feature: MA Experiment 20001557 PARAMETER Experiment Name: At_Drought_Soil_Dry_P Parameter: Organism Value: A. thaliana
  misc_feature: MA Experiment 20001557 PARAMETER Experiment Name: At_Drought_Soil_Dry_P Parameter: Plant Line Value: WS
  misc_feature: MA Experiment 20001557 PARAMETER Experiment Name: At_Drought_Soil_Dry_P Parameter: Post Timepoint (hr) Value: 3
  misc_feature: MA Experiment 20001557 PARAMETER Experiment Name: At_Drought_Soil_Dry_P Parameter: Post-Treatment Value: Re-Water vs. No Drought
  misc_feature: MA Experiment 20001557 PARAMETER Experiment Name: At_Drought_Soil_Dry_P Parameter: Timepoint (day) Value: 13
  misc_feature: MA Experiment 20001557 PARAMETER Experiment Name: At_Drought_Soil_Dry_P Parameter: Treatment Value: Drought vs. No Drought
  misc_feature: MA Experiment ID: 20001560 Result: Up-regulated in Transcription
  misc_feature: MA Experiment 20001560 PARAMETER Experiment Name: At_Drought_Soil_Dry_P Parameter: Age (day) Value: 28
  misc_feature: MA Experiment 20001560 PARAMETER Experiment Name: At_Drought_Soil_Dry_P Parameter: Organism Value: A. thaliana
  misc_feature: MA Experiment 20001560 PARAMETER Experiment Name: At_Drought_Soil_Dry_P Parameter: Plant Line Value: WS
  misc_feature: MA Experiment 20001560 PARAMETER Experiment Name: At_Drought_Soil_Dry_P Parameter: Post Timepoint (hr) Value: None
  misc_feature: MA Experiment 20001560 PARAMETER Experiment Name: At_Drought_Soil_Dry_P Parameter: Post-Treatment Value: None
  misc_feature: MA Experiment 20001560 PARAMETER Experiment Name: At_Drought_Soil_Dry_P Parameter: Timepoint (day) Value: 14
  misc_feature: MA Experiment 20001560 PARAMETER Experiment Name: At_Drought_Soil_Dry_P Parameter: Treatment Value: Drought vs. No Drought
  misc_feature: MA Experiment ID: 20001757 Result: Up-regulated in Transcription
  misc_feature: MA Experiment 20001757 PARAMETER Experiment Name: At_50mM_NH4NO3_L-to-H_P Parameter: Timepoint (hr) Value: 6
  misc_feature: MA Experiment 20001757 PARAMETER Experiment Name: At_50mM_NH4NO3_L-to-H_P Parameter: Tissue Value: Leaf
  misc_feature: MA Experiment 20001757 PARAMETER Experiment Name: At_50mM_NH4NO3_L-to-H_P Parameter: Treatment Value: 50mM NH4NO3 vs 100mM Mannitol
  misc_feature: MA Experiment ID: 20001904 Result: Down-regulated in Transcription
  misc_feature: MA Experiment 20001904 PARAMETER Experiment Name: At_Drought_Reproduction_P Parameter: Age (day) Value: 37
  misc_feature: MA Experiment 20001904 PARAMETER Experiment Name: At_Drought_Reproduction_P Parameter: Organism Value: A. thaliana
  misc_feature: MA Experiment 20001904 PARAMETER Experiment Name: At_Drought_Reproduction_P Parameter: Plant Line Value: WS
  misc_feature: MA Experiment 20001904 PARAMETER Experiment Name: At_Drought_Reproduction_P Parameter: Timepoint (day) Value: 7
  misc_feature: MA Experiment 20001904 PARAMETER Experiment Name: At_Drought_Reproduction_P Parameter: Tissue Value: Rosettes
  misc_feature: MA Experiment 20001904 PARAMETER Experiment Name: At_Drought_Reproduction_P Parameter: Treatment Value: Drought vs. No Drought
  misc_feature: MA Experiment ID: 20001905 Result: Down-regulated in Transcription
  misc_feature: MA Experiment 20001905 PARAMETER Experiment Name: At_Drought_Reproduction_P Parameter: Age (day) Value: 40
  misc_feature: MA Experiment 20001905 PARAMETER Experiment Name: At_Drought_Reproduction_P Parameter: Organism Value: A. thaliana
  misc_feature: MA Experiment 20001905 PARAMETER Experiment Name: At_Drought_Reproduction_P Parameter: Plant Line Value: WS
  misc_feature: MA Experiment 20001905 PARAMETER Experiment Name: At_Drought_Reproduction_P Parameter: Timepoint (day) Value: 10
  misc_feature: MA Experiment 20001905 PARAMETER Experiment Name: At_Drought_Reproduction_P Parameter: Tissue Value: Rosettes
  misc_feature: MA Experiment 20001905 PARAMETER Experiment Name: At_Drought_Reproduction_P Parameter: Treatment Value: Drought vs. No Drought
acgcatttaaattaatatttatggataatatggttaataaataaggaacttctatttatatcacaaaaggtcactggtcttcttcgtgtgacttcaccactttctcatctcccacaaaaatggctctctcacttctttcagtctttatctttttccatgtctttaccaatgttgtttttgctgcttcaaatgaggaatccaacgccttagtttctttaccaacgccaacacttccatcgccatctccggctaccaaaccgccgtcgccagctctcaaaccgccgacgccgtcgtacaagccacccacgctgccaactactcctattaaaccacccaccacaaaacctccggtcaaacctccaactattccggttacaccagtaaaacctccggtttcaactcctccgatcaaactaccgccggtacaaccacctacgtacaaacccccaacgccaacagttaaaccaccgtccgtccaaccacctacgtacaaacccccaactccaacggttaaaccacccactacatcaccggttaaaccacccactacgccaccagttcaatcaccgccggtccaaccacctacgtacaaacccccaacgtcaccggttaaaccacccaccacaactccaccggttaaaccccccaccacgacgccaccggtccaaccacctacgtacaatcccccaactacaccggttaaaccacctacagcgccgcctgtcaaacctccaacaccacctcccgtaagaactcggatagattgcgtgcctttatgtgggacgaggtgtgggcaacactcgaggaagaacgtatgtatgagagcgtgcgtcacgtgctgctaccgctgcaagtgtgttcccccaggcacctacggtaataaggagaagtgtggatcttgttacgccaacatgaagacacgtggtggaaaatccaaatgtccttgaacctttatatgacgatggttgttaaacgaaataatttaaatcaatggagtttttataagtttgtaatgcgtttgtttttgttatagtaatattgagttggatctttgtttacgggacgtagaatactaaataatgaaaaaaaccttctcgatgaattaagggttttatgaatttgttttgtattgaataatatagggatggataaagttttatta

SEQ ID NO: 104448 - protein, 275 aa, Arabidopsis thaliana; identical to SEQ ID NO: 40593
  peptide (1)..(275): Ceres Seq. ID no. 13614996
  misc_feature (210)..(275): Pfam Name: Gibberellin regulated protein Pfam Description: Gibberellin regulated protein
  misc_feature (1)..(275): Homolog of NCBI NO: 15242165 NR Description: expressed protein [Arabidopsis thaliana]
  misc_feature (1)..(275): Homolog of NCBI NO: 21592790 NR Description: unknown [Arabidopsis thaliana]
  misc_feature (36)..(211): Homolog of NCBI NO: 15225875 NR Description: proline-rich protein family [Arabidopsis thaliana]
  misc_feature (36)..(211): Homolog of NCBI NO: 15225875 NR Description: proline-rich protein family [Arabidopsis thaliana]
  misc_feature (34)..(210): Homolog of NCBI NO: 15217879 NR Description: prolin-rich protein -related [Arabidopsis
  misc_feature (36)..(211): Homolog of NCBI NO: 15225875 NR Description: proline-rich protein family [Arabidopsis thaliana]
  misc_feature (36)..(211): Homolog of NCBI NO: 15225875 NR Description: proline-rich protein family [Arabidopsis thaliana]
  misc_feature (36)..(211): Homolog of NCBI NO: 15225875 NR Description: proline-rich protein family [Arabidopsis thaliana]
  misc_feature (34)..(212): Homolog of NCBI NO: 7446482 NR Description: probable cell wall-plasma membrane linker protein
  misc_feature (34)..(211): Homolog of NCBI NO: 15225875 NR Description: proline-rich protein family [Arabidopsis thaliana]

SEQ ID NO: 104449 - DNA, 1260 bp, Arabidopsis thaliana
  misc_feature (1)..(1260): Ceres Seq. ID no. 13614997
  misc_feature: MA Experiment ID: 108435 Result: Down-regulated in Transcription
  misc_feature: MA Experiment 108435 PARAMETER Experiment Name: At_stm_Mutants_cDNA_P Parameter: Plant Line Value: wt Landsburg vs stm
  misc_feature: MA Experiment 108435 PARAMETER Experiment Name: At_stm_Mutants_cDNA_P Parameter: Tissue Value: Shoot Apical Meristem Region
  misc_feature: MA Experiment ID: 108464 Result: Up-regulated in Transcription
  misc_feature: MA Experiment 108464 PARAMETER Experiment Name: At_Germinating_Seeds_cDNA_P Parameter: Age (day) Value: 4 vs. 0
  misc_feature: MA Experiment 108464 PARAMETER Experiment Name: At_Germinating_Seeds_cDNA_P Parameter: Tissue Value: Germinating Seeds
  misc_feature: MA Experiment ID: 108595 Result: Down-regulated in Transcription
  misc_feature: MA Experiment 108595 PARAMETER Experiment Name: At_Ler-pi_Ovule_cDNA_P Parameter: Plant Line Value: null
  misc_feature: MA Experiment ID: 108668 Result: Down-regulated in Transcription
  misc_feature: MA Experiment 108668 PARAMETER Experiment Name: At_2mM_SA_cDNA_P Parameter: Plant Line Value: WS
  misc_feature: MA Experiment 108668 PARAMETER Experiment Name: At_2mM_SA_cDNA_P Parameter: Timepoint (hr) Value: 6
  misc_feature: MA Experiment 108668 PARAMETER Experiment Name: At_2mM_SA_cDNA_P Parameter: Treatment Value: 2mM SA vs. No Treatment
  misc_feature: MA Experiment ID: 20000185 Result: Down-regulated in Transcription
  misc_feature: MA Experiment 20000185 PARAMETER Experiment Name: At_Roots__P Parameter: Age (day) Value: 7 vs. 21
  misc_feature: MA Experiment 20000185 PARAMETER Experiment Name: At_Roots__P Parameter: Organism Value: A. thaliana
  misc_feature: MA Experiment 20000185 PARAMETER Experiment Name: At_Roots__P Parameter: Tissue Value: Roots vs. Whole Plant
  misc_feature: MA Experiment ID: 20000224 Result: Up-regulated in Transcription
  misc_feature: MA Experiment ID: 20000265 Result: Down-regulated in Transcription
  misc_feature: MA Experiment 20000265 PARAMETER Experiment Name: At_Open_Flower_P Parameter: Age (day) Value: 21
  misc_feature: MA Experiment 20000265 PARAMETER Experiment Name: At_Open_Flower_P Parameter: Plant Line Value: WS
  misc_feature: MA Experiment 20000265 PARAMETER Experiment Name: At_Open_Flower_P Parameter: Tissue Value: Closed Flower vs. Whole Plant
  misc_feature: MA Experiment ID: 20000439 Result: Down-regulated in Transcription
  misc_feature: MA Experiment 20000439 PARAMETER Experiment Name: At_Roots__P Parameter: Age (day) Value: 14 vs. 21
  misc_feature: MA Experiment 20000439 PARAMETER Experiment Name: At_Roots__P Parameter: Organism Value: A. thaliana
  misc_feature: MA Experiment 20000439 PARAMETER Experiment Name: At_Roots__P Parameter: Tissue Value: Roots vs. Whole Plant
  misc_feature: MA Experiment ID: 20001555 Result: Down-regulated in Transcription
  misc_feature: MA Experiment 20001555 PARAMETER Experiment Name: At_Drought_Soil_Dry_P Parameter: Age (day) Value: 24
  misc_feature: MA Experiment 20001555 PARAMETER Experiment Name: At_Drought_Soil_Dry_P Parameter: Organism Value: A. thaliana
  misc_feature: MA Experiment 20001555 PARAMETER Experiment Name: At_Drought_Soil_Dry_P Parameter: Plant Line Value: WS
  misc_feature: MA Experiment 20001555 PARAMETER Experiment Name: At_Drought_Soil_Dry_P Parameter: Post Timepoint (hr) Value: None
  misc_feature: MA Experiment 20001555 PARAMETER Experiment Name: At_Drought_Soil_Dry_P Parameter: Post-Treatment Value: None
  misc_feature: MA Experiment 20001555 PARAMETER Experiment Name: At_Drought_Soil_Dry_P Parameter: Timepoint (day) Value: 10
  misc_feature: MA Experiment 20001555 PARAMETER Experiment Name: At_Drought_Soil_Dry_P Parameter: Treatment Value: Drought vs. No Drought
  misc_feature: MA Experiment ID: 20001556 Result: Down-regulated in Transcription
  misc_feature: MA Experiment 20001556 PARAMETER Experiment Name: At_Drought_Soil_Dry_P Parameter: Age (day) Value: 26
  misc_feature: MA Experiment 20001556 PARAMETER Experiment Name: At_Drought_Soil_Dry_P Parameter: Organism Value: A. thaliana
  misc_feature: MA Experiment 20001556 PARAMETER Experiment Name: At_Drought_Soil_Dry_P Parameter: Plant Line Value: WS
  misc_feature: MA Experiment 20001556 PARAMETER Experiment Name: At_Drought_Soil_Dry_P Parameter: Post Timepoint (hr) Value: None
  misc_feature: MA Experiment 20001556 PARAMETER Experiment Name: At_Drought_Soil_Dry_P Parameter: Post-Treatment Value: None
  misc_feature: MA Experiment 20001556 PARAMETER Experiment Name: At_Drought_Soil_Dry_P Parameter: Timepoint (day) Value: 12
  misc_feature: MA Experiment 20001556 PARAMETER Experiment Name: At_Drought_Soil_Dry_P Parameter: Treatment Value: Drought vs. No Drought
  misc_feature: MA Experiment ID: 20001558 Result: Down-regulated in Transcription
  misc_feature: MA Experiment 20001558 PARAMETER Experiment Name: At_Drought_Soil_Dry_P Parameter: Age (day) Value: 27
  misc_feature: MA Experiment 20001558 PARAMETER Experiment Name: At_Drought_Soil_Dry_P Parameter: Organism Value: A. thaliana
  misc_feature: MA Experiment 20001558 PARAMETER Experiment Name: At_Drought_Soil_Dry_P Parameter: Plant Line Value: WS
  misc_feature: MA Experiment 20001558 PARAMETER Experiment Name: At_Drought_Soil_Dry_P Parameter: Post Timepoint (hr) Value: 6
  misc_feature: MA Experiment 20001558 PARAMETER Experiment Name: At_Drought_Soil_Dry_P Parameter: Post-Treatment Value: Re-Water vs. No Drought
  misc_feature: MA Experiment 20001558 PARAMETER Experiment Name: At_Drought_Soil_Dry_P Parameter: Timepoint (day) Value: 13
  misc_feature: MA Experiment 20001558 PARAMETER Experiment Name: At_Drought_Soil_Dry_P Parameter: Treatment Value: Drought vs. No Drought
  misc_feature: MA Experiment ID: 20001559 Result: Down-regulated in Transcription
  misc_feature: MA Experiment 20001559 PARAMETER Experiment Name: At_Drought_Soil_Dry_P Parameter: Age (day) Value: 28
  misc_feature: MA Experiment 20001559 PARAMETER Experiment Name: At_Drought_Soil_Dry_P Parameter: Organism Value: A. thaliana
  misc_feature: MA Experiment 20001559 PARAMETER Experiment Name: At_Drought_Soil_Dry_P Parameter: Plant Line Value: WS
  misc_feature: MA Experiment 20001559 PARAMETER Experiment Name: At_Drought_Soil_Dry_P Parameter: Post Timepoint (hr) Value: 29
  misc_feature: MA Experiment 20001559 PARAMETER Experiment Name: At_Drought_Soil_Dry_P Parameter: Post-Treatment Value: Re-Water vs. No Drought
  misc_feature: MA Experiment 20001559 PARAMETER Experiment Name: At_Drought_Soil_Dry_P Parameter: Timepoint (day) Value: 14
  misc_feature: MA Experiment 20001559 PARAMETER Experiment Name: At_Drought_Soil_Dry_P Parameter: Treatment Value: Drought vs. No Drought
  misc_feature: MA Experiment ID: 20001560 Result: Down-regulated in Transcription
  misc_feature: MA Experiment 20001560 PARAMETER Experiment Name: At_Drought_Soil_Dry_P Parameter: Age (day) Value: 28
  misc_feature: MA Experiment 20001560 PARAMETER Experiment Name: At_Drought_Soil_Dry_P Parameter: Organism Value: A. thaliana
  misc_feature: MA Experiment 20001560 PARAMETER Experiment Name: At_Drought_Soil_Dry_P Parameter: Plant Line Value: WS
  misc_feature: MA Experiment 20001560 PARAMETER Experiment Name: At_Drought_Soil_Dry_P Parameter: Post Timepoint (hr) Value: None
  misc_feature: MA Experiment 20001560 PARAMETER Experiment Name: At_Drought_Soil_Dry_P Parameter: Post-Treatment Value: None
  misc_feature: MA Experiment 20001560 PARAMETER Experiment Name: At_Drought_Soil_Dry_P Parameter: Timepoint (day) Value: 14
  misc_feature: MA Experiment 20001560 PARAMETER Experiment Name: At_Drought_Soil_Dry_P Parameter: Treatment Value: Drought vs. No Drought
aacgcatattacgcagccaccacacagcggagagagagagagaagaaacagaaacagaaacagagctcgagctcgagacgctcaatattaatggcggccgcatcagcacgagctttcttcatgctctctcgtgtaactgacctttcaaagaaaaagctaatccttcaccaaccaccaccgtcgtcatctcctcaccggctaccttatgctccgaatcgtgcggtgtcttcctccgctgtaatcagctgtctcagcggtggtggtgtttcctccgacgattcgtatgtatctactcgtcggtctaagttagatcgaggtttcgctgtgatcgcgaatttggtgaatcggatccagccgcttgatacgtctgttatctctaaaggcttatctgattcagctaaggattcgatgaaacagacgatttcttctatgcttggtcttcttccttccgatcaattttccgtttccgttactatctccgaacagcctctttatcgtctccttatttcttccatcatcaccgggtatacattgtggaatgcggagtatcgtgtatcactgaggaggaattttgatataccgattgatcctagaaaggaggaggaggatcaatcttcgaaagacaatgttagatttggttcagagaagggaatgagtgaggatttagggaattgtgttgaggaatttgagagactgagtcctcaggtgtttggagacttgtcacctgaagcgttgagttatattcagcttttgcagtctgagctatcttccatgaaagaggagctagattcacaaaagaagaaagctttgaggatagaatgtgagaaaggaaacaggaatgatttgttggattatttgcgttctttagatcccgagatggtgactgagttatctcaactgtcttcaccggaagtggaagagattgtgaaccagcttgtccaaaacgtattagagaggctcttcgaagaccagactacttcaaatttcatgcaaaatcctggcataaggactacagaaggtggtgatggaactggtagaaaggtggacacatccagggattaccttgcaaagctccttttctggtgcatgctattgggacatcatttaagaggtttggagaatagattacatctcagctgtgttgttgggttgctgtaatatcagagaatcataaaaaggagacaagataaaaaagaaacacaaatgtatattcttctcccccattttgatttctttaatctaagcgttaagttattatct

SEQ ID NO: 104450 - protein, 385 aa, Arabidopsis thaliana
  peptide (1)..(385): Ceres Seq. ID no. 13614998
  misc_feature (31)..(385): Homolog of NCBI NO: 15242177 NR Description: seed maturation -related protein [Arabidopsis
  misc_feature (31)..(385): Homolog of NCBI NO: 21536629 NR Description: seed maturation-like protein [Arabidopsis
  misc_feature (58)..(320): Homolog of NCBI NO: 40538958 NR Description: expressed protein [Oryza sativa (japonica
NAYYAATTQRREREKKQKQKQSSSSRRSILMAAASARAFFMLSRVTDLSKKKLILHQPPPSSSPHRLPYAPNRAVSSSAVISCLSGGGVSSDDSYVSTRRSKLDRGFAVIANLVNRIQPLDTSVISKGLSDSAKDSMKQTISSMLGLLPSDQFSVSVTISEQPLYRLLISSIITGYTLWNAEYRVSLRRNFDIPIDPRKEEEDQSSKDNVRFGSEKGMSEDLGNCVEEFERLSPQVFGDLSPEALSYIQLLQSELSSMKEELDSQKKKALRIECEKGNRNDLLDYLRSLDPEMVTELSQLSSPEVEEIVNQLVQNVLERLFEDQTTSNFMQNPGIRTTEGGDGTGRKVDTSRDYLAKLLFWCMLLGHHLRGLENRLHLSCVVGLL

SEQ ID NO: 104451 - protein, 355 aa, Arabidopsis thaliana; identical to SEQ ID NO: 39386
  peptide (1)..(355): Ceres Seq. ID no. 13614999
  misc_feature (1)..(355): Homolog of NCBI NO: 15242177 NR Description: seed maturation -related protein [Arabidopsis
  misc_feature (1)..(355): Homolog of NCBI NO: 21536629 NR Description: seed maturation-like protein [Arabidopsis
  misc_feature (28)..(290): Homolog of NCBI NO: 40538958 NR Description: expressed protein [Oryza sativa (japonica

SEQ ID NO: 104452 - protein, 345 aa, Arabidopsis thaliana; identical to SEQ ID NO: 39387
  peptide (1)..(345): Ceres Seq. ID no. 13615000
  misc_feature (1)..(345): Homolog of NCBI NO: 15242177 NR Description: seed maturation -related protein [Arabidopsis
  misc_feature (1)..(345): Homolog of NCBI NO: 21536629 NR Description: seed maturation-like protein [Arabidopsis
  misc_feature (18)..(280): Homolog of NCBI NO: 40538958 NR Description: expressed protein [Oryza sativa (japonica

SEQ ID NO: 104453 - DNA, 1630 bp, Arabidopsis thaliana
  misc_feature (1)..(1630): Ceres Seq. ID no. 13615001
  misc_feature: MA Experiment ID: 108561 Result: Down-regulated in Transcription
  misc_feature: MA Experiment 108561 PARAMETER Experiment Name: At_100uM_ABA_cDNA_P Parameter: Timepoint (hr) Value: 6
  misc_feature: MA Experiment 108561 PARAMETER Experiment Name: At_100uM_ABA_cDNA_P Parameter: Tissue Value: Aerial
  misc_feature: MA Experiment 108561 PARAMETER Experiment Name: At_100uM_ABA_cDNA_P Parameter: Treatment Value: 100uM ABA vs. No Treatment
  misc_feature: MA Experiment ID: 108595 Result: Down-regulated in Transcription
  misc_feature: MA Experiment 108595 PARAMETER Experiment Name: At_Ler-pi_Ovule_cDNA_P Parameter: Plant Line Value: null
  misc_feature: MA Experiment ID: 20000087 Result: Down-regulated in Transcription
  misc_feature: MA Experiment 20000087 PARAMETER Experiment Name: At_100uM_ABA_Mutants_cDNA_P Parameter: Plant Line Value: WS
  misc_feature: MA Experiment 20000087 PARAMETER Experiment Name: At_100uM_ABA_Mutants_cDNA_P Parameter: Timepoint (hr) Value: 6
  misc_feature: MA Experiment 20000087 PARAMETER Experiment Name: At_100uM_ABA_Mutants_cDNA_P Parameter: Tissue Value: Aerial
  misc_feature: MA Experiment 20000087 PARAMETER Experiment Name: At_100uM_ABA_Mutants_cDNA_P Parameter: Treatment Value: 100uM ABA vs. No Treatment
  misc_feature: MA Experiment ID: 20000179 Result: Up-regulated in Transcription
  misc_feature: MA Experiment 20000179 PARAMETER Experiment Name: At_Germinating_Seeds_P Parameter: Age (hr) Value: 6 vs. 0
  misc_feature: MA Experiment 20000179 PARAMETER Experiment Name: At_Germinating_Seeds_P Parameter: Tissue Value: Germinating Seeds
  misc_feature: MA Experiment ID: 20000180 Result: Up-regulated in Transcription
  misc_feature: MA Experiment 20000180 PARAMETER Experiment Name: At_Germinating_Seeds_P Parameter: Age (hr) Value: 24 vs. 0
  misc_feature: MA Experiment 20000180 PARAMETER Experiment Name: At_Germinating_Seeds_P Parameter: Tissue Value: Germinating Seeds
  misc_feature: MA Experiment ID: 20000234 Result: Up-regulated in Transcription
  misc_feature: MA Experiment 20000234 PARAMETER Experiment Name: At_Siliques_P Parameter: Age (day) Value: 21
  misc_feature: MA Experiment 20000234 PARAMETER Experiment Name: At_Siliques_P Parameter: Organism Value: A. thaliana
  misc_feature: MA Experiment 20000234 PARAMETER Experiment Name: At_Siliques_P Parameter: Plant Line Value: WS
  misc_feature: MA Experiment 20000234 PARAMETER Experiment Name: At_Siliques_P Parameter: Tissue Value: Less Than 5mm Siliques vs. Whole Plant
  misc_feature: MA Experiment ID: 20000235 Result: Up-regulated in Transcription
  misc_feature: MA Experiment 20000235 PARAMETER Experiment Name: At_Siliques_P Parameter: Age (day) Value: 21
  misc_feature: MA Experiment 20000235 PARAMETER Experiment Name: At_Siliques_P Parameter: Organism Value: A. thaliana
  misc_feature: MA Experiment 20000235 PARAMETER Experiment Name: At_Siliques_P Parameter: Plant Line Value: WS
  misc_feature: MA Experiment 20000235 PARAMETER Experiment Name: At_Siliques_P Parameter: Tissue Value: 5-10mm Siliques vs. Whole Plant
  misc_feature: MA Experiment ID: 20001906 Result: Down-regulated in Transcription
  misc_feature: MA Experiment 20001906 PARAMETER Experiment Name: At_Drought_Reproduction_P Parameter: Age (day) Value: 35
  misc_feature: MA Experiment 20001906 PARAMETER Experiment Name: At_Drought_Reproduction_P Parameter: Organism Value: A. thaliana
  misc_feature: MA Experiment 20001906 PARAMETER Experiment Name: At_Drought_Reproduction_P Parameter: Plant Line Value: WS
  misc_feature: MA Experiment 20001906 PARAMETER Experiment Name: At_Drought_Reproduction_P Parameter: Timepoint (day) Value: 5
  misc_feature: MA Experiment 20001906 PARAMETER Experiment Name: At_Drought_Reproduction_P Parameter: Tissue Value: Siliques
  misc_feature: MA Experiment 20001906 PARAMETER Experiment Name: At_Drought_Reproduction_P Parameter: Treatment Value: Drought vs. No Drought
aacaaacaaacaaaaacacaccaattccttcattcatcttctccatttcgtaattcgtacacttcactctcaagtctctctaagccacaaaccactgaagaagaatccatctaagagctgttaaaaattgatgaagcttcgaatatgaagaaattgaaaagctattacatgcaagttcgtaaccagcaacaatctcttgaccgaaaatggattcttccattagcaatcggatccatttgttctctctttctcttgttgctaacgaacttagcttcttcttctggtcaaactcgtttgattccattttcagtttacggatttagatcctccgtcttcgtcgaatccaagataaatccagtatccgtctcactcaccgtctccgtctctcctcctccgccgccacgtctcgcttatctaatctccggctcctctggtgacggtcagatgctgaaacgaactctaatggcgctttatcatcccaacaaccagtacgttgttcatctcgatcgggaatcttcaccggaggaacgattggatctcagtggttttgtggcgaatcatactctgtttcagagatttcaaaatgttcggatgattgttaaggctaatttcgttacgtatcgtggtccaactatggtggctaatacacttcacgctgcagcgattttgcttcgtgaaggtggtgattgggattggttcatcaatctcagtgcctctgattatcctctcgtaacacaagatgatctgttgcatacgttttcgtatcttcctcgagatctcaatttcatcgatcatacaagcaacattggctggaaagagtctcatagagcaaagcctataattattgatcctggtttgtatatgtcaaagaaagctgatgttttctgggtttcacagaagagaagtatgcctacagctttcaaactcttcacaggatctgcgtggatgatgttatctagaccttttgtggattatttcatatggggatgggataatcttcctcgaattgtgttaatgtattacgcaaacttcctttcatcgccagaaggttacttccacactgtgatttgcaatgctcgagagtttaccaacacaacggttaacagtgacttacatttcatctcatgggacaatcctccaaagcaacatcctcaccatcttacattagatgatttccagagaatggtggacagtaacgctccttttgctaggaaattccgtagagatgagcctgttctcgataagattgattcggaactattgtttcggagtcacgggatggtcactccgggtggttggtgtattggtacgagggaaaacgggagcgatccgtgtgcggtgattggtgatacgtcggttattaaacctggtcttggagctaaacggatcgagaaactcataacttatttgttatctactgagaatttcagaccacggcaatgccggtaatggcaaattagagttttgtcatagagatggttacgtggtttttcacacaaatgaactgtattgattatccgatactttgatatggttgtatagagatctttttggactttcttcatttgagaaagtgcagaaatttcgggaaagatcattgattattggaatttgtcttctattgccgacc

SEQ ID NO: 104454 - protein, 434 aa, Arabidopsis thaliana; identical to SEQ ID NO: 35755
  peptide (1)..(434): Ceres Seq. ID no. 13615002
  misc_feature (88)..(313): Pfam Name: Core-2/I-Branching enzyme Pfam Description: Core-2/I-Branching enzyme
  misc_feature (1)..(434): Homolog of NCBI NO: 15242199 NR Description: N-acetylglucosaminyltransferase family enzyme family) [Arabidopsis thaliana] >gi|11291967|pir||T51450
  misc_feature (1)..(434): Homolog of NCBI NO: 15242532 NR Description: N-acetylglucosaminyltransferase family enzyme family) [Arabidopsis thaliana]
  misc_feature (19)..(433): Homolog of NCBI NO: 15218824 NR Description: N-acetylglucosaminyltransferase family enzyme family) [Arabidopsis thaliana] >gi|7485913|pir||T00906
  misc_feature (17)..(434): Homolog of NCBI NO: 18400725 NR Description: N-acetylglucosaminyltransferase family enzyme family) [Arabidopsis thaliana] >gi|9294262|dbj|BAB02164.1|
  misc_feature (17)..(434): Homolog of NCBI NO: 15146308 NR Description: AT3g15350/K7L4_15 [Arabidopsis thaliana]
  misc_feature (19)..(434): Homolog of NCBI NO: 30687610 NR Description: N-acetylglucosaminyltransferase family
  misc_feature (19)..(433): Homolog of NCBI NO: 15236287 NR Description: N-acetylglucosaminyltransferase family enzyme family) [Arabidopsis thaliana] >gi|25366911|pir||D85042
  misc_feature (50)..(434): Homolog of NCBI NO: 7486258 NR Description: hypothetical protein F27G19.80 - Arabidopsis >gi|4972073|emb|CAB43880.1| putative protein [Arabidopsis >gi|7269602|emb|CAB81398.1| putative protein [Arabidopsis
  misc_feature (18)..(434): Homolog of NCBI NO: 34903664 NR Description: B1015E06.17 [Oryza sativa (japonica
  misc_feature (18)..(433): Homolog of NCBI NO: 15219202 NR Description: N-acetylglucosaminyltransferase family enzyme family) [Arabidopsis thaliana] >gi|25366907|pir||F96571

SEQ ID NO: 104455 - protein, 426 aa, Arabidopsis thaliana; identical to SEQ ID NO: 35756
  peptide (1)..(426): Ceres Seq. ID no. 13615003
  misc_feature (80)..(305): Pfam Name: Core-2/I-Branching enzyme Pfam Description: Core-2/I-Branching enzyme
  misc_feature (1)..(426): Homolog of NCBI NO: 15242199 NR Description: N-acetylglucosaminyltransferase family enzyme family) [Arabidopsis thaliana] >gi|11291967|pir||T51450
  misc_feature (1)..(426): Homolog of NCBI NO: 15242532 NR Description: N-acetylglucosaminyltransferase family enzyme family) [Arabidopsis thaliana]
  misc_feature (11)..(425): Homolog of NCBI NO: 15218824 NR Description: N-acetylglucosaminyltransferase family enzyme family) [Arabidopsis thaliana] >gi|7485913|pir||T00906
  misc_feature (9)..(426): Homolog of NCBI NO: 18400725 NR Description: N-acetylglucosaminyltransferase family enzyme family) [Arabidopsis thaliana] >gi|9294262|dbj|BAB02164.1|
  misc_feature (9)..(426): Homolog of NCBI NO: 15146308 NR Description: AT3g15350/K7L4_15 [Arabidopsis thaliana]
  misc_feature (11)..(426): Homolog of NCBI NO: 30687610 NR Description: N-acetylglucosaminyltransferase family
  misc_feature (11)..(425): Homolog of NCBI NO: 15236287 NR Description: N-acetylglucosaminyltransferase family enzyme family) [Arabidopsis thaliana] >gi|25366911|pir||D85042
  misc_feature (42)..(426): Homolog of NCBI NO: 7486258 NR Description: hypothetical protein F27G19.80 - Arabidopsis >gi|4972073|emb|CAB43880.1| putative protein [Arabidopsis >gi|7269602|emb|CAB81398.1| putative protein [Arabidopsis
  misc_feature (10)..(426): Homolog of NCBI NO: 34903664 NR Description: B1015E06.17 [Oryza sativa (japonica
  misc_feature (10)..(425): Homolog of NCBI NO: 15219202 NR Description: N-acetylglucosaminyltransferase family enzyme family) [Arabidopsis thaliana] >gi|25366907|pir||F96571

SEQ ID NO: 104456 - protein, 334 aa, Arabidopsis thaliana; identical to SEQ ID NO: 35757
  peptide (1)..(334): Ceres Seq. ID no. 13615004
  misc_feature (1)..(213): Pfam Name: Core-2/I-Branching enzyme Pfam Description: Core-2/I-Branching enzyme
  misc_feature (1)..(334): Homolog of NCBI NO: 15242199 NR Description: N-acetylglucosaminyltransferase family enzyme family) [Arabidopsis thaliana] >gi|11291967|pir||T51450
  misc_feature (1)..(334): Homolog of NCBI NO: 15242532 NR Description: N-acetylglucosaminyltransferase family enzyme family) [Arabidopsis thaliana]
  misc_feature (1)..(333): Homolog of NCBI NO: 15218824 NR Description: N-acetylglucosaminyltransferase family enzyme family) [Arabidopsis thaliana] >gi|7485913|pir||T00906
  misc_feature (1)..(334): Homolog of NCBI NO: 18400725 NR Description: N-acetylglucosaminyltransferase family enzyme family) [Arabidopsis thaliana] >gi|9294262|dbj|BAB02164.1|
  misc_feature (1)..(334): Homolog of NCBI NO: 15146308 NR Description: AT3g15350/K7L4_15 [Arabidopsis thaliana]
  misc_feature (1)..(334): Homolog of NCBI NO: 30687610 NR Description: N-acetylglucosaminyltransferase family
  misc_feature (1)..(333): Homolog of NCBI NO: 15236287 NR Description: N-acetylglucosaminyltransferase family enzyme family) [Arabidopsis thaliana] >gi|25366911|pir||D85042
  misc_feature (1)..(334): Homolog of NCBI NO: 7486258 NR Description: hypothetical protein F27G19.80 - Arabidopsis >gi|4972073|emb|CAB43880.1| putative protein [Arabidopsis >gi|7269602|emb|CAB81398.1| putative protein [Arabidopsis
  misc_feature (1)..(334): Homolog of NCBI NO: 34903664 NR Description: B1015E06.17 [Oryza sativa (japonica
  misc_feature (1)..(333): Homolog of NCBI NO: 15219202 NR Description: N-acetylglucosaminyltransferase family enzyme family) [Arabidopsis thaliana] >gi|25366907|pir||F96571

SEQ ID NO: 104457 - DNA, 1235 bp, Arabidopsis thaliana
  misc_feature (1)..(1235): Ceres Seq. ID no. 13615005
  misc_feature: MA Experiment ID: 108576 Result: Up-regulated in Transcription
  misc_feature: MA Experiment 108576 PARAMETER Experiment Name: At_42deg_Heat_cDNA_P Parameter: Temperature (deg C) Value: 42 vs. 22
  misc_feature: MA Experiment 108576 PARAMETER Experiment Name: At_42deg_Heat_cDNA_P Parameter: Timepoint (hr) Value: 1
  misc_feature: MA Experiment 108576 PARAMETER Experiment Name: At_42deg_Heat_cDNA_P Parameter: Tissue Value: Aerial
  misc_feature: MA Experiment ID: 20000171 Result: Up-regulated in Transcription
  misc_feature: MA Experiment 20000171 PARAMETER Experiment Name: At_42deg_Heat_P Parameter: Age (day) Value: 14
  misc_feature: MA Experiment 20000171 PARAMETER Experiment Name: At_42deg_Heat_P Parameter: Organism Value: A. thaliana
  misc_feature: MA Experiment 20000171 PARAMETER Experiment Name: At_42deg_Heat_P Parameter: Plant Line Value: WS
  misc_feature: MA Experiment 20000171 PARAMETER Experiment Name: At_42deg_Heat_P Parameter: Temperature (deg C) Value: 42 vs. 22
  misc_feature: MA Experiment 20000171 PARAMETER Experiment Name: At_42deg_Heat_P Parameter: Timepoint (hr) Value: 1
  misc_feature: MA Experiment 20000171 PARAMETER Experiment Name: At_42deg_Heat_P Parameter: Tissue Value: Aerial
  misc_feature: MA Experiment ID: 20000173 Result: Up-regulated in Transcription
  misc_feature: MA Experiment 20000173 PARAMETER Experiment Name: At_42deg_Heat_P Parameter: Age (day) Value: 14
  misc_feature: MA Experiment 20000173 PARAMETER Experiment Name: At_42deg_Heat_P Parameter: Organism Value: A. thaliana
  misc_feature: MA Experiment 20000173 PARAMETER Experiment Name: At_42deg_Heat_P Parameter: Plant Line Value: WS
  misc_feature: MA Experiment 20000173 PARAMETER Experiment Name: At_42deg_Heat_P Parameter: Temperature (deg C) Value: 42 vs. 22
  misc_feature: MA Experiment 20000173 PARAMETER Experiment Name: At_42deg_Heat_P Parameter: Timepoint (hr) Value: 6
  misc_feature: MA Experiment 20000173 PARAMETER Experiment Name: At_42deg_Heat_P Parameter: Tissue Value: Aerial
  misc_feature: MA Experiment ID: 20000184 Result: Up-regulated in Transcription
  misc_feature: MA Experiment 20000184 PARAMETER Experiment Name: At_Shoots__P Parameter: Age (day) Value: 7
  misc_feature: MA Experiment 20000184 PARAMETER Experiment Name: At_Shoots__P Parameter: Tissue Value: Shoots vs. Whole Plant
  misc_feature: MA Experiment ID: 20000185 Result: Up-regulated in Transcription
  misc_feature: MA Experiment 20000185 PARAMETER Experiment Name: At_Roots__P Parameter: Age (day) Value: 7 vs. 21
  misc_feature: MA Experiment 20000185 PARAMETER Experiment Name: At_Roots__P Parameter: Organism Value: A. thaliana
  misc_feature: MA Experiment 20000185 PARAMETER Experiment Name: At_Roots__P Parameter: Tissue Value: Roots vs. Whole Plant
  misc_feature: MA Experiment ID: 20000234 Result: Up-regulated in Transcription
  misc_feature: MA Experiment 20000234 PARAMETER Experiment Name: At_Siliques_P Parameter: Age (day) Value: 21
  misc_feature: MA Experiment 20000234 PARAMETER Experiment Name: At_Siliques_P Parameter: Organism Value: A. thaliana
  misc_feature: MA Experiment 20000234 PARAMETER Experiment Name: At_Siliques_P Parameter: Plant Line Value: WS
  misc_feature: MA Experiment 20000234 PARAMETER Experiment Name: At_Siliques_P Parameter: Tissue Value: Less Than 5mm Siliques vs. Whole Plant
  misc_feature: MA Experiment ID: 20000235 Result: Up-regulated in Transcription
  misc_feature: MA Experiment 20000235 PARAMETER Experiment Name: At_Siliques_P Parameter: Age (day) Value: 21
  misc_feature: MA Experiment 20000235 PARAMETER Experiment Name: At_Siliques_P Parameter: Organism Value: A. thaliana
  misc_feature: MA Experiment 20000235 PARAMETER Experiment Name: At_Siliques_P Parameter: Plant Line Value: WS
  misc_feature: MA Experiment 20000235 PARAMETER Experiment Name: At_Siliques_P Parameter: Tissue Value: 5-10mm Siliques vs. Whole Plant
  misc_feature: MA Experiment ID: 20000264 Result: Up-regulated in Transcription
  misc_feature: MA Experiment 20000264 PARAMETER Experiment Name: At_Open_Flower_P Parameter: Age (day) Value: 21
  misc_feature: MA Experiment 20000264 PARAMETER Experiment Name: At_Open_Flower_P Parameter: Plant Line Value: WS
  misc_feature: MA Experiment 20000264 PARAMETER Experiment Name: At_Open_Flower_P Parameter: Tissue Value: Open Flower vs. Whole Plant
  misc_feature: MA Experiment ID: 20000265 Result: Up-regulated in Transcription
  misc_feature: MA Experiment 20000265 PARAMETER Experiment Name: At_Open_Flower_P Parameter: Age (day) Value: 21
  misc_feature: MA Experiment 20000265 PARAMETER Experiment Name: At_Open_Flower_P Parameter: Plant Line Value: WS
  misc_feature: MA Experiment 20000265 PARAMETER Experiment Name: At_Open_Flower_P Parameter: Tissue Value: Closed Flower vs. Whole Plant
  misc_feature: MA Experiment ID: 20000439 Result: Up-regulated in Transcription
  misc_feature: MA Experiment 20000439 PARAMETER Experiment Name: At_Roots__P Parameter: Age (day) Value: 14 vs. 21
  misc_feature: MA Experiment 20000439 PARAMETER Experiment Name: At_Roots__P Parameter: Organism Value: A. thaliana
  misc_feature: MA Experiment 20000439 PARAMETER Experiment Name: At_Roots__P Parameter: Tissue Value: Roots vs. Whole Plant
  misc_feature: MA Experiment ID: 20001248 Result: Down-regulated in Transcription
  misc_feature: MA Experiment 20001248 PARAMETER Experiment Name: At_Far-red-induction_P Parameter: Age (day) Value: 7
  misc_feature: MA Experiment 20001248 PARAMETER Experiment Name: At_Far-red-induction_P Parameter: Light Value: Far-red vs. White
  misc_feature: MA Experiment 20001248 PARAMETER Experiment Name: At_Far-red-induction_P Parameter: Organism Value: A. thaliana
  misc_feature: MA Experiment 20001248 PARAMETER Experiment Name: At_Far-red-induction_P Parameter: Plant Line Value: Columbia
  misc_feature: MA Experiment 20001248 PARAMETER Experiment Name: At_Far-red-induction_P Parameter: Timepoint (hr) Value: 4
  misc_feature: MA Experiment 20001248 PARAMETER Experiment Name: At_Far-red-induction_P Parameter: Tissue Value: Whole Plant
  misc_feature: MA Experiment ID: 20001560 Result: Up-regulated in Transcription
  misc_feature: MA Experiment 20001560 PARAMETER Experiment Name: At_Drought_Soil_Dry_P Parameter: Age (day) Value: 28
  misc_feature: MA Experiment 20001560 PARAMETER Experiment Name: At_Drought_Soil_Dry_P Parameter: Organism Value: A. thaliana
  misc_feature: MA Experiment 20001560 PARAMETER Experiment Name: At_Drought_Soil_Dry_P Parameter: Plant Line Value: WS
  misc_feature: MA Experiment 20001560 PARAMETER Experiment Name: At_Drought_Soil_Dry_P Parameter: Post Timepoint (hr) Value: None
  misc_feature: MA Experiment 20001560 PARAMETER Experiment Name: At_Drought_Soil_Dry_P Parameter: Post-Treatment Value: None
  misc_feature: MA Experiment 20001560 PARAMETER Experiment Name: At_Drought_Soil_Dry_P Parameter: Timepoint (day) Value: 14
  misc_feature: MA Experiment 20001560 PARAMETER Experiment Name: At_Drought_Soil_Dry_P Parameter: Treatment Value: Drought vs. No Drought
cagaatcctccattactcttcttctcgacttcggaatctttcaaagcttcttcgatttttccagaggcaatcatggttaaaggtccaggactctacactgaaatcggcaaaaaggccagagatcttctgtacagggattaccaaggagaccagaaattcagtgtcaccacttactcttcaactggtgttgcgatcactacaacgggaacaaacaaaggaagcttgtttttgggtgatgttgctacccaagtgaagaacaacaacttcactgctgatgtcaaagtttccactgattcttctcttttgaccactcttacctttgatgagcctgcccctggactgaaagttattgttcaggctaagttgcccgatcacaaatctggaaaggctgaggttcagtatttccatgactatgctggtatctctaccagcgttggattcacagctaccccgattgtcaacttctccggtgtggttggaaccaatggtttgtctcttggtactgatgtggcctataacaccgaatctggcaacttcaaacatttcaatgctggtttcaacttcaccaaggatgatttgactgcttccctcattctgaatgacaaaggtgagaaattgaatgcatcctactaccagattgtgagcccgtcgactgtggttggagctgagattagccacaacttcacgaccaaagagaacgccatcactgtcggaactcaacacgcgcttgacccattgaccacagtgaaggcaagagtgaacaatgctggtgtggctaacgctctgatccaacatgagtggcgtccaaagtcgttcttcaccgtttctggagaggttgattctaaggcgatcgataagagtgccaaggttgggattgctctcgctctcaagccctgagaagataccaccaaatgggccctgaagtgggtagaataggtgttatttctttttcgtcttcaaatctttggacaaatcgctgtctggtttgctaaacaatctttcatttgttttttttgttcggtgttgggatttgtagaaaataaaagagaaaaatactattgaaaggatcgtctttgacgataaagaaccattaagatcgttttacttggctctctctcttttattttccgcctctgctacaatactctgttccatatcttttacttggttctctcttttattttctgcctctgctatactttgttccatttggagttcccttagtggatttttct

SEQ ID NO: 104458 - protein, 298 aa, Arabidopsis thaliana
  peptide (1)..(298): Ceres Seq. ID no. 13615006
  misc_feature (28)..(291): Pfam Name: Eukaryotic porin Pfam Description: Eukaryotic porin
  misc_feature (25)..(298): Homolog of NCBI NO: 15242210 NR Description: voltage-dependent anion-selective channel protein [Arabidopsis thaliana] >gi|25091001|sp|Q9SMX3|POR2_ARATH Outer
  misc_feature (25)..(298): Homolog of NCBI NO: 21553387 NR Description: voltage-dependent anion-selective channel protein
  misc_feature (25)..(298): Homolog of NCBI NO: 5031279 NR Description: porin [Prunus armeniaca]
  misc_feature (25)..(298): Homolog of NCBI NO: 36957170 NR Description: VDAC1.1 [Lotus corniculatus var. japonicus]
  misc_feature (25)..(298): Homolog of NCBI NO: 36957183 NR Description: VDAC1.2 [Lotus corniculatus var. japonicus]
  misc_feature (25)..(298): Homolog of NCBI NO: 1172555 NR Description: 34 kDa outer mitochondrial membrane protein porin
  misc_feature (25)..(298): Homolog of NCBI NO: 15232074 NR Description: porin -related [Arabidopsis thaliana]
  misc_feature (25)..(298): Homolog of NCBI NO: 21593558 NR Description: putative porin [Arabidopsis thaliana]
  misc_feature (25)..(298): Homolog of NCBI NO: 7442953 NR Description: porin - common ice plant
  misc_feature (25)..(298): Homolog of NCBI NO: 1172556 NR Description: 36 kDa outer mitochondrial membrane protein porin
QNPPLLFFSTSESFKASSIFPEAIMVKGPGLYTEIGKKARDLLYRDYQGDQKFSVTTYSSTGVAITTTGTNKGSLFLGDVATQVKNNNFTADVKVSTDSSLLTTLTFDEPAPGLKVIVQAKLPDHKSGKAEVQYFHDYAGISTSVGFTATPIVNFSGVVGTNGLSLGTDVAYNTESGNFKHFNAGFNFTKDDLTASLILNDKGEKLNASYYQIVSPSTVVGAEISHNFTTKENAITVGTQHALDPLTTVKARVNNAGVANALIQHEWRPKSFFTVSGEVDSKAIDKSAKVGIALALKP

SEQ ID NO: 104459 - protein, 274 aa, Arabidopsis thaliana; identical to SEQ ID NO: 26016
  peptide (1)..(274): Ceres Seq. ID no. 13615007
  misc_feature (4)..(267): Pfam Name: Eukaryotic porin Pfam Description: Eukaryotic porin
  misc_feature (1)..(274): Homolog of NCBI NO: 15242210 NR Description: voltage-dependent anion-selective channel protein [Arabidopsis thaliana] >gi|25091001|sp|Q9SMX3|POR2_ARATH Outer
  misc_feature (1)..(274): Homolog of NCBI NO: 21553387 NR Description: voltage-dependent anion-selective channel protein
  misc_feature (1)..(274): Homolog of NCBI NO: 5031279 NR Description: porin [Prunus armeniaca]
  misc_feature (1)..(274): Homolog of NCBI NO: 36957170 NR Description: VDAC1.1 [Lotus corniculatus var. japonicus]
  misc_feature (1)..(274): Homolog of NCBI NO: 36957183 NR Description: VDAC1.2 [Lotus corniculatus var. japonicus]
  misc_feature (1)..(274): Homolog of NCBI NO: 1172555 NR Description: 34 kDa outer mitochondrial membrane protein porin
  misc_feature (1)..(274): Homolog of NCBI NO: 15232074 NR Description: porin -related [Arabidopsis thaliana]
  misc_feature (1)..(274): Homolog of NCBI NO: 21593558 NR Description: putative porin [Arabidopsis thaliana]
  misc_feature (1)..(274): Homolog of NCBI NO: 7442953 NR Description: porin - common ice plant
  misc_feature (1)..(274): Homolog of NCBI NO: 1172556 NR Description: 36 kDa outer mitochondrial membrane protein porin

SEQ ID NO: 104460 - DNA, 1600 bp, Arabidopsis thaliana
  misc_feature (1)..(1600): Ceres Seq. ID no. 13615008
  misc_feature: MA Experiment ID: 108595 Result: Up-regulated in Transcription
  misc_feature: MA Experiment 108595 PARAMETER Experiment Name: At_Ler-pi_Ovule_cDNA_P Parameter: Plant Line Value: null
  misc_feature: MA Experiment ID: 20000234 Result: Up-regulated in Transcription
  misc_feature: MA Experiment 20000234 PARAMETER Experiment Name: At_Siliques_P Parameter: Age (day) Value: 21
  misc_feature: MA Experiment 20000234 PARAMETER Experiment Name: At_Siliques_P Parameter: Organism Value: A. thaliana
  misc_feature: MA Experiment 20000234 PARAMETER Experiment Name: At_Siliques_P Parameter: Plant Line Value: WS
  misc_feature: MA Experiment 20000234 PARAMETER Experiment Name: At_Siliques_P Parameter: Tissue Value: Less Than 5mm Siliques vs. Whole Plant
  misc_feature: MA Experiment ID: 20000235 Result: Up-regulated in Transcription
  misc_feature: MA Experiment 20000235 PARAMETER Experiment Name: At_Siliques_P Parameter: Age (day) Value: 21
  misc_feature: MA Experiment 20000235 PARAMETER Experiment Name: At_Siliques_P Parameter: Organism Value: A. thaliana
  misc_feature: MA Experiment 20000235 PARAMETER Experiment Name: At_Siliques_P Parameter: Plant Line Value: WS
  misc_feature: MA Experiment 20000235 PARAMETER Experiment Name: At_Siliques_P Parameter: Tissue Value: 5-10mm Siliques vs. Whole Plant
  misc_feature: MA Experiment ID: 20000264 Result: Up-regulated in Transcription
  misc_feature: MA Experiment 20000264 PARAMETER Experiment Name: At_Open_Flower_P Parameter: Age (day) Value: 21
  misc_feature: MA Experiment 20000264 PARAMETER Experiment Name: At_Open_Flower_P Parameter: Plant Line Value: WS
  misc_feature: MA Experiment 20000264 PARAMETER Experiment Name: At_Open_Flower_P Parameter: Tissue Value: Open Flower vs. Whole Plant
  misc_feature: MA Experiment ID: 20000265 Result: Up-regulated in Transcription
  misc_feature: MA Experiment 20000265 PARAMETER Experiment Name: At_Open_Flower_P Parameter: Age (day) Value: 21
  misc_feature: MA Experiment 20000265 PARAMETER Experiment Name: At_Open_Flower_P Parameter: Plant Line Value: WS
  misc_feature: MA Experiment 20000265 PARAMETER Experiment Name: At_Open_Flower_P Parameter: Tissue Value: Closed Flower vs. Whole Plant
  misc_feature: MA Experiment ID: 20000286 Result: Up-regulated in Transcription
  misc_feature: MA Experiment 20000286 PARAMETER Experiment Name: At_Open_Flower_P Parameter: Age (day) Value: 21
  misc_feature: MA Experiment 20000286 PARAMETER Experiment Name: At_Open_Flower_P Parameter: Plant Line Value: WS
  misc_feature: MA Experiment 20000286 PARAMETER Experiment Name: At_Open_Flower_P Parameter: Tissue Value: Half Open vs. Whole Plant
  misc_feature: MA Experiment ID: 20001757 Result: Down-regulated in Transcription
  misc_feature: MA Experiment 20001757 PARAMETER Experiment Name: At_50mM_NH4NO3_L-to-H_P Parameter: Timepoint (hr) Value: 6
  misc_feature: MA Experiment 20001757 PARAMETER Experiment Name: At_50mM_NH4NO3_L-to-H_P Parameter: Tissue Value: Leaf
  misc_feature: MA Experiment 20001757 PARAMETER Experiment Name: At_50mM_NH4NO3_L-to-H_P Parameter: Treatment Value: 50mM NH4NO3 vs 100mM Mannitol
  misc_feature: MA Experiment ID: 20001909 Result: Up-regulated in Transcription
  misc_feature: MA Experiment 20001909 PARAMETER Experiment Name: At_Drought_Reproduction_P Parameter: Age (day) Value: 35
  misc_feature: MA Experiment 20001909 PARAMETER Experiment Name: At_Drought_Reproduction_P Parameter: Organism Value: A. thaliana
  misc_feature: MA Experiment 20001909 PARAMETER Experiment Name: At_Drought_Reproduction_P Parameter: Plant Line Value: WS
  misc_feature: MA Experiment 20001909 PARAMETER Experiment Name: At_Drought_Reproduction_P Parameter: Timepoint (day) Value: 5
  misc_feature: MA Experiment 20001909 PARAMETER Experiment Name: At_Drought_Reproduction_P Parameter: Tissue Value: Flowers
  misc_feature: MA Experiment 20001909 PARAMETER Experiment Name: At_Drought_Reproduction_P Parameter: Treatment Value: Drought vs. No Drought
  misc_feature: MA Experiment ID: 20001910 Result: Up-regulated in Transcription
  misc_feature: MA Experiment 20001910 PARAMETER Experiment Name: At_Drought_Reproduction_P Parameter: Age (day) Value: 37
  misc_feature: MA Experiment 20001910 PARAMETER Experiment Name: At_Drought_Reproduction_P Parameter: Organism Value: A. thaliana
  misc_feature: MA Experiment 20001910 PARAMETER Experiment Name: At_Drought_Reproduction_P Parameter: Plant Line Value: WS
  misc_feature: MA Experiment 20001910 PARAMETER Experiment Name: At_Drought_Reproduction_P Parameter: Timepoint (day) Value: 7
  misc_feature: MA Experiment 20001910 PARAMETER Experiment Name: At_Drought_Reproduction_P Parameter: Tissue Value: Flowers
  misc_feature: MA Experiment 20001910 PARAMETER Experiment Name: At_Drought_Reproduction_P Parameter: Treatment Value: Drought vs. No Drought
atggcgagaagttctgttttgctatgtttaattctattggttacgttaggagttgtgataagtgtcacatttgccgacaacgttgaattgaaatcaaaagatctagagagcagtaagaaagataagaaggttgatcatgatagtacacacaaagagaagggaggtgaaaaggtagatggtgccggttctgatgatgaagacaacgataaaaaagaaaaaaagaaagagcatgatgtgcaaaaaaaggataaacaacatgaaaacaaagacaaggatgacgagaagaagcatgttgataagaagaagagcggtggtcatgataaagatgatgatgatgaaaagaagcacaaggataaaaagaaggatggacacaatgatgatgatgatagtgatgatgatacggatgatgacgatgacgatgatgatgatgatgatgatgatgatgaagttgatggagatgataatgagaaggagaaaattgggttatacgagctcaagaagggaaatctaactgtcaaattcacaaattggggtgcttcaatcatatctctccatttcccagacaaaaatggtaaaatggacgatattgttcttggctatgatagcgtcaaaacctacaagaccgacaaggtttatttcggagcaaccgttggccgagtagcaaatagaataggaaagggcaaattcaagttgaatggtaaagagtacaagacaagtgtcaacgatggaaaaaacacactccatggtggcaagaaagggtttggggatgttgtgtgggcagttgcaaaacaccagtacgatggcaagaaaccacacattgtcttcactcacacaagtcctgacggcgatcaagggtttccgggagaactcagtgtcacggtgacatataaacttgtcaaagacaatgaattgagtgtggtgatggaggcaaagcctaaggataaagcaactccggtgaacttagctcatcatagttattggaatcttggtggtcataattccggagatattttgtctgaagaaattcaaatcctcggctcgggttatacccccgtcgacggtgagctcattcccaccgggaaaatcaatccggtgaaaggaacagcatacgattttctccaactccgtcctattaaagataatatgaaggatcttaaaacaggatatgatataaattattgcttagatggtaaggcaaaaaagatgagaaaaatagttgaactcgtagataagaaatcagggaggaaaatggagttatccggaaaccaagcgggtttgcaattctataccggagggatgttaaaggatgtcaaagggaagaatggggcagtttaccaagctttcgggggattatgtttagaaacacaaagttatccagacgcattgaaccatcccaaatttccttcacagattgtcgagccagggaaaaaatacaaacacactatgctcttcaagttttctattgtttcatagattgttttagatgttgttacatgaacacccttggaaccatgtccaatgttcatgaacaagaaactaaatacattgtaatattttgtaacaatgcttaaattatcaaattatatgaacctaacgtgaa

SEQ ID NO: 104461 - protein, 490 aa, Arabidopsis thaliana; identical to SEQ ID NO: 27108
  peptide (1)..(490): Ceres Seq. ID no. 13615009
  misc_feature (161)..(485): Pfam Name: Aldose 1-epimerase Pfam Description: Aldose 1-epimerase
  misc_feature (1)..(490): Homolog of NCBI NO: 15242223 NR Description: aldose 1-epimerase family [Arabidopsis thaliana]
  misc_feature (193)..(490): Homolog of NCBI NO: 26452398 NR Description: putative aldose 1-epimerase [Arabidopsis thaliana]
  misc_feature (158)..(487): Homolog of NCBI NO: 15228261 NR Description: aldose 1-epimerase family [Arabidopsis thaliana]
  misc_feature (158)..(487): Homolog of NCBI NO: 21537069 NR Description: aldose 1-epimerase-like protein [Arabidopsis
  misc_feature (159)..(488): Homolog of NCBI NO: 15824567 NR Description: non-cell-autonomous protein pathway2;
  misc_feature (159)..(488): Homolog of NCBI NO: 15824565 NR Description: non-cell-autonomous protein pathway1;
  misc_feature (159)..(488): Homolog of NCBI NO: 7430313 NR Description: probable aldose 1-epimerase (EC 5.1.3.3) - common
  misc_feature (157)..(488): Homolog of NCBI NO: 40882679 NR Description: putative aldose 1-epimerase [Oryza sativa
  misc_feature (119)..(489): Homolog of NCBI NO: 15232072 NR Description: aldose 1-epimerase family [Arabidopsis thaliana]
  misc_feature (199)..(447): Homolog of NCBI NO: 6094558 NR Description: putative aldose 1-epimerase, 3' partial

SEQ ID NO: 104462 - protein, 298 aa, Arabidopsis thaliana; identical to SEQ ID NO: 27109
  peptide (1)..(298): Ceres Seq. ID no. 13615010
  misc_feature (1)..(293): Pfam Name: Aldose 1-epimerase Pfam Description: Aldose 1-epimerase
  misc_feature (1)..(298): Homolog of NCBI NO: 15242223 NR Description: aldose 1-epimerase family [Arabidopsis thaliana]
  misc_feature (1)..(298): Homolog of NCBI NO: 26452398 NR Description: putative aldose 1-epimerase [Arabidopsis thaliana]
  misc_feature (1)..(295): Homolog of NCBI NO: 15228261 NR Description: aldose 1-epimerase family [Arabidopsis thaliana]
  misc_feature (1)..(295): Homolog of NCBI NO: 21537069 NR Description: aldose 1-epimerase-like protein [Arabidopsis
  misc_feature (1)..(296): Homolog of NCBI NO: 15824567 NR Description: non-cell-autonomous protein pathway2;
  misc_feature (1)..(296): Homolog of NCBI NO: 15824565 NR Description: non-cell-autonomous protein pathway1;
  misc_feature (1)..(296): Homolog of NCBI NO: 7430313 NR Description: probable aldose 1-epimerase (EC 5.1.3.3) - common
  misc_feature (1)..(296): Homolog of NCBI NO: 40882679 NR Description: putative aldose 1-epimerase [Oryza sativa
  misc_feature (1)..(297): Homolog of NCBI NO: 15232072 NR Description: aldose 1-epimerase family [Arabidopsis thaliana]
  misc_feature (7)..(255): Homolog of NCBI NO: 6094558 NR Description: putative aldose 1-epimerase, 3' partial

SEQ ID NO: 104463 - DNA, 1344 bp, Arabidopsis thaliana
  misc_feature (1)..(1344): Ceres Seq. ID no. 13615019
  misc_feature: MA Experiment ID: 108576 Result: Up-regulated in Transcription
  misc_feature: MA Experiment 108576 PARAMETER Experiment Name: At_42deg_Heat_cDNA_P Parameter: Temperature (deg C) Value: 42 vs. 22
  misc_feature: MA Experiment 108576 PARAMETER Experiment Name: At_42deg_Heat_cDNA_P Parameter: Timepoint (hr) Value: 1
  misc_feature: MA Experiment 108576 PARAMETER Experiment Name: At_42deg_Heat_cDNA_P Parameter: Tissue Value: Aerial
  misc_feature: MA Experiment ID: 108595 Result: Down-regulated in Transcription
  misc_feature: MA Experiment 108595 PARAMETER Experiment Name: At_Ler-pi_Ovule_cDNA_P Parameter: Plant Line Value: null
  misc_feature: MA Experiment ID: 20000171 Result: Down-regulated in Transcription
  misc_feature: MA Experiment 20000171 PARAMETER Experiment Name: At_42deg_Heat_P Parameter: Age (day) Value: 14
  misc_feature: MA Experiment 20000171 PARAMETER Experiment Name: At_42deg_Heat_P Parameter: Organism Value: A. thaliana
  misc_feature: MA Experiment 20000171 PARAMETER Experiment Name: At_42deg_Heat_P Parameter: Plant Line Value: WS
  misc_feature: MA Experiment 20000171 PARAMETER Experiment Name: At_42deg_Heat_P Parameter: Temperature (deg C) Value: 42 vs. 22
  misc_feature: MA Experiment 20000171 PARAMETER Experiment Name: At_42deg_Heat_P Parameter: Timepoint (hr) Value: 1
  misc_feature: MA Experiment 20000171 PARAMETER Experiment Name: At_42deg_Heat_P Parameter: Tissue Value: Aerial
  misc_feature: MA Experiment ID: 20000173 Result: Down-regulated in Transcription
  misc_feature: MA Experiment 20000173 PARAMETER Experiment Name: At_42deg_Heat_P Parameter: Age (day) Value: 14
  misc_feature: MA Experiment 20000173 PARAMETER Experiment Name: At_42deg_Heat_P Parameter: Organism Value: A. thaliana
  misc_feature: MA Experiment 20000173 PARAMETER Experiment Name: At_42deg_Heat_P Parameter: Plant Line Value: WS
  misc_feature: MA Experiment 20000173 PARAMETER Experiment Name: At_42deg_Heat_P Parameter: Temperature (deg C) Value: 42 vs. 22
  misc_feature: MA Experiment 20000173 PARAMETER Experiment Name: At_42deg_Heat_P Parameter: Timepoint (hr) Value: 6
  misc_feature: MA Experiment 20000173 PARAMETER Experiment Name: At_42deg_Heat_P Parameter: Tissue Value: Aerial
ggagtagaaaaaattaaagctttgagatttctttccttatcgatttttctctccgcgaattgttcgttgttttcttctggcacctgattctcatcttctttcttgtggaatctgggttttgttgcggagttttcgaggttcctcattcgttgcttctgttgaaactctcttttttttttgggtggtttactttgtttttttgttgttgttgctttcaacctttaaatgccctaattttgaggttctagttgtggtttttaagattaggagcagaagccctttcgactaaagttcatgttagctgcaatttgctgaagtattcacagttttgttctgttggaagctctatgtgtttccttctgtgattgaaacacagagagaatgattttaccaaagcagtattgttgcacacactcgccgagctgccaatgcaccaaaggccatttaaacgaagacgtgttgttattagtgttccaacatttgaattggaatccgaaattagttgcaacactttcctgtgtatgcagatggtttgatgatttcgccaaacgggtactatggaaagagttttgcaagactcgtgccccaaaaatgatgcttgatttgcagtctagcggtagtcactgcattgacggtaactggcgagcccttgggaagcttctcatctactgctcaggatgtacacaaggtggtcttttcaatagctctgttcaaatcccaggccactttgtttatagaacccggttctcaagaacattaggaagaagcctccttccgcctcagtgtagaactgatgtactctatgtttgtgatccatgcgagcatcttgaccaaggagaagaaggcgacgtgggtttgttccgtgggattttcaagtcattcccaacatcgaaagttcggaaagtgatcattaacaaggcggttccttttcatccatccgaggtttgcccgtattgtaaagctaagctatggagcatgctacaagctaagataatacctcagagtgcctgcattcgtttggaagcttatgaagactgcattgagtattttgtttgccttaatggacatttgctgggtatctgcactctcgcgcctttgtctgattcagaggatgcaattccaagcgaagataacaatcacacagagaagaaacaagacaatggctttcctagagagaacgtattgaaaaggagaaattctttgttgggtggaagtgaaaatggacctccgccgcaaaaacgactgaccaatcctaatcagtgaaacatctgtaaatttgtgtactactgctaaatttattgtatctgcagagattcttcaacattcatatacagtcaaattatg

SEQ ID NO: 104464 - protein, 293 aa, Arabidopsis thaliana; identical to SEQ ID NO: 40686
  peptide (1)..(293): Ceres Seq. ID no. 13615020
  misc_feature (1)..(293): Homolog of NCBI NO: 15242296 NR Description: expressed protein [Arabidopsis thaliana]
  misc_feature (1)..(245): Homolog of NCBI NO: 15241717 NR Description: expressed protein [Arabidopsis thaliana] emb|CAB87751.1~gene_id:MUL8.4~similar to unknown protein thaliana] >gi|18700137|gb|AAL77680.1| AT5g39360/MUL8_40
  misc_feature (1)..(249): Homolog of NCBI NO: 34393587 NR Description: unknown protein [Oryza sativa (japonica
  misc_feature (20)..(281): Homolog of NCBI NO: 14210079 NR Description: circadian clock coupling factor ZGT [Nicotiana
  misc_feature (23)..(252): Homolog of NCBI NO: 11281127 NR Description: hypothetical protein T20O10.160 - Arabidopsis >gi|7573435|emb|CAB87751.1| putative protein [Arabidopsis
  misc_feature (23)..(252): Homolog of NCBI NO: 18412596 NR Description: expressed protein [Arabidopsis thaliana]
  misc_feature (20)..(243): Homolog of NCBI NO: 34908976 NR Description: putative circadian clock coupling factor ZGT
  misc_feature (123)..(239): Homolog of NCBI NO: 15235367 NR Description: F-box protein family [Arabidopsis thaliana]
  misc_feature (24)..(105): Homolog of NCBI NO: 15235367 NR Description: F-box protein family [Arabidopsis thaliana]
  misc_feature (123)..(239): Homolog of NCBI NO: 21553661 NR Description: unknown [Arabidopsis thaliana]

SEQ ID NO: 104465 - protein, 223 aa, Arabidopsis thaliana; identical to SEQ ID NO: 40687
  peptide (1)..(223): Ceres Seq. ID no. 13615021
  misc_feature (1)..(223): Homolog of NCBI NO: 15242296 NR Description: expressed protein [Arabidopsis thaliana]
  misc_feature (1)..(175): Homolog of NCBI NO: 15241717 NR Description: expressed protein [Arabidopsis thaliana] emb|CAB87751.1~gene_id:MUL8.4~similar to unknown protein thaliana] >gi|18700137|gb|AAL77680.1| AT5g39360/MUL8_40
  misc_feature (1)..(179): Homolog of NCBI NO: 34393587 NR Description: unknown protein [Oryza sativa (japonica
  misc_feature (1)..(211): Homolog of NCBI NO: 14210079 NR Description: circadian clock coupling factor ZGT [Nicotiana
  misc_feature (1)..(182): Homolog of NCBI NO: 11281127 NR Description: hypothetical protein T20O10.160 - Arabidopsis >gi|7573435|emb|CAB87751.1| putative protein [Arabidopsis
  misc_feature (1)..(182): Homolog of NCBI NO: 18412596 NR Description: expressed protein [Arabidopsis thaliana]
  misc_feature (1)..(173): Homolog of NCBI NO: 34908976 NR Description: putative circadian clock coupling factor ZGT
  misc_feature (53)..(169): Homolog of NCBI NO: 15235367 NR Description: F-box protein family [Arabidopsis thaliana]
  misc_feature (1)..(35): Homolog of NCBI NO: 15235367 NR Description: F-box protein family [Arabidopsis thaliana]
  misc_feature (53)..(169): Homolog of NCBI NO: 21553661 NR Description: unknown [Arabidopsis thaliana]

SEQ ID NO: 104466 - protein, 222 aa, Arabidopsis thaliana; identical to SEQ ID NO: 40688
  peptide (1)..(222): Ceres Seq. ID no. 13615022
  misc_feature (1)..(222): Homolog of NCBI NO: 15242296 NR Description: expressed protein [Arabidopsis thaliana]
  misc_feature (1)..(174): Homolog of NCBI NO: 15241717 NR Description: expressed protein [Arabidopsis thaliana] emb|CAB87751.1~gene_id:MUL8.4~similar to unknown protein thaliana] >gi|18700137|gb|AAL77680.1| AT5g39360/MUL8_40
  misc_feature (1)..(178): Homolog of NCBI NO: 34393587 NR Description: unknown protein [Oryza sativa (japonica
  misc_feature (1)..(210): Homolog of NCBI NO: 14210079 NR Description: circadian clock coupling factor ZGT [Nicotiana
  misc_feature (1)..(181): Homolog of NCBI NO: 11281127 NR Description: hypothetical protein T20O10.160 - Arabidopsis >gi|7573435|emb|CAB87751.1| putative protein [Arabidopsis
  misc_feature (1)..(181): Homolog of NCBI NO: 18412596 NR Description: expressed protein [Arabidopsis thaliana]
  misc_feature (1)..(172): Homolog of NCBI NO: 34908976 NR Description: putative circadian clock coupling factor ZGT
  misc_feature (52)..(168): Homolog of NCBI NO: 15235367 NR Description: F-box protein family [Arabidopsis thaliana]
  misc_feature (1)..(34): Homolog of NCBI NO: 15235367 NR Description: F-box protein family [Arabidopsis thaliana]
  misc_feature (52)..(168): Homolog of NCBI NO: 21553661 NR Description: unknown [Arabidopsis thaliana]

SEQ ID NO: 104467 - DNA, 1557 bp, Arabidopsis thaliana
  misc_feature (1)..(1557): Ceres Seq. ID no. 13615026
  misc_feature: MA Experiment ID: 108595 Result: Up-regulated in Transcription
  misc_feature: MA Experiment 108595 PARAMETER Experiment Name: At_Ler-pi_Ovule_cDNA_P Parameter: Plant Line Value: null
  misc_feature: MA Experiment ID: 20000144 Result: Up-regulated in Transcription
  misc_feature: MA Experiment 20000144 PARAMETER Experiment Name: At_42deg_Heat_cDNA_P Parameter: Temperature (deg C) Value: 42 vs. 22
  misc_feature: MA Experiment 20000144 PARAMETER Experiment Name: At_42deg_Heat_cDNA_P Parameter: Timepoint (hr) Value: 1
  misc_feature: MA Experiment 20000144 PARAMETER Experiment Name: At_42deg_Heat_cDNA_P Parameter: Tissue Value: Aerial
  misc_feature: MA Experiment ID: 20000173 Result: Up-regulated in Transcription
  misc_feature: MA Experiment 20000173 PARAMETER Experiment Name: At_42deg_Heat_P Parameter: Age (day) Value: 14
  misc_feature: MA Experiment 20000173 PARAMETER Experiment Name: At_42deg_Heat_P Parameter: Organism Value: A. thaliana
  misc_feature: MA Experiment 20000173 PARAMETER Experiment Name: At_42deg_Heat_P Parameter: Plant Line Value: WS
  misc_feature: MA Experiment 20000173 PARAMETER Experiment Name: At_42deg_Heat_P Parameter: Temperature (deg C) Value: 42 vs. 22
  misc_feature: MA Experiment 20000173 PARAMETER Experiment Name: At_42deg_Heat_P Parameter: Timepoint (hr) Value: 6
  misc_feature: MA Experiment 20000173 PARAMETER Experiment Name: At_42deg_Heat_P Parameter: Tissue Value: Aerial
  misc_feature: MA Experiment ID: 20000437 Result: Up-regulated in Transcription
  misc_feature: MA Experiment 20000437 PARAMETER Experiment Name: At_Drought_P Parameter: Age (day) Value: 8
  misc_feature: MA Experiment 20000437 PARAMETER Experiment Name: At_Drought_P Parameter: Organism Value: A. thaliana
  misc_feature: MA Experiment 20000437 PARAMETER Experiment Name: At_Drought_P Parameter: Plant Line Value: WS
  misc_feature: MA Experiment 20000437 PARAMETER Experiment Name: At_Drought_P Parameter: Timepoint (hr) Value: 24
  misc_feature: MA Experiment 20000437 PARAMETER Experiment Name: At_Drought_P Parameter: Tissue Value: Whole Plant
  misc_feature: MA Experiment 20000437 PARAMETER Experiment Name: At_Drought_P Parameter: Treatment Value: Drought vs. No Drought
  misc_feature: MA Experiment ID: 20001905 Result: Up-regulated in Transcription
  misc_feature: MA Experiment 20001905 PARAMETER Experiment Name: At_Drought_Reproduction_P Parameter: Age (day) Value: 40
  misc_feature: MA Experiment 20001905 PARAMETER Experiment Name: At_Drought_Reproduction_P Parameter: Organism Value: A. thaliana
  misc_feature: MA Experiment 20001905 PARAMETER Experiment Name: At_Drought_Reproduction_P Parameter: Plant Line Value: WS
  misc_feature: MA Experiment 20001905 PARAMETER Experiment Name: At_Drought_Reproduction_P Parameter: Timepoint (day) Value: 10
  misc_feature: MA Experiment 20001905 PARAMETER Experiment Name: At_Drought_Reproduction_P Parameter: Tissue Value: Rosettes
  misc_feature: MA Experiment 20001905 PARAMETER Experiment Name: At_Drought_Reproduction_P Parameter: Treatment Value: Drought vs. No Drought
atgaaaaaaaaagctttgaaattctctctcgacaatggtgtcggaccaggatctagcgaaaggagtcgagactttgcttcgacaatccgaccctagctctctcacatcgttaagcagtattgttcagcagcttgaagctaagttagggttagacctcacggagaagacgactttcatcagagatcagatcaatatcctcctccgtgctcaccaaaacccttctgcctccgtcgcctccgcttcatccgtacaacaatctcaccctcctcctccgccgtcttctcaccagcagcagaatttgcattccggcgtcaatgttcctccgatggcgaaagggcatttcacacttagccatccttcgcaattctctgtttcttctcaatcacaacaatatccttcacatttcgctcttcagcctccttatcactcttatgacctaaatttccggcagccttatccggtttacatgccgccgcaacagcaccagcatcagcagcagtctccgcgacaacaacaatcctctgtgatgctctcacatggcgggaatgcttctctatctgttaatcaagccccaaaagaaagtgctccggctggaactaaaagaaagggtggtcctggaggactaaacaaagtctgtagggtttctccagaacttgaagtagttgttggtgaacctgctcttcctagaactgagattgtgaggcaattgtgggcttatataaggaagaataaccttcaagacccgagtaacaagcggaagatcatctgtgatgatgcgttgcgtgtggtttttgagactgattgcactgacatgttcaagatgaataagttgcttgctaagcatattctcccgcttgatccatcaaaggactctggtcaagcaaaaaaggcaaaaactgaggtggagactaagactgagaccaccgagcctattagttcaactgctattagttcaactgttacattatctgagccacttggtaagttctttggcactggtgagacggagatggcagacgaagagattattcgccgtgtttgggaatacataaaactcaacaatttagaggacccagtaaatccaatggctattcagtgtgatgaaaagctccgagatcttcttggatgtgaaagcatttcagctgtggggataaatgagatgctgaggcgccatatgtacaagcagtcgtgatatcttctggtctgacttaattaactaggaactactagtgtgtgtatctagggaacctacttatgactccttgctgtagaactctgatagggaagaaaagatccttttcacttttaacttcctttaatgctattttaatcttccgttgggttctttgttttagttggttgtgtatcgacatgcttaggttgatgttgtatttagtattgtaccgaaactctagtgttaagggtgaaacggcgcagatgttttgtattaaacgccattcacccatgaatgtcttaggaaaaaaaaactcatgtgtttaactatgttttccctgttggaaatatttgcatcctactgatagaaaaatcttattccct

SEQ ID NO: 104468 - protein, 385 aa, Arabidopsis thaliana; identical to SEQ ID NO: 28899
  peptide (1)..(385): Ceres Seq. ID no. 13615027
  misc_feature (1)..(385): Homolog of NCBI NO: 18415906 NR Description: expressed protein [Arabidopsis thaliana] unknown protein [Arabidopsis thaliana]
  misc_feature (1)..(385): Homolog of NCBI NO: 21537175 NR Description: unknown [Arabidopsis thaliana]
  misc_feature (1)..(345): Homolog of NCBI NO: 7486830 NR Description: hypothetical protein T10I14.190 - Arabidopsis >gi|2832686|emb|CAA16786.1| putative protein [Arabidopsis >gi|7269082|emb|CAB79191.1| putative protein [Arabidopsis
  misc_feature (169)..(385): Homolog of NCBI NO: 32488657 NR Description: OSJNBa0087O24.7 [Oryza sativa (japonica
  misc_feature (189)..(383): Homolog of NCBI NO: 15230276 NR Description: hypothetical protein [Arabidopsis thaliana]
  misc_feature (1)..(59): Homolog of NCBI NO: 15230276 NR Description: hypothetical protein [Arabidopsis thaliana]
  misc_feature (181)..(383): Homolog of NCBI NO: 9280327 NR Description: gb|AAD43149.1~gene_id:K13E13.21~strong similarity
  misc_feature (1)..(59): Homolog of NCBI NO: 9280327 NR Description: gb|AAD43149.1~gene_id:K13E13.21~strong similarity
  misc_feature (175)..(298): Homolog of NCBI NO: 15222765 NR Description: hypothetical protein [Arabidopsis thaliana]
  misc_feature (280)..(382): Homolog of NCBI NO: 15222765 NR Description: hypothetical protein [Arabidopsis thaliana]

SEQ ID NO: 104469 - protein, 288 aa, Arabidopsis thaliana; identical to SEQ ID NO: 28900
  peptide (1)..(288): Ceres Seq. ID no. 13615028
  misc_feature (1)..(288): Homolog of NCBI NO: 18415906 NR Description: expressed protein [Arabidopsis thaliana] unknown protein [Arabidopsis thaliana]
  misc_feature (1)..(288): Homolog of NCBI NO: 21537175 NR Description: unknown [Arabidopsis thaliana]
  misc_feature (1)..(248): Homolog of NCBI NO: 7486830 NR Description: hypothetical protein T10I14.190 - Arabidopsis >gi|2832686|emb|CAA16786.1| putative protein [Arabidopsis >gi|7269082|emb|CAB79191.1| putative protein [Arabidopsis
  misc_feature (72)..(288): Homolog of NCBI NO: 32488657 NR Description: OSJNBa0087O24.7 [Oryza sativa (japonica
  misc_feature (92)..(286): Homolog of NCBI NO: 15230276 NR Description: hypothetical protein [Arabidopsis thaliana]
  misc_feature (84)..(286): Homolog of NCBI NO: 9280327 NR Description: gb|AAD43149.1~gene_id:K13E13.21~strong similarity
  misc_feature (78)..(201): Homolog of NCBI NO: 15222765 NR Description: hypothetical protein [Arabidopsis thaliana]
  misc_feature (183)..(285): Homolog of NCBI NO: 15222765 NR Description: hypothetical protein [Arabidopsis thaliana]
  misc_feature (78)..(201): Homolog of NCBI NO: 25405318 NR Description: hypothetical protein F13F21.4 [imported] - thaliana >gi|5430749|gb|AAD43149.1|AC007504_4 Hypothetical
  misc_feature (183)..(285): Homolog of NCBI NO: 25405318 NR Description: hypothetical protein F13F21.4 [imported] - thaliana >gi|5430749|gb|AAD43149.1|AC007504_4 Hypothetical

SEQ ID NO: 104470 - protein, 241 aa, Arabidopsis thaliana; identical to SEQ ID NO: 28901
  peptide (1)..(241): Ceres Seq. ID no. 13615029
  misc_feature (1)..(241): Homolog of NCBI NO: 18415906 NR Description: expressed protein [Arabidopsis thaliana] unknown protein [Arabidopsis thaliana]
  misc_feature (1)..(241): Homolog of NCBI NO: 21537175 NR Description: unknown [Arabidopsis thaliana]
  misc_feature (1)..(201): Homolog of NCBI NO: 7486830 NR Description: hypothetical protein T10I14.190 - Arabidopsis >gi|2832686|emb|CAA16786.1| putative protein [Arabidopsis >gi|7269082|emb|CAB79191.1| putative protein [Arabidopsis
  misc_feature (25)..(241): Homolog of NCBI NO: 32488657 NR Description: OSJNBa0087O24.7 [Oryza sativa (japonica
  misc_feature (45)..(239): Homolog of NCBI NO: 15230276 NR Description: hypothetical protein [Arabidopsis thaliana]
  misc_feature (37)..(239): Homolog of NCBI NO: 9280327 NR Description: gb|AAD43149.1~gene_id:K13E13.21~strong similarity
  misc_feature (31)..(154): Homolog of NCBI NO: 15222765 NR Description: hypothetical protein [Arabidopsis thaliana]
  misc_feature (136)..(238): Homolog of NCBI NO: 15222765 NR Description: hypothetical protein [Arabidopsis thaliana]
  misc_feature (31)..(154): Homolog of NCBI NO: 25405318 NR Description: hypothetical protein F13F21.4 [imported] - thaliana >gi|5430749|gb|AAD43149.1|AC007504_4 Hypothetical
  misc_feature (136)..(238): Homolog of NCBI NO: 25405318 NR Description: hypothetical protein F13F21.4 [imported] - thaliana >gi|5430749|gb|AAD43149.1|AC007504_4 Hypothetical

SEQ ID NO: 104471 - DNA, 623 bp, Arabidopsis thaliana
  misc_feature (1)..(623): Ceres Seq. ID no. 13615030
  misc_feature: MA Experiment ID: 108434 Result: Up-regulated in Transcription
  misc_feature: MA Experiment 108434 PARAMETER Experiment Name: At_Root_Tips_cDNA_P Parameter: Tissue Value: Root Tips
  misc_feature: MA Experiment ID: 108461 Result: Down-regulated in Transcription
  misc_feature: MA Experiment 108461 PARAMETER Experiment Name: At_Germinating_Seeds_cDNA_P Parameter: Age (day) Value: 1 vs. 0
  misc_feature: MA Experiment 108461 PARAMETER Experiment Name: At_Germinating_Seeds_cDNA_P Parameter: Tissue Value: Germinating Seeds
  misc_feature: MA Experiment ID: 108462 Result: Down-regulated in Transcription
  misc_feature: MA Experiment 108462 PARAMETER Experiment Name: At_Germinating_Seeds_cDNA_P Parameter: Age (day) Value: 2 vs. 0
  misc_feature: MA Experiment 108462 PARAMETER Experiment Name: At_Germinating_Seeds_cDNA_P Parameter: Tissue Value: Germinating Seeds
  misc_feature: MA Experiment ID: 108463 Result: Down-regulated in Transcription
  misc_feature: MA Experiment 108463 PARAMETER Experiment Name: At_Germinating_Seeds_cDNA_P Parameter: Age (day) Value: 3 vs. 0
  misc_feature: MA Experiment 108463 PARAMETER Experiment Name: At_Germinating_Seeds_cDNA_P Parameter: Tissue Value: Germinating Seeds
  misc_feature: MA Experiment ID: 108464 Result: Down-regulated in Transcription
  misc_feature: MA Experiment 108464 PARAMETER Experiment Name: At_Germinating_Seeds_cDNA_P Parameter: Age (day) Value: 4 vs. 0
  misc_feature: MA Experiment 108464 PARAMETER Experiment Name: At_Germinating_Seeds_cDNA_P Parameter: Tissue Value: Germinating Seeds
  misc_feature: MA Experiment ID: 108573 Result: Down-regulated in Transcription
  misc_feature: MA Experiment 108573 PARAMETER Experiment Name: At_Drought_cDNA_P Parameter: Timepoint (hr) Value: 6
  misc_feature: MA Experiment 108573 PARAMETER Experiment Name: At_Drought_cDNA_P Parameter: Tissue Value: Aerial
  misc_feature: MA Experiment 108573 PARAMETER Experiment Name: At_Drought_cDNA_P Parameter: Treatment Value: Drought vs. No Drought
  misc_feature: MA Experiment ID: 108579 Result: Up-regulated in Transcription
  misc_feature: MA Experiment 108579 PARAMETER Experiment Name: At_4deg_Cold_cDNA_P Parameter: Temperature (deg C) Value: 4 vs. 22
  misc_feature: MA Experiment 108579 PARAMETER Experiment Name: At_4deg_Cold_cDNA_P Parameter: Timepoint (hr) Value: 6
  misc_feature: MA Experiment 108579 PARAMETER Experiment Name: At_4deg_Cold_cDNA_P Parameter: Tissue Value: Aerial
  misc_feature: MA Experiment ID: 20000180 Result: Down-regulated in Transcription
  misc_feature: MA Experiment 20000180 PARAMETER Experiment Name: At_Germinating_Seeds_P Parameter: Age (hr) Value: 24 vs. 0
  misc_feature: MA Experiment 20000180 PARAMETER Experiment Name: At_Germinating_Seeds_P Parameter: Tissue Value: Germinating Seeds
  misc_feature: MA Experiment ID: 20000184 Result: Up-regulated in Transcription
  misc_feature: MA Experiment 20000184 PARAMETER Experiment Name: At_Shoots__P Parameter: Age (day) Value: 7
  misc_feature: MA Experiment 20000184 PARAMETER Experiment Name: At_Shoots__P Parameter: Tissue Value: Shoots vs. Whole Plant
  misc_feature: MA Experiment ID: 20000227 Result: Up-regulated in Transcription
  misc_feature: MA Experiment 20000227 PARAMETER Experiment Name: At_Root-Tips-vs-Tops_P Parameter: Tissue Value: Root Tips vs. Root Tops
  misc_feature: MA Experiment ID: 20001247 Result: Down-regulated in Transcription
  misc_feature: MA Experiment 20001247 PARAMETER Experiment Name: At_Far-red-induction_P Parameter: Age (day) Value: 7
  misc_feature: MA Experiment 20001247 PARAMETER Experiment Name: At_Far-red-induction_P Parameter: Light Value: Far-red vs. White
  misc_feature: MA Experiment 20001247 PARAMETER Experiment Name: At_Far-red-induction_P Parameter: Organism Value: A. thaliana
  misc_feature: MA Experiment 20001247 PARAMETER Experiment Name: At_Far-red-induction_P Parameter: Plant Line Value: Columbia
  misc_feature: MA Experiment 20001247 PARAMETER Experiment Name: At_Far-red-induction_P Parameter: Timepoint (hr) Value: 1
  misc_feature: MA Experiment 20001247 PARAMETER Experiment Name: At_Far-red-induction_P Parameter: Tissue Value: Whole Plant
  misc_feature: MA Experiment ID: 20001451 Result: Down-regulated in Transcription
  misc_feature: MA Experiment 20001451 PARAMETER Experiment Name: At_Far-red-induction_P Parameter: Age (day) Value: 7
  misc_feature: MA Experiment 20001451 PARAMETER Experiment Name: At_Far-red-induction_P Parameter: Light Value: Far-red vs. White
  misc_feature: MA Experiment 20001451 PARAMETER Experiment Name: At_Far-red-induction_P Parameter: Organism Value: A. thaliana
  misc_feature: MA Experiment 20001451 PARAMETER Experiment Name: At_Far-red-induction_P Parameter: Plant Line Value: Columbia
  misc_feature: MA Experiment 20001451 PARAMETER Experiment Name: At_Far-red-induction_P Parameter: Timepoint (hr) Value: 24
  misc_feature: MA Experiment 20001451 PARAMETER Experiment Name: At_Far-red-induction_P Parameter: Tissue Value: Whole Plant
  misc_feature: MA Experiment ID: 20001560 Result: Up-regulated in Transcription
  misc_feature: MA Experiment 20001560 PARAMETER Experiment Name: At_Drought_Soil_Dry_P Parameter: Age (day) Value: 28
  misc_feature: MA Experiment 20001560 PARAMETER Experiment Name: At_Drought_Soil_Dry_P Parameter: Organism Value: A. thaliana
  misc_feature: MA Experiment 20001560 PARAMETER Experiment Name: At_Drought_Soil_Dry_P Parameter: Plant Line Value: WS
  misc_feature: MA Experiment 20001560 PARAMETER Experiment Name: At_Drought_Soil_Dry_P Parameter: Post Timepoint (hr) Value: None
  misc_feature: MA Experiment 20001560 PARAMETER Experiment Name: At_Drought_Soil_Dry_P Parameter: Post-Treatment Value: None
  misc_feature: MA Experiment 20001560 PARAMETER Experiment Name: At_Drought_Soil_Dry_P Parameter: Timepoint (day) Value: 14
  misc_feature: MA Experiment 20001560 PARAMETER Experiment Name: At_Drought_Soil_Dry_P Parameter: Treatment Value: Drought vs. No Drought
aaggacagatttgtaaacattctcaaatccttcaaaaaccctaatttctttctgtgagcttattgagaacgaagaagatgacgggagaggtagtgaaccctaaggcgtatccgttagcagattctcagctttcgataacaataatggatcttgttcaacaagctactaactacaagcagcttaagaagggagctaatgaagctaccaaaacattgaaccgtggaatctctgagttcgttgttatggctgctgatgctgaaccacttgagattcttcttcatcttcctttgcttgccgaagataagaatgtgccatatgtgtttgtaccttcgaaacaagcattgggaagagcatgtggagtaacaagacctgttattgcttgttcagtgacatcgaatgaggcaagccagttgaaatcgcagattcagcatctcaaggatgcaattgagaagctcctgatctaaggatttctgctcagtatgaagagtctctgcaatgtggaatggctctgactgaagttagtttgtgtgatttacctatttgaagaatgtattgtgactggtgttaatgcttagtatgtggatcatcatcgctcatttgtacaattgagtttcttagatttt

SEQ ID NO: 104472 - protein, 128 aa, Arabidopsis thaliana; identical to SEQ ID NO: 26405
  peptide (1)..(128): Ceres Seq. ID no. 13615031
  misc_feature (20)..(114): Pfam Name: Ribosomal protein L7Ae/L30e/S12e/Gadd45 family Pfam Description: Ribosomal protein L7Ae/L30e/S12e/Gadd45 family
  misc_feature (1)..(128): Homolog of NCBI NO: 15236127 NR Description: Ribosomal protein L7Ae family [Arabidopsis
  misc_feature (1)..(128): Homolog of NCBI NO: 15241276 NR Description: ribosomal protein L7Ae family [Arabidopsis >gi|15081642|gb|AAK82476.1| AT5g20160/F5O24_50 [Arabidopsis >gi|20334836|gb|AAM16174.1| AT5g20160/F5O24_50 [Arabidopsis
  misc_feature (42)..(128): Homolog of NCBI NO: 30687670 NR Description: ribosomal protein L7Ae family [Arabidopsis
  misc_feature (1)..(46): Homolog of NCBI NO: 30687670 NR Description: ribosomal protein L7Ae family [Arabidopsis
  misc_feature (1)..(128): Homolog of NCBI NO: 21592866 NR Description: Ribosomal protein L7Ae-like [Arabidopsis thaliana]
  misc_feature (1)..(128): Homolog of NCBI NO: 15235416 NR Description: ribosomal protein L7Ae family [Arabidopsis
  misc_feature (1)..(108): Homolog of NCBI NO: 25295061 NR Description: Ribosomal protein L7Ae-like (partial) [imported] -
  misc_feature (6)..(128): Homolog of NCBI NO: 37530712 NR Description: putative ribosomal protein L7Ae-like [Oryza
  misc_feature (1)..(128): Homolog of NCBI NO: 38174386 NR Description: Unknown (protein for MGC:75724) [Silurana
  misc_feature (1)..(128): Homolog of NCBI NO: 17535189 NR Description: Ribosomal protein L7Ae/L30e/S12e/Gadd45 family kD) [Caenorhabditis elegans] >gi|2500347|sp|Q21568|NHPX_CAEEL family protein YEL026W homolog >gi|7506095|pir||T23808

SEQ ID NO: 104473 - protein, 106 aa, Arabidopsis thaliana; identical to SEQ ID NO: 26406
  peptide (1)..(106): Ceres Seq. ID no. 13615032
  misc_feature (1)..(92): Pfam Name: Ribosomal protein L7Ae/L30e/S12e/Gadd45 family Pfam Description: Ribosomal protein L7Ae/L30e/S12e/Gadd45 family
  misc_feature (1)..(106): Homolog of NCBI NO: 15236127 NR Description: Ribosomal protein L7Ae family [Arabidopsis
  misc_feature (1)..(106): Homolog of NCBI NO: 15241276 NR Description: ribosomal protein L7Ae family [Arabidopsis >gi|15081642|gb|AAK82476.1| AT5g20160/F5O24_50 [Arabidopsis >gi|20334836|gb|AAM16174.1| AT5g20160/F5O24_50 [Arabidopsis
  misc_feature (20)..(106): Homolog of NCBI NO: 30687670 NR Description: ribosomal protein L7Ae family [Arabidopsis
  misc_feature (1)..(24): Homolog of NCBI NO: 30687670 NR Description: ribosomal protein L7Ae family [Arabidopsis
  misc_feature (1)..(106): Homolog of NCBI NO: 21592866 NR Description: Ribosomal protein L7Ae-like [Arabidopsis thaliana]
  misc_feature (1)..(106): Homolog of NCBI NO: 15235416 NR Description: ribosomal protein L7Ae family [Arabidopsis
  misc_feature (1)..(86): Homolog of NCBI NO: 25295061 NR Description: Ribosomal protein L7Ae-like (partial) [imported] -
  misc_feature (1)..(106): Homolog of NCBI NO: 37530712 NR Description: putative ribosomal protein L7Ae-like [Oryza
  misc_feature (1)..(106): Homolog of NCBI NO: 38174386 NR Description: Unknown (protein for MGC:75724) [Silurana
  misc_feature (1)..(106): Homolog of NCBI NO: 17535189 NR Description: Ribosomal protein L7Ae/L30e/S12e/Gadd45 family kD) [Caenorhabditis elegans] >gi|2500347|sp|Q21568|NHPX_CAEEL family protein YEL026W homolog >gi|7506095|pir||T23808

SEQ ID NO: 104474 - protein, 73 aa, Arabidopsis thaliana; identical to SEQ ID NO: 21543
  peptide (1)..(73): Ceres Seq. ID no. 13615033
  misc_feature (1)..(59): Pfam Name: Ribosomal protein L7Ae/L30e/S12e/Gadd45 family Pfam Description: Ribosomal protein L7Ae/L30e/S12e/Gadd45 family
  misc_feature (1)..(73): Homolog of NCBI NO: 15236127 NR Description: Ribosomal protein L7Ae family [Arabidopsis
  misc_feature (1)..(73): Homolog of NCBI NO: 15241276 NR Description: ribosomal protein L7Ae family [Arabidopsis >gi|15081642|gb|AAK82476.1| AT5g20160/F5O24_50 [Arabidopsis >gi|20334836|gb|AAM16174.1| AT5g20160/F5O24_50 [Arabidopsis
  misc_feature (1)..(73): Homolog of NCBI NO: 30687670 NR Description: ribosomal protein L7Ae family [Arabidopsis
  misc_feature (1)..(73): Homolog of NCBI NO: 21592866 NR Description: Ribosomal protein L7Ae-like [Arabidopsis thaliana]
  misc_feature (1)..(73): Homolog of NCBI NO: 15235416 NR Description: ribosomal protein L7Ae family [Arabidopsis
  misc_feature (1)..(53): Homolog of NCBI NO: 25295061 NR Description: Ribosomal protein L7Ae-like (partial) [imported] -
  misc_feature (1)..(73): Homolog of NCBI NO: 37530712 NR Description: putative ribosomal protein L7Ae-like [Oryza
  misc_feature (1)..(73): Homolog of NCBI NO: 38174386 NR Description: Unknown (protein for MGC:75724) [Silurana
  misc_feature (1)..(73): Homolog of NCBI NO: 17535189 NR Description: Ribosomal protein L7Ae/L30e/S12e/Gadd45 family kD) [Caenorhabditis elegans] >gi|2500347|sp|Q21568|NHPX_CAEEL family protein YEL026W homolog >gi|7506095|pir||T23808
  misc_feature (1)..(73): Homolog of NCBI NO: 28302201 NR Description: Similar to NHP2 non-histone chromosome protein

SEQ ID NO: 104475 - DNA, 772 bp, Arabidopsis thaliana
  misc_feature (1)..(772): Ceres Seq. ID no. 13615036
  misc_feature: MA Experiment ID: 108462 Result: Down-regulated in Transcription
  misc_feature: MA Experiment 108462 PARAMETER Experiment Name: At_Germinating_Seeds_cDNA_P Parameter: Age (day) Value: 2 vs. 0
  misc_feature: MA Experiment 108462 PARAMETER Experiment Name: At_Germinating_Seeds_cDNA_P Parameter: Tissue Value: Germinating Seeds
  misc_feature: MA Experiment ID: 108463 Result: Down-regulated in Transcription
  misc_feature: MA Experiment 108463 PARAMETER Experiment Name: At_Germinating_Seeds_cDNA_P Parameter: Age (day) Value: 3 vs. 0
  misc_feature: MA Experiment 108463 PARAMETER Experiment Name: At_Germinating_Seeds_cDNA_P Parameter: Tissue Value: Germinating Seeds
  misc_feature: MA Experiment ID: 108464 Result: Down-regulated in Transcription
  misc_feature: MA Experiment 108464 PARAMETER Experiment Name: At_Germinating_Seeds_cDNA_P Parameter: Age (day) Value: 4 vs. 0
  misc_feature: MA Experiment 108464 PARAMETER Experiment Name: At_Germinating_Seeds_cDNA_P Parameter: Tissue Value: Germinating Seeds
  misc_feature: MA Experiment ID: 20000069 Result: Down-regulated in Transcription
  misc_feature: MA Experiment 20000069 PARAMETER Experiment Name: At_100uM_ABA_Mutants_cDNA_P Parameter: Plant Line Value: CS23
  misc_feature: MA Experiment 20000069 PARAMETER Experiment Name: At_100uM_ABA_Mutants_cDNA_P Parameter: Timepoint (hr) Value: 6
  misc_feature: MA Experiment 20000069 PARAMETER Experiment Name: At_100uM_ABA_Mutants_cDNA_P Parameter: Tissue Value: Aerial
  misc_feature: MA Experiment 20000069 PARAMETER Experiment Name: At_100uM_ABA_Mutants_cDNA_P Parameter: Treatment Value: 100uM ABA vs. No Treatment
  misc_feature: MA Experiment ID: 20000071 Result: Down-regulated in Transcription
  misc_feature: MA Experiment 20000071 PARAMETER Experiment Name: At_100uM_ABA_Mutants_cDNA_P Parameter: Plant Line Value: CS8104
  misc_feature: MA Experiment 20000071 PARAMETER Experiment Name: At_100uM_ABA_Mutants_cDNA_P Parameter: Timepoint (hr) Value: 6
  misc_feature: MA Experiment 20000071 PARAMETER Experiment Name: At_100uM_ABA_Mutants_cDNA_P Parameter: Tissue Value: Aerial
  misc_feature: MA Experiment 20000071 PARAMETER Experiment Name: At_100uM_ABA_Mutants_cDNA_P Parameter: Treatment Value: 100uM ABA vs. No Treatment
  misc_feature: MA Experiment ID: 20000072 Result: Down-regulated in Transcription
  misc_feature: MA Experiment 20000072 PARAMETER Experiment Name: At_100uM_ABA_Mutants_cDNA_P Parameter: Plant Line Value: CS8105
  misc_feature: MA Experiment 20000072 PARAMETER Experiment Name: At_100uM_ABA_Mutants_cDNA_P Parameter: Timepoint (hr) Value: 6
  misc_feature: MA Experiment 20000072 PARAMETER Experiment Name: At_100uM_ABA_Mutants_cDNA_P Parameter: Tissue Value: Aerial
  misc_feature: MA Experiment 20000072 PARAMETER Experiment Name: At_100uM_ABA_Mutants_cDNA_P Parameter: Treatment Value: 100uM ABA vs. No Treatment
  misc_feature: MA Experiment ID: 20000086 Result: Down-regulated in Transcription
  misc_feature: MA Experiment 20000086 PARAMETER Experiment Name: At_100uM_ABA_Mutants_cDNA_P Parameter: Plant Line Value: CS22
  misc_feature: MA Experiment 20000086 PARAMETER Experiment Name: At_100uM_ABA_Mutants_cDNA_P Parameter: Timepoint (hr) Value: 6
  misc_feature: MA Experiment 20000086 PARAMETER Experiment Name: At_100uM_ABA_Mutants_cDNA_P Parameter: Tissue Value: Aerial
  misc_feature: MA Experiment 20000086 PARAMETER Experiment Name: At_100uM_ABA_Mutants_cDNA_P Parameter: Treatment Value: 100uM ABA vs. No Treatment
  misc_feature: MA Experiment ID: 20000087 Result: Down-regulated in Transcription
  misc_feature: MA Experiment 20000087 PARAMETER Experiment Name: At_100uM_ABA_Mutants_cDNA_P Parameter: Plant Line Value: WS
  misc_feature: MA Experiment 20000087 PARAMETER Experiment Name: At_100uM_ABA_Mutants_cDNA_P Parameter: Timepoint (hr) Value: 6
  misc_feature: MA Experiment 20000087 PARAMETER Experiment Name: At_100uM_ABA_Mutants_cDNA_P Parameter: Tissue Value: Aerial
  misc_feature: MA Experiment 20000087 PARAMETER Experiment Name: At_100uM_ABA_Mutants_cDNA_P Parameter: Treatment Value: 100uM ABA vs. No Treatment
  misc_feature: MA Experiment ID: 20000088 Result: Down-regulated in Transcription
  misc_feature: MA Experiment 20000088 PARAMETER Experiment Name: At_100uM_ABA_Mutants_cDNA_P Parameter: Plant Line Value: Landsberg
  misc_feature: MA Experiment 20000088 PARAMETER Experiment Name: At_100uM_ABA_Mutants_cDNA_P Parameter: Timepoint (hr) Value: 6
  misc_feature: MA Experiment 20000088 PARAMETER Experiment Name: At_100uM_ABA_Mutants_cDNA_P Parameter: Tissue Value: Aerial
  misc_feature: MA Experiment 20000088 PARAMETER Experiment Name: At_100uM_ABA_Mutants_cDNA_P Parameter: Treatment Value: 100uM ABA vs. No Treatment
  misc_feature: MA Experiment ID: 20000089 Result: Down-regulated in Transcription
  misc_feature: MA Experiment ID: 20000090 Result: Down-regulated in Transcription
  misc_feature: MA Experiment ID: 20000184 Result: Up-regulated in Transcription
  misc_feature: MA Experiment 20000184 PARAMETER Experiment Name: At_Shoots__P Parameter: Age (day) Value: 7
  misc_feature: MA Experiment 20000184 PARAMETER Experiment Name: At_Shoots__P Parameter: Tissue Value: Shoots vs. Whole Plant
atctgttacgacagttatgtctccgtcgacgacgacgattttcatcggtcccatcttagcggtggacgccgccgtatctcacgcgattcacacggcggcgaaaccattcctcccaccatttgtcctcctcctcctcgaaatctcagctgatttccgattctccttccccgtatccctttccttcctcctctcccctccattacgctctttcctcgtccctttcctcctcggcctcctcttcgatctaatcttcgtcggaatcgtaaaattaatcttccgtcgtgctcgtcccgcttacaatcacccttcaatgtccgccgctgtatcagctgatcactactcgttcccctcaggtcacgcttctcgcgttttcttcgttgctgcatctgttcacttcttctctgctgctgctgaagcttccatgactggtccaagctactccttcttagatggatggatcagagatcataacgatggcgatgtgaaggtagaagttgtggtcgttgtatggatctgggcaacagtgactgcaatttcaaggattcttttaggaagacattacgttctcgatgtagctgctggtgcttttttagggattgtagaagctctctttgctcttcgatttctgagatttgatgaaatgatctttgggaggtaacaaatgtatccaaattgttgttgtttttaacaaattgttctgtaatttttgtttcgattacattgagaagaagaattgtattgttcatgaatcaaagattgttccttttgtttc

SEQ ID NO: 104476 - protein, 218 aa, Arabidopsis thaliana
  peptide (1)..(218): Ceres Seq. ID no. 13615037
  misc_feature (63)..(214): Pfam Name: PAP2 superfamily Pfam Description: PAP2 superfamily
  misc_feature (6)..(218): Homolog of NCBI NO: 15235691 NR Description: phosphatidic acid phosphatase (PAP2)-related
  misc_feature (7)..(214): Homolog of NCBI NO: 12247468 NR Description: PnFL-1 [Ipomoea nil]
  misc_feature (45)..(126): Homolog of NCBI NO: 24583289 NR Description: CG31717-PA [Drosophila melanogaster]
  misc_feature (169)..(203): Homolog of NCBI NO: 24583289 NR Description: CG31717-PA [Drosophila melanogaster]
  misc_feature (6)..(127): Homolog of NCBI NO: 12855379 NR Description: unnamed protein product [Mus musculus]
  misc_feature (167)..(201): Homolog of NCBI NO: 12855379 NR Description: unnamed protein product [Mus musculus]
  misc_feature (71)..(127): Homolog of NCBI NO: 12698216 NR Description: hypothetical protein [Macaca fascicularis]
  misc_feature (163)..(201): Homolog of NCBI NO: 12698216 NR Description: hypothetical protein [Macaca fascicularis]
  misc_feature (71)..(134): Homolog of NCBI NO: 14042336 NR Description: unnamed protein product [Homo sapiens]
  misc_feature (163)..(201): Homolog of NCBI NO: 14042336 NR Description: unnamed protein product [Homo sapiens]
SVTTVMSPSTTTIFIGPILAVDAAVSHAIHTAAKPFLPPFVLLLLEISADFRFSFPVSLSFLLSPPLRSFLVPFLLGLLFDLIFVGIVKLIFRRARPAYNHPSMSAAVSADHYSFPSGHASRVFFVAASVHFFSAAAEASMTGPSYSFLDGWIRDHNDGDVKVEVVVVVWIWATVTAISRILLGRHYVLDVAAGAFLGIVEALFALRFLRFDEMIFGR

SEQ ID NO: 104477 - protein, 213 aa, Arabidopsis thaliana; identical to SEQ ID NO: 23670
  peptide (1)..(213): Ceres Seq. ID no. 13615038
  misc_feature (58)..(209): Pfam Name: PAP2 superfamily Pfam Description: PAP2 superfamily
  misc_feature (1)..(213): Homolog of NCBI NO: 15235691 NR Description: phosphatidic acid phosphatase (PAP2)-related
  misc_feature (2)..(209): Homolog of NCBI NO: 12247468 NR Description: PnFL-1 [Ipomoea nil]
  misc_feature (40)..(121): Homolog of NCBI NO: 24583289 NR Description: CG31717-PA [Drosophila melanogaster]
  misc_feature (164)..(198): Homolog of NCBI NO: 24583289 NR Description: CG31717-PA [Drosophila melanogaster]
  misc_feature (1)..(122): Homolog of NCBI NO: 12855379 NR Description: unnamed protein product [Mus musculus]
  misc_feature (162)..(196): Homolog of NCBI NO: 12855379 NR Description: unnamed protein product [Mus musculus]
  misc_feature (66)..(122): Homolog of NCBI NO: 12698216 NR Description: hypothetical protein [Macaca fascicularis]
  misc_feature (158)..(196): Homolog of NCBI NO: 12698216 NR Description: hypothetical protein [Macaca fascicularis]
  misc_feature (66)..(129): Homolog of NCBI NO: 14042336 NR Description: unnamed protein product [Homo sapiens]
  misc_feature (158)..(196): Homolog of NCBI NO: 14042336 NR Description: unnamed protein product [Homo sapiens]

SEQ ID NO: 104478 - protein, 115 aa, Arabidopsis thaliana; identical to SEQ ID NO: 23671
  peptide (1)..(115): Ceres Seq. ID no. 13615039
  misc_feature (1)..(111): Pfam Name: PAP2 superfamily Pfam Description: PAP2 superfamily
  misc_feature (1)..(115): Homolog of NCBI NO: 15235691 NR Description: phosphatidic acid phosphatase (PAP2)-related
  misc_feature (1)..(111): Homolog of NCBI NO: 12247468 NR Description: PnFL-1 [Ipomoea nil]
  misc_feature (1)..(23): Homolog of NCBI NO: 24583289 NR Description: CG31717-PA [Drosophila melanogaster]
  misc_feature (66)..(100): Homolog of NCBI NO: 24583289 NR Description: CG31717-PA [Drosophila melanogaster]
  misc_feature (1)..(24): Homolog of NCBI NO: 12855379 NR Description: unnamed protein product [Mus musculus]
  misc_feature (64)..(98): Homolog of NCBI NO: 12855379 NR Description: unnamed protein product [Mus musculus]
  misc_feature (1)..(24): Homolog of NCBI NO: 12698216 NR Description: hypothetical protein [Macaca fascicularis]
  misc_feature (60)..(98): Homolog of NCBI NO: 12698216 NR Description: hypothetical protein [Macaca fascicularis]
  misc_feature (1)..(31): Homolog of NCBI NO: 14042336 NR Description: unnamed protein product [Homo sapiens]
  misc_feature (60)..(98): Homolog of NCBI NO: 14042336 NR Description: unnamed protein product [Homo sapiens]

SEQ ID NO: 104479 - DNA, 847 bp, Arabidopsis thaliana
  misc_feature (1)..(847): Ceres Seq. ID no. 13615040
  misc_feature: MA Experiment ID: 108434 Result: Down-regulated in Transcription
  misc_feature: MA Experiment 108434 PARAMETER Experiment Name: At_Root_Tips_cDNA_P Parameter: Tissue Value: Root Tips
  misc_feature: MA Experiment ID: 108461 Result: Up-regulated in Transcription
  misc_feature: MA Experiment 108461 PARAMETER Experiment Name: At_Germinating_Seeds_cDNA_P Parameter: Age (day) Value: 1 vs. 0
  misc_feature: MA Experiment 108461 PARAMETER Experiment Name: At_Germinating_Seeds_cDNA_P Parameter: Tissue Value: Germinating Seeds
  misc_feature: MA Experiment ID: 108462 Result: Up-regulated in Transcription
  misc_feature: MA Experiment 108462 PARAMETER Experiment Name: At_Germinating_Seeds_cDNA_P Parameter: Age (day) Value: 2 vs. 0
  misc_feature: MA Experiment 108462 PARAMETER Experiment Name: At_Germinating_Seeds_cDNA_P Parameter: Tissue Value: Germinating Seeds
  misc_feature: MA Experiment ID: 20000071 Result: Down-regulated in Transcription
  misc_feature: MA Experiment 20000071 PARAMETER Experiment Name: At_100uM_ABA_Mutants_cDNA_P Parameter: Plant Line Value: CS8104
  misc_feature: MA Experiment 20000071 PARAMETER Experiment Name: At_100uM_ABA_Mutants_cDNA_P Parameter: Timepoint (hr) Value: 6
  misc_feature: MA Experiment 20000071 PARAMETER Experiment Name: At_100uM_ABA_Mutants_cDNA_P Parameter: Tissue Value: Aerial
  misc_feature: MA Experiment 20000071 PARAMETER Experiment Name: At_100uM_ABA_Mutants_cDNA_P Parameter: Treatment Value: 100uM ABA vs. No Treatment
  misc_feature: MA Experiment ID: 20000086 Result: Down-regulated in Transcription
  misc_feature: MA Experiment 20000086 PARAMETER Experiment Name: At_100uM_ABA_Mutants_cDNA_P Parameter: Plant Line Value: CS22
  misc_feature: MA Experiment 20000086 PARAMETER Experiment Name: At_100uM_ABA_Mutants_cDNA_P Parameter: Timepoint (hr) Value: 6
  misc_feature: MA Experiment 20000086 PARAMETER Experiment Name: At_100uM_ABA_Mutants_cDNA_P Parameter: Tissue Value: Aerial
  misc_feature: MA Experiment 20000086 PARAMETER Experiment Name: At_100uM_ABA_Mutants_cDNA_P Parameter: Treatment Value: 100uM ABA vs. No Treatment
  misc_feature: MA Experiment ID: 20000089 Result: Down-regulated in Transcription
  misc_feature: MA Experiment ID: 20000090 Result: Down-regulated in Transcription
  misc_feature: MA Experiment ID: 20000117 Result: Down-regulated in Transcription
  misc_feature: MA Experiment 20000117 PARAMETER Experiment Name: At_100uM_ABA_Mutants_cDNA_P Parameter: Plant Line Value: Columbia
  misc_feature: MA Experiment 20000117 PARAMETER Experiment Name: At_100uM_ABA_Mutants_cDNA_P Parameter: Timepoint (hr) Value: 6
  misc_feature: MA Experiment 20000117 PARAMETER Experiment Name: At_100uM_ABA_Mutants_cDNA_P Parameter: Tissue Value: Aerial
  misc_feature: MA Experiment 20000117 PARAMETER Experiment Name: At_100uM_ABA_Mutants_cDNA_P Parameter: Treatment Value: 100uM ABA vs. No Treatment
  misc_feature: MA Experiment ID: 20000185 Result: Down-regulated in Transcription
  misc_feature: MA Experiment 20000185 PARAMETER Experiment Name: At_Roots__P Parameter: Age (day) Value: 7 vs. 21
  misc_feature: MA Experiment 20000185 PARAMETER Experiment Name: At_Roots__P Parameter: Organism Value: A. thaliana
  misc_feature: MA Experiment 20000185 PARAMETER Experiment Name: At_Roots__P Parameter: Tissue Value: Roots vs. Whole Plant
  misc_feature: MA Experiment ID: 20000234 Result: Up-regulated in Transcription
  misc_feature: MA Experiment 20000234 PARAMETER Experiment Name: At_Siliques_P Parameter: Age (day) Value: 21
  misc_feature: MA Experiment 20000234 PARAMETER Experiment Name: At_Siliques_P Parameter: Organism Value: A. thaliana
  misc_feature: MA Experiment 20000234 PARAMETER Experiment Name: At_Siliques_P Parameter: Plant Line Value: WS
  misc_feature: MA Experiment 20000234 PARAMETER Experiment Name: At_Siliques_P Parameter: Tissue Value: Less Than 5mm Siliques vs. Whole Plant
  misc_feature: MA Experiment ID: 20000264 Result: Up-regulated in Transcription
  misc_feature: MA Experiment 20000264 PARAMETER Experiment Name: At_Open_Flower_P Parameter: Age (day) Value: 21
  misc_feature: MA Experiment 20000264 PARAMETER Experiment Name: At_Open_Flower_P Parameter: Plant Line Value: WS
  misc_feature: MA Experiment 20000264 PARAMETER Experiment Name: At_Open_Flower_P Parameter: Tissue Value: Open Flower vs. Whole Plant
  misc_feature: MA Experiment ID: 20000286 Result: Up-regulated in Transcription
  misc_feature: MA Experiment 20000286 PARAMETER Experiment Name: At_Open_Flower_P Parameter: Age (day) Value: 21
  misc_feature: MA Experiment 20000286 PARAMETER Experiment Name: At_Open_Flower_P Parameter: Plant Line Value: WS
  misc_feature: MA Experiment 20000286 PARAMETER Experiment Name: At_Open_Flower_P Parameter: Tissue Value: Half Open vs. Whole Plant
  misc_feature: MA Experiment ID: 20000436 Result: Down-regulated in Transcription
  misc_feature: MA Experiment 20000436 PARAMETER Experiment Name: At_Drought_P Parameter: Age (day) Value: 7
  misc_feature: MA Experiment 20000436 PARAMETER Experiment Name: At_Drought_P Parameter: Organism Value: A. thaliana
  misc_feature: MA Experiment 20000436 PARAMETER Experiment Name: At_Drought_P Parameter: Plant Line Value: WS
  misc_feature: MA Experiment 20000436 PARAMETER Experiment Name: At_Drought_P Parameter: Timepoint (hr) Value: 12
  misc_feature: MA Experiment 20000436 PARAMETER Experiment Name: At_Drought_P Parameter: Tissue Value: Whole Plant
  misc_feature: MA Experiment 20000436 PARAMETER Experiment Name: At_Drought_P Parameter: Treatment Value: Drought vs. No Drought
  misc_feature: MA Experiment ID: 20000439 Result: Down-regulated in Transcription
  misc_feature: MA Experiment 20000439 PARAMETER Experiment Name: At_Roots__P Parameter: Age (day) Value: 14 vs. 21
  misc_feature: MA Experiment 20000439 PARAMETER Experiment Name: At_Roots__P Parameter: Organism Value: A. thaliana
  misc_feature: MA Experiment 20000439 PARAMETER Experiment Name: At_Roots__P Parameter: Tissue Value: Roots vs. Whole Plant
  misc_feature: MA Experiment ID: 20000445 Result: Down-regulated in Transcription
  misc_feature: MA Experiment 20000445 PARAMETER Experiment Name: At_100uM_NAA__P Parameter: Age (day) Value: 14
  misc_feature: MA Experiment 20000445 PARAMETER Experiment Name: At_100uM_NAA__P Parameter: Organism Value: A. thaliana
  misc_feature: MA Experiment 20000445 PARAMETER Experiment Name: At_100uM_NAA__P Parameter: Plant Line Value: WS
  misc_feature: MA Experiment 20000445 PARAMETER Experiment Name: At_100uM_NAA__P Parameter: Timepoint (hr) Value: 6
  misc_feature: MA Experiment 20000445 PARAMETER Experiment Name: At_100uM_NAA__P Parameter: Tissue Value: Aerial
  misc_feature: MA Experiment 20000445 PARAMETER Experiment Name: At_100uM_NAA__P Parameter: Treatment Value: 100uM NAA vs. No Treatment
  misc_feature: MA Experiment ID: 20000573 Result: Down-regulated in Transcription
  misc_feature: MA Experiment 20000573 PARAMETER Experiment Name: At_100uM_ABA_Mutants__P Parameter: Organism Value: A. thaliana
  misc_feature: MA Experiment 20000573 PARAMETER Experiment Name: At_100uM_ABA_Mutants__P Parameter: Plant Line Value: CS22 vs. Ler wt
  misc_feature: MA Experiment 20000573 PARAMETER Experiment Name: At_100uM_ABA_Mutants__P Parameter: Timepoint (hr) Value: N/A
  misc_feature: MA Experiment 20000573 PARAMETER Experiment Name: At_100uM_ABA_Mutants__P Parameter: Tissue Value: Whole Plant
  misc_feature: MA Experiment 20000573 PARAMETER Experiment Name: At_100uM_ABA_Mutants__P Parameter: Treatment Value: None
  misc_feature: MA Experiment ID: 20000794 Result: Up-regulated in Transcription
  misc_feature: MA Experiment 20000794 PARAMETER Experiment Name: At_Petals_P Parameter: Age (day) Value: 23-25 days
  misc_feature: MA Experiment 20000794 PARAMETER Experiment Name: At_Petals_P Parameter: Plant Line Value: WS
  misc_feature: MA Experiment 20000794 PARAMETER Experiment Name: At_Petals_P Parameter: Tissue Value: Petals vs. Whole plant
  misc_feature: MA Experiment ID: 20001247 Result: Up-regulated in Transcription
  misc_feature: MA Experiment 20001247 PARAMETER Experiment Name: At_Far-red-induction_P Parameter: Age (day) Value: 7
  misc_feature: MA Experiment 20001247 PARAMETER Experiment Name: At_Far-red-induction_P Parameter: Light Value: Far-red vs. White
  misc_feature: MA Experiment 20001247 PARAMETER Experiment Name: At_Far-red-induction_P Parameter: Organism Value: A. thaliana
  misc_feature: MA Experiment 20001247 PARAMETER Experiment Name: At_Far-red-induction_P Parameter: Plant Line Value: Columbia
  misc_feature: MA Experiment 20001247 PARAMETER Experiment Name: At_Far-red-induction_P Parameter: Timepoint (hr) Value: 1
  misc_feature: MA Experiment 20001247 PARAMETER Experiment Name: At_Far-red-induction_P Parameter: Tissue Value: Whole Plant
  misc_feature: MA Experiment ID: 20001248 Result: Down-regulated in Transcription
  misc_feature: MA Experiment 20001248 PARAMETER Experiment Name: At_Far-red-induction_P Parameter: Age (day) Value: 7
  misc_feature: MA Experiment 20001248 PARAMETER Experiment Name: At_Far-red-induction_P Parameter: Light Value: Far-red vs. White
  misc_feature: MA Experiment 20001248 PARAMETER Experiment Name: At_Far-red-induction_P Parameter: Organism Value: A. thaliana
  misc_feature: MA Experiment 20001248 PARAMETER Experiment Name: At_Far-red-induction_P Parameter: Plant Line Value: Columbia
  misc_feature: MA Experiment 20001248 PARAMETER Experiment Name: At_Far-red-induction_P Parameter: Timepoint (hr) Value: 4
  misc_feature: MA Experiment 20001248 PARAMETER Experiment Name: At_Far-red-induction_P Parameter: Tissue Value: Whole Plant
  misc_feature: MA Experiment ID: 20001756 Result: Up-regulated in Transcription
  misc_feature: MA Experiment 20001756 PARAMETER Experiment Name: At_50mM_NH4NO3_L-to-H_P Parameter: Timepoint (hr) Value: 4
  misc_feature: MA Experiment 20001756 PARAMETER Experiment Name: At_50mM_NH4NO3_L-to-H_P Parameter: Tissue Value: Leaf
  misc_feature: MA Experiment 20001756 PARAMETER Experiment Name: At_50mM_NH4NO3_L-to-H_P Parameter: Treatment Value: 50mM NH4NO3 vs 100mM Mannitol
  misc_feature: MA Experiment ID: 20001757 Result: Up-regulated in Transcription
  misc_feature: MA Experiment 20001757 PARAMETER Experiment Name: At_50mM_NH4NO3_L-to-H_P Parameter: Timepoint (hr) Value: 6
  misc_feature: MA Experiment 20001757 PARAMETER Experiment Name: At_50mM_NH4NO3_L-to-H_P Parameter: Tissue Value: Leaf
  misc_feature: MA Experiment 20001757 PARAMETER Experiment Name: At_50mM_NH4NO3_L-to-H_P Parameter: Treatment Value: 50mM NH4NO3 vs 100mM Mannitol
  misc_feature: MA Experiment ID: 20001905 Result: Down-regulated in Transcription
  misc_feature: MA Experiment 20001905 PARAMETER Experiment Name: At_Drought_Reproduction_P Parameter: Age (day) Value: 40
  misc_feature: MA Experiment 20001905 PARAMETER Experiment Name: At_Drought_Reproduction_P Parameter: Organism Value: A. thaliana
  misc_feature: MA Experiment 20001905 PARAMETER Experiment Name: At_Drought_Reproduction_P Parameter: Plant Line Value: WS
  misc_feature: MA Experiment 20001905 PARAMETER Experiment Name: At_Drought_Reproduction_P Parameter: Timepoint (day) Value: 10
  misc_feature: MA Experiment 20001905 PARAMETER Experiment Name: At_Drought_Reproduction_P Parameter: Tissue Value: Rosettes
  misc_feature: MA Experiment 20001905 PARAMETER Experiment Name: At_Drought_Reproduction_P Parameter: Treatment Value: Drought vs. No Drought
  misc_feature: MA Experiment ID: 20001911 Result: Down-regulated in Transcription
  misc_feature: MA Experiment 20001911 PARAMETER Experiment Name: At_Drought_Reproduction_P Parameter: Age (day) Value: 40
  misc_feature: MA Experiment 20001911 PARAMETER Experiment Name: At_Drought_Reproduction_P Parameter: Organism Value: A. thaliana
  misc_feature: MA Experiment 20001911 PARAMETER Experiment Name: At_Drought_Reproduction_P Parameter: Plant Line Value: WS
  misc_feature: MA Experiment 20001911 PARAMETER Experiment Name: At_Drought_Reproduction_P Parameter: Timepoint (day) Value: 10
  misc_feature: MA Experiment 20001911 PARAMETER Experiment Name: At_Drought_Reproduction_P Parameter: Tissue Value: Flowers
  misc_feature: MA Experiment 20001911 PARAMETER Experiment Name: At_Drought_Reproduction_P Parameter: Treatment Value: Drought vs. No Drought
atgactgcttcactttctctttctcttttgttcaagtagtttgggagagagaagagaagaagaagacaccctttaagcaaaacagaggattttcattctctgttctgtttgaattattactaatctatcatcttgttgttctcttcgtcgacaatgtcgggaaacaaagaagaagaggatcctcgtatccatggaatcaaaactaagatccgtgtcgttccagattttcccaagaaaggaataatgtttcaagacataacaacagtgttgttggatccgaaagccttcaaagacacaattgatctgtttgtggagaggtacagagacaagaacatctcagtggttgcaggaatagaggctcgtggtttcctattcggtccaccgatcgcgctagccattggagcaaaatttgttcctctgcgcaaacccaagaaactacctggtgaaacaatatttgaggaatacgagttggaatatggaaatgaccgcctagagatgcacataggagccgtcgaggctggcgatcgagctttggtcgttgatgatcttatcgcgactggtggtactctctgcgctgccattaacttgctcgagagggttggagcagaagttgtggaatgtgcatgtgtgatcgagttacccgaattaaagggaaggcagagacttaaggggaagccactatgtatgcttgtggagtaccgatgatgattttagctttacttatttggataaaattattcggttaattaatttatgctccgaaaattcggattatgcagacttcttattattggattctacaatattttgatttaaattctagcggattagctggaacaaataatcc

SEQ ID NO: 104480 - protein, 183 aa, Arabidopsis thaliana; identical to SEQ ID NO: 28570
  peptide (1)..(183): Ceres Seq. ID no. 13615041
  misc_feature (1)..(183): Homolog of NCBI NO: 15235709 NR Description: adenine phosphoribosyltransferase (EC 2.4.2.7) -
  misc_feature (1)..(183): Homolog of NCBI NO: 21536749 NR Description: adenine phosphoribosyltransferase (EC
  misc_feature (1)..(183): Homolog of NCBI NO: 15234553 NR Description: adenine phosphoribosyltransferase -related thaliana] >gi|7433935|pir||T07636 adenine
  misc_feature (5)..(181): Homolog of NCBI NO: 33354190 NR Description: putative adenine phosphoribosyl transferase
  misc_feature (5)..(180): Homolog of NCBI NO: 32492063 NR Description: adenine phosphoribosyltransferase [Brassica napus]
  misc_feature (1)..(181): Homolog of NCBI NO: 18396344 NR Description: adenine phosphoribosyltransferase 1, APRT thaliana] >gi|21536559|gb|AAM60891.1| adenine
  misc_feature (9)..(181): Homolog of NCBI NO: 2499932 NR Description: Adenine phosphoribosyltransferase 1 (APRT)
  misc_feature (9)..(181): Homolog of NCBI NO: 9711921 NR Description: Adenine phosphoribosyltransferase [Hordeum
  misc_feature (5)..(181): Homolog of NCBI NO: 30689934 NR Description: adenine phosphoribosyltransferase 1, APRT thaliana] >gi|399046|sp|P31166|APT1_ARATH Adenine
  misc_feature (9)..(181): Homolog of NCBI NO: 15238973 NR Description: adenine phosphoribosyltransferase - like protein

SEQ ID NO: 104481 - protein, 153 aa, Arabidopsis thaliana; identical to SEQ ID NO: 28571
  peptide (1)..(153): Ceres Seq. ID no. 13615042
  misc_feature (1)..(153): Homolog of NCBI NO: 15235709 NR Description: adenine phosphoribosyltransferase (EC 2.4.2.7) -
  misc_feature (1)..(153): Homolog of NCBI NO: 21536749 NR Description: adenine phosphoribosyltransferase (EC
  misc_feature (1)..(153): Homolog of NCBI NO: 15234553 NR Description: adenine phosphoribosyltransferase -related thaliana] >gi|7433935|pir||T07636 adenine
  misc_feature (1)..(151): Homolog of NCBI NO: 33354190 NR Description: putative adenine phosphoribosyl transferase
  misc_feature (1)..(150): Homolog of NCBI NO: 32492063 NR Description: adenine phosphoribosyltransferase [Brassica napus]
  misc_feature (1)..(151): Homolog of NCBI NO: 18396344 NR Description: adenine phosphoribosyltransferase 1, APRT thaliana] >gi|21536559|gb|AAM60891.1| adenine
  misc_feature (1)..(151): Homolog of NCBI NO: 2499932 NR Description: Adenine phosphoribosyltransferase 1 (APRT)
  misc_feature (1)..(151): Homolog of NCBI NO: 9711921 NR Description: Adenine phosphoribosyltransferase [Hordeum
  misc_feature (1)..(151): Homolog of NCBI NO: 30689934 NR Description: adenine phosphoribosyltransferase 1, APRT thaliana] >gi|399046|sp|P31166|APT1_ARATH Adenine
  misc_feature (1)..(151): Homolog of NCBI NO: 15238973 NR Description: adenine phosphoribosyltransferase - like protein

SEQ ID NO: 104482 - DNA, 1154 bp, Arabidopsis thaliana
  misc_feature (1)..(1154): Ceres Seq. ID no. 13615043
gacataacttgcaagctgttgagattttccatcctcgataactttattcttccatatctcttccatttcgctctctatttcacatccccatataacataatatacaatcacacatatcatttctatatagtatttaatggggagacagccatgctgtgacaagctaggggtgaagaaagggccgtggacggtggaggaagataagaagcttataaacttcatactaaccaatggccattgttgctggcgtgctttgccgaagctggccggtctccgtcgctgtggaaagagctgccgcctccggtggactaactatctccggcctgacttaaaacgaggccttctctcgcatgatgaagaacaacttgtcatagatcttcatgctaatctcggcaataagtggtctaagatagcttcaagattacctggaagaacagataacgaaataaaaaaccattggaatactcatatcaagaagaaacttcttaagatgggaatcgatcctatgacccatcaacccctaaatcaagaaccttctaatatcgataattccaaaaccattccgtccaatccagacgatgtctcagtggaaccaaagacaactaacacgaaatacgtggagataagtgtcacgacaacagaagaagaaagtagtagcacggttactgatcaaaacagttcgatggataatgaaaatcatctaattgacaacatttatgatgatgatgaattgtttagttacttatggtccgacgaaactactaaagatgaggcctcttggagtgatagtaactttggtgttggtggaacattatatgaccacaatatctccggcgccgatgcagattttccgatatggtcaccggaaagaatcaatgacgagaagatgtttttggattattgtcaagactttggtgttcatgattttgggttttgactgttcaccattgacatattggcaactctatggagatgaacacaagcattgagttgtcatgtttatacatacgtggcatatacatatatatatatatgtacattatatgtaaacatatacacgcatacaaatcataaacatgtaaggataataaatccatgtaaagcagtaagggtgcaccatggttttcaagtattattaattagggtttggtagg

SEQ ID NO: 104483 - protein, 266 aa, Arabidopsis thaliana; identical to SEQ ID NO: 43012
  peptide (1)..(266): Ceres Seq. ID no. 13615044
  misc_feature (14)..(61): Pfam Name: Myb-like DNA-binding domain Pfam Description: Myb-like DNA-binding domain
  misc_feature (1)..(266): Homolog of NCBI NO: 18415984 NR Description: myb family transcription factor [Arabidopsis >gi|15375277|gb|AAD53098.2|AF175993_1 putative transcription
  misc_feature (1)..(266): Homolog of NCBI NO: 5823331 NR Description: putative transcription factor [Arabidopsis
  misc_feature (1)..(90): Homolog of NCBI NO: 7438358 NR Description: myb-related protein homolog T12H17.70 -
  misc_feature (201)..(266): Homolog of NCBI NO: 7438358 NR Description: myb-related protein homolog T12H17.70 -
  misc_feature (1)..(219): Homolog of NCBI NO: 6651292 NR Description: myb-related transcription factor [Pimpinella
  misc_feature (39)..(266): Homolog of NCBI NO: 11358679 NR Description: probable transcription factor - Arabidopsis >gi|5281046|emb|CAB45982.1| putative transcription factor thaliana] >gi|7267936|emb|CAB78278.1| putative transcription
  misc_feature (1)..(263): Homolog of NCBI NO: 23343577 NR Description: Myb13 protein [Oryza sativa]
  misc_feature (1)..(187): Homolog of NCBI NO: 7446177 NR Description: myb-related transcription factor - tomato
  misc_feature (1)..(184): Homolog of NCBI NO: 15237380 NR Description: myb family transcription factor [Arabidopsis >gi|5823313|gb|AAD53095.1|AF175990_1 putative transcription [Arabidopsis thaliana] >gi|10176969|dbj|BAB10187.1| transcription
  misc_feature (1)..(228): Homolog of NCBI NO: 15219601 NR Description: myb family transcription factor(MYB20)

SEQ ID NO: 104484 - protein, 148 aa, Arabidopsis thaliana; identical to SEQ ID NO: 43013
  peptide (1)..(148): Ceres Seq. ID no. 13615045
  misc_feature (1)..(148): Homolog of NCBI NO: 18415984 NR Description: myb family transcription factor [Arabidopsis >gi|15375277|gb|AAD53098.2|AF175993_1 putative transcription
  misc_feature (1)..(148): Homolog of NCBI NO: 5823331 NR Description: putative transcription factor [Arabidopsis
  misc_feature (83)..(148): Homolog of NCBI NO: 7438358 NR Description: myb-related protein homolog T12H17.70 -
  misc_feature (1)..(101): Homolog of NCBI NO: 6651292 NR Description: myb-related transcription factor [Pimpinella
  misc_feature (1)..(148): Homolog of NCBI NO: 11358679 NR Description: probable transcription factor - Arabidopsis >gi|5281046|emb|CAB45982.1| putative transcription factor thaliana] >gi|7267936|emb|CAB78278.1| putative transcription
  misc_feature (1)..(145): Homolog of NCBI NO: 23343577 NR Description: Myb13 protein [Oryza sativa]
  misc_feature (1)..(69): Homolog of NCBI NO: 7446177 NR Description: myb-related transcription factor - tomato
  misc_feature (1)..(66): Homolog of NCBI NO: 15237380 NR Description: myb family transcription factor [Arabidopsis >gi|5823313|gb|AAD53095.1|AF175990_1 putative transcription [Arabidopsis thaliana] >gi|10176969|dbj|BAB10187.1| transcription
  misc_feature (1)..(110): Homolog of NCBI NO: 15219601 NR Description: myb family transcription factor(MYB20)
  misc_feature (1)..(77): Homolog of NCBI NO: 19072740 NR Description: typical P-type R2R3 Myb protein [Zea mays]

SEQ ID NO: 104485 - protein, 143 aa, Arabidopsis thaliana; identical to SEQ ID NO: 43014
  peptide (1)..(143): Ceres Seq. ID no. 13615046
  misc_feature (1)..(143): Homolog of NCBI NO: 18415984 NR Description: myb family transcription factor [Arabidopsis >gi|15375277|gb|AAD53098.2|AF175993_1 putative transcription
  misc_feature (1)..(143): Homolog of NCBI NO: 5823331 NR Description: putative transcription factor [Arabidopsis
  misc_feature (78)..(143): Homolog of NCBI NO: 7438358 NR Description: myb-related protein homolog T12H17.70 -
  misc_feature (1)..(96): Homolog of NCBI NO: 6651292 NR Description: myb-related transcription factor [Pimpinella
  misc_feature (1)..(143): Homolog of NCBI NO: 11358679 NR Description: probable transcription factor - Arabidopsis >gi|5281046|emb|CAB45982.1| putative transcription factor thaliana] >gi|7267936|emb|CAB78278.1| putative transcription
  misc_feature (1)..(140): Homolog of NCBI NO: 23343577 NR Description: Myb13 protein [Oryza sativa]
  misc_feature (1)..(64): Homolog of NCBI NO: 7446177 NR Description: myb-related transcription factor - tomato
  misc_feature (1)..(61): Homolog of NCBI NO: 15237380 NR Description: myb family transcription factor [Arabidopsis >gi|5823313|gb|AAD53095.1|AF175990_1 putative transcription [Arabidopsis thaliana] >gi|10176969|dbj|BAB10187.1| transcription
  misc_feature (1)..(105): Homolog of NCBI NO: 15219601 NR Description: myb family transcription factor(MYB20)
  misc_feature (1)..(72): Homolog of NCBI NO: 19072740 NR Description: typical P-type R2R3 Myb protein [Zea mays]

SEQ ID NO: 104486 - DNA, 784 bp, Arabidopsis thaliana
  misc_feature (1)..(784): Ceres Seq. ID no. 13615055
  misc_feature: MA Experiment ID: 20000185 Result: Down-regulated in Transcription
  misc_feature: MA Experiment 20000185 PARAMETER Experiment Name: At_Roots__P Parameter: Age (day) Value: 7 vs. 21
  misc_feature: MA Experiment 20000185 PARAMETER Experiment Name: At_Roots__P Parameter: Organism Value: A. thaliana
  misc_feature: MA Experiment 20000185 PARAMETER Experiment Name: At_Roots__P Parameter: Tissue Value: Roots vs. Whole Plant
  misc_feature: MA Experiment ID: 20000437 Result: Down-regulated in Transcription
  misc_feature: MA Experiment 20000437 PARAMETER Experiment Name: At_Drought_P Parameter: Age (day) Value: 8
  misc_feature: MA Experiment 20000437 PARAMETER Experiment Name: At_Drought_P Parameter: Organism Value: A. thaliana
  misc_feature: MA Experiment 20000437 PARAMETER Experiment Name: At_Drought_P Parameter: Plant Line Value: WS
  misc_feature: MA Experiment 20000437 PARAMETER Experiment Name: At_Drought_P Parameter: Timepoint (hr) Value: 24
  misc_feature: MA Experiment 20000437 PARAMETER Experiment Name: At_Drought_P Parameter: Tissue Value: Whole Plant
  misc_feature: MA Experiment 20000437 PARAMETER Experiment Name: At_Drought_P Parameter: Treatment Value: Drought vs. No Drought
  misc_feature: MA Experiment ID: 20000794 Result: Down-regulated in Transcription
  misc_feature: MA Experiment 20000794 PARAMETER Experiment Name: At_Petals_P Parameter: Age (day) Value: 23-25 days
  misc_feature: MA Experiment 20000794 PARAMETER Experiment Name: At_Petals_P Parameter: Plant Line Value: WS
  misc_feature: MA Experiment 20000794 PARAMETER Experiment Name: At_Petals_P Parameter: Tissue Value: Petals vs. Whole plant
  misc_feature: MA Experiment ID: 20001248 Result: Down-regulated in Transcription
  misc_feature: MA Experiment 20001248 PARAMETER Experiment Name: At_Far-red-induction_P Parameter: Age (day) Value: 7
  misc_feature: MA Experiment 20001248 PARAMETER Experiment Name: At_Far-red-induction_P Parameter: Light Value: Far-red vs. White
  misc_feature: MA Experiment 20001248 PARAMETER Experiment Name: At_Far-red-induction_P Parameter: Organism Value: A. thaliana
  misc_feature: MA Experiment 20001248 PARAMETER Experiment Name: At_Far-red-induction_P Parameter: Plant Line Value: Columbia
  misc_feature: MA Experiment 20001248 PARAMETER Experiment Name: At_Far-red-induction_P Parameter: Timepoint (hr) Value: 4
  misc_feature: MA Experiment 20001248 PARAMETER Experiment Name: At_Far-red-induction_P Parameter: Tissue Value: Whole Plant
  misc_feature: MA Experiment ID: 20001450 Result: Down-regulated in Transcription
  misc_feature: MA Experiment 20001450 PARAMETER Experiment Name: At_Far-red-induction_P Parameter: Age (day) Value: 7
  misc_feature: MA Experiment 20001450 PARAMETER Experiment Name: At_Far-red-induction_P Parameter: Light Value: Far-red vs. White
  misc_feature: MA Experiment 20001450 PARAMETER Experiment Name: At_Far-red-induction_P Parameter: Organism Value: A. thaliana
  misc_feature: MA Experiment 20001450 PARAMETER Experiment Name: At_Far-red-induction_P Parameter: Plant Line Value: Columbia
  misc_feature: MA Experiment 20001450 PARAMETER Experiment Name: At_Far-red-induction_P Parameter: Timepoint (hr) Value: 8
  misc_feature: MA Experiment 20001450 PARAMETER Experiment Name: At_Far-red-induction_P Parameter: Tissue Value: Whole Plant
  misc_feature: MA Experiment ID: 20001557 Result: Down-regulated in Transcription
  misc_feature: MA Experiment 20001557 PARAMETER Experiment Name: At_Drought_Soil_Dry_P Parameter: Age (day) Value: 27
  misc_feature: MA Experiment 20001557 PARAMETER Experiment Name: At_Drought_Soil_Dry_P Parameter: Organism Value: A. thaliana
  misc_feature: MA Experiment 20001557 PARAMETER Experiment Name: At_Drought_Soil_Dry_P Parameter: Plant Line Value: WS
  misc_feature: MA Experiment 20001557 PARAMETER Experiment Name: At_Drought_Soil_Dry_P Parameter: Post Timepoint (hr) Value: 3
  misc_feature: MA Experiment 20001557 PARAMETER Experiment Name: At_Drought_Soil_Dry_P Parameter: Post-Treatment Value: Re-Water vs. No Drought
  misc_feature: MA Experiment 20001557 PARAMETER Experiment Name: At_Drought_Soil_Dry_P Parameter: Timepoint (day) Value: 13
  misc_feature: MA Experiment 20001557 PARAMETER Experiment Name: At_Drought_Soil_Dry_P Parameter: Treatment Value: Drought vs. No Drought
  misc_feature: MA Experiment ID: 20001905 Result: Down-regulated in Transcription
  misc_feature: MA Experiment 20001905 PARAMETER Experiment Name: At_Drought_Reproduction_P Parameter: Age (day) Value: 40
  misc_feature: MA Experiment 20001905 PARAMETER Experiment Name: At_Drought_Reproduction_P Parameter: Organism Value: A. thaliana
  misc_feature: MA Experiment 20001905 PARAMETER Experiment Name: At_Drought_Reproduction_P Parameter: Plant Line Value: WS
  misc_feature: MA Experiment 20001905 PARAMETER Experiment Name: At_Drought_Reproduction_P Parameter: Timepoint (day) Value: 10
  misc_feature: MA Experiment 20001905 PARAMETER Experiment Name: At_Drought_Reproduction_P Parameter: Tissue Value: Rosettes
  misc_feature: MA Experiment 20001905 PARAMETER Experiment Name: At_Drought_Reproduction_P Parameter: Treatment Value: Drought vs. No Drought
  misc_feature: MA Experiment ID: 20001906 Result: Down-regulated in Transcription
  misc_feature: MA Experiment 20001906 PARAMETER Experiment Name: At_Drought_Reproduction_P Parameter: Age (day) Value: 35
  misc_feature: MA Experiment 20001906 PARAMETER Experiment Name: At_Drought_Reproduction_P Parameter: Organism Value: A. thaliana
  misc_feature: MA Experiment 20001906 PARAMETER Experiment Name: At_Drought_Reproduction_P Parameter: Plant Line Value: WS
  misc_feature: MA Experiment 20001906 PARAMETER Experiment Name: At_Drought_Reproduction_P Parameter: Timepoint (day) Value: 5
  misc_feature: MA Experiment 20001906 PARAMETER Experiment Name: At_Drought_Reproduction_P Parameter: Tissue Value: Siliques
  misc_feature: MA Experiment 20001906 PARAMETER Experiment Name: At_Drought_Reproduction_P Parameter: Treatment Value: Drought vs. No Drought
aaaattaaaccagaacttgggaattggaaattggagaaaaatctcagccatggcgattgcttcaacagccaccgttcttttctgctgcgccaaacccaatttccggcgaattcattctgagagccgtccagcttcttctctcaccacctctaacgaacctgtaattcggatccgaagccgcagtttaattcatgacccggttgcgctgtcgggtcttatcggaaccagtttggttgcggctgctttcatcacggcgggaccagatgctactgctttggcggcggtggtggattctcttcagctaagcgaaccgtccaatgcgttgtctttacccacttgggccgttcatgtttccagcgttgtcgaatggattacggcgatggcattggtatggaagtatggagaaagaaagggttatgagtcttggaaaggtctctcatggggaatggtacctttgcttggtggagctctctgtgcatgcacatggcatttcttctacaacgatgaatctcttgaggtgttggtcgctcttcaggcagcactaacggtgtttggtaatatcactctctgcattgctgcctttcggatcaacaagttgtcatccaaaattgaagtctctgaaaagccatgatggctaaaccgatcaatatgagcaaagtataattgaattattaattggaggatcactaagattcttttcccctttgaaaagttctatgagattctatgtcaacgatttaagtatattatatagtctttatatgaggaagatccatgtgcattc

SEQ ID NO: 104487 - protein, 209 aa, Arabidopsis thaliana; identical to SEQ ID NO: 44682
  peptide (1)..(209): Ceres Seq. ID no. 13615056
  misc_feature (17)..(209): Homolog of NCBI NO: 30685952 NR Description: expressed protein [Arabidopsis thaliana] unknown protein [Arabidopsis thaliana]
  misc_feature (17)..(126): Homolog of NCBI NO: 7486889 NR Description: hypothetical protein T12H17.220 - Arabidopsis >gi|2827560|emb|CAA16568.1| predicted protein [Arabidopsis >gi|7269130|emb|CAB79238.1| predicted protein [Arabidopsis
  misc_feature (81)..(202): Homolog of NCBI NO: 32489057 NR Description: OSJNBb0089B03.1 [Oryza sativa (japonica
  misc_feature (106)..(202): Homolog of NCBI NO: 16331563 NR Description: hypothetical protein [Synechocystis sp. PCC 6803]
  misc_feature (106)..(207): Homolog of NCBI NO: 17232000 NR Description: hypothetical protein [Nostoc sp. PCC 7120]
  misc_feature (106)..(205): Homolog of NCBI NO: 23041345 NR Description: hypothetical protein [Trichodesmium erythraeum
  misc_feature (107)..(196): Homolog of NCBI NO: 37521445 NR Description: hypothetical protein glr1876 [Gloeobacter
  misc_feature (106)..(193): Homolog of NCBI NO: 22298980 NR Description: ORF_ID:tlr1437~hypothetical protein
  misc_feature (108)..(204): Homolog of NCBI NO: 33861461 NR Description: conserved hypothetical protein [Prochlorococcus subsp. pastoris str. CCMP1378] >gi|33634038|emb|CAE19363.1| hypothetical protein [Prochlorococcus marinus subsp. pastoris
  misc_feature (106)..(196): Homolog of NCBI NO: 33865822 NR Description: conserved hypothetical protein [Synechococcus sp.

SEQ ID NO: 104488 - protein, 193 aa, Arabidopsis thaliana; identical to SEQ ID NO: 44683
  peptide (1)..(193): Ceres Seq. ID no. 13615057
  misc_feature (1)..(193): Homolog of NCBI NO: 30685952 NR Description: expressed protein [Arabidopsis thaliana] unknown protein [Arabidopsis thaliana]
  misc_feature (1)..(110): Homolog of NCBI NO: 7486889 NR Description: hypothetical protein T12H17.220 - Arabidopsis >gi|2827560|emb|CAA16568.1| predicted protein [Arabidopsis >gi|7269130|emb|CAB79238.1| predicted protein [Arabidopsis
  misc_feature (65)..(186): Homolog of NCBI NO: 32489057 NR Description: OSJNBb0089B03.1 [Oryza sativa (japonica
  misc_feature (90)..(186): Homolog of NCBI NO: 16331563 NR Description: hypothetical protein [Synechocystis sp. PCC 6803]
  misc_feature (90)..(191): Homolog of NCBI NO: 17232000 NR Description: hypothetical protein [Nostoc sp. PCC 7120]
  misc_feature (90)..(189): Homolog of NCBI NO: 23041345 NR Description: hypothetical protein [Trichodesmium erythraeum
  misc_feature (91)..(180): Homolog of NCBI NO: 37521445 NR Description: hypothetical protein glr1876 [Gloeobacter
  misc_feature (90)..(177): Homolog of NCBI NO: 22298980 NR Description: ORF_ID:tlr1437~hypothetical protein
  misc_feature (92)..(188): Homolog of NCBI NO: 33861461 NR Description: conserved hypothetical protein [Prochlorococcus subsp. pastoris str. CCMP1378] >gi|33634038|emb|CAE19363.1| hypothetical protein [Prochlorococcus marinus subsp. pastoris
  misc_feature (90)..(180): Homolog of NCBI NO: 33865822 NR Description: conserved hypothetical protein [Synechococcus sp.

SEQ ID NO: 104489 - DNA, 1661 bp, Arabidopsis thaliana
  misc_feature (1)..(1661): Ceres Seq. ID no. 13615102
  misc_feature: MA Experiment ID: 108434 Result: Down-regulated in Transcription
  misc_feature: MA Experiment 108434 PARAMETER Experiment Name: At_Root_Tips_cDNA_P Parameter: Tissue Value: Root Tips
  misc_feature: MA Experiment ID: 108463 Result: Up-regulated in Transcription
  misc_feature: MA Experiment 108463 PARAMETER Experiment Name: At_Germinating_Seeds_cDNA_P Parameter: Age (day) Value: 3 vs. 0
  misc_feature: MA Experiment 108463 PARAMETER Experiment Name: At_Germinating_Seeds_cDNA_P Parameter: Tissue Value: Germinating Seeds
  misc_feature: MA Experiment ID: 108572 Result: Up-regulated in Transcription
  misc_feature: MA Experiment 108572 PARAMETER Experiment Name: At_Drought_cDNA_P Parameter: Timepoint (hr) Value: 1
  misc_feature: MA Experiment 108572 PARAMETER Experiment Name: At_Drought_cDNA_P Parameter: Tissue Value: Aerial
  misc_feature: MA Experiment 108572 PARAMETER Experiment Name: At_Drought_cDNA_P Parameter: Treatment Value: Drought vs. No Drought
  misc_feature: MA Experiment ID: 108573 Result: Up-regulated in Transcription
  misc_feature: MA Experiment 108573 PARAMETER Experiment Name: At_Drought_cDNA_P Parameter: Timepoint (hr) Value: 6
  misc_feature: MA Experiment 108573 PARAMETER Experiment Name: At_Drought_cDNA_P Parameter: Tissue Value: Aerial
  misc_feature: MA Experiment 108573 PARAMETER Experiment Name: At_Drought_cDNA_P Parameter: Treatment Value: Drought vs. No Drought
  misc_feature: MA Experiment ID: 108577 Result: Down-regulated in Transcription
  misc_feature: MA Experiment 108577 PARAMETER Experiment Name: At_42deg_Heat_cDNA_P Parameter: Temperature (deg C) Value: 42 vs. 22
  misc_feature: MA Experiment 108577 PARAMETER Experiment Name: At_42deg_Heat_cDNA_P Parameter: Timepoint (hr) Value: 6
  misc_feature: MA Experiment 108577 PARAMETER Experiment Name: At_42deg_Heat_cDNA_P Parameter: Tissue Value: Aerial
  misc_feature: MA Experiment ID: 20000171 Result: Down-regulated in Transcription
  misc_feature: MA Experiment 20000171 PARAMETER Experiment Name: At_42deg_Heat_P Parameter: Age (day) Value: 14
  misc_feature: MA Experiment 20000171 PARAMETER Experiment Name: At_42deg_Heat_P Parameter: Organism Value: A. thaliana
  misc_feature: MA Experiment 20000171 PARAMETER Experiment Name: At_42deg_Heat_P Parameter: Plant Line Value: WS
  misc_feature: MA Experiment 20000171 PARAMETER Experiment Name: At_42deg_Heat_P Parameter: Temperature (deg C) Value: 42 vs. 22
  misc_feature: MA Experiment 20000171 PARAMETER Experiment Name: At_42deg_Heat_P Parameter: Timepoint (hr) Value: 1
  misc_feature: MA Experiment 20000171 PARAMETER Experiment Name: At_42deg_Heat_P Parameter: Tissue Value: Aerial
  misc_feature: MA Experiment ID: 20000173 Result: Down-regulated in Transcription
  misc_feature: MA Experiment 20000173 PARAMETER Experiment Name: At_42deg_Heat_P Parameter: Age (day) Value: 14
  misc_feature: MA Experiment 20000173 PARAMETER Experiment Name: At_42deg_Heat_P Parameter: Organism Value: A. thaliana
  misc_feature: MA Experiment 20000173 PARAMETER Experiment Name: At_42deg_Heat_P Parameter: Plant Line Value: WS
  misc_feature: MA Experiment 20000173 PARAMETER Experiment Name: At_42deg_Heat_P Parameter: Temperature (deg C) Value: 42 vs. 22
  misc_feature: MA Experiment 20000173 PARAMETER Experiment Name: At_42deg_Heat_P Parameter: Timepoint (hr) Value: 6
  misc_feature: MA Experiment 20000173 PARAMETER Experiment Name: At_42deg_Heat_P Parameter: Tissue Value: Aerial
  misc_feature: MA Experiment ID: 20000184 Result: Down-regulated in Transcription
  misc_feature: MA Experiment 20000184 PARAMETER Experiment Name: At_Shoots__P Parameter: Age (day) Value: 7
  misc_feature: MA Experiment 20000184 PARAMETER Experiment Name: At_Shoots__P Parameter: Tissue Value: Shoots vs. Whole Plant
  misc_feature: MA Experiment ID: 20000794 Result: Up-regulated in Transcription
  misc_feature: MA Experiment 20000794 PARAMETER Experiment Name: At_Petals_P Parameter: Age (day) Value: 23-25 days
  misc_feature: MA Experiment 20000794 PARAMETER Experiment Name: At_Petals_P Parameter: Plant Line Value: WS
  misc_feature: MA Experiment 20000794 PARAMETER Experiment Name: At_Petals_P Parameter: Tissue Value: Petals vs. Whole plant
  misc_feature: MA Experiment ID: 20001560 Result: Down-regulated in Transcription
  misc_feature: MA Experiment 20001560 PARAMETER Experiment Name: At_Drought_Soil_Dry_P Parameter: Age (day) Value: 28
  misc_feature: MA Experiment 20001560 PARAMETER Experiment Name: At_Drought_Soil_Dry_P Parameter: Organism Value: A. thaliana
  misc_feature: MA Experiment 20001560 PARAMETER Experiment Name: At_Drought_Soil_Dry_P Parameter: Plant Line Value: WS
  misc_feature: MA Experiment 20001560 PARAMETER Experiment Name: At_Drought_Soil_Dry_P Parameter: Post Timepoint (hr) Value: None
  misc_feature: MA Experiment 20001560 PARAMETER Experiment Name: At_Drought_Soil_Dry_P Parameter: Post-Treatment Value: None
  misc_feature: MA Experiment 20001560 PARAMETER Experiment Name: At_Drought_Soil_Dry_P Parameter: Timepoint (day) Value: 14
  misc_feature: MA Experiment 20001560 PARAMETER Experiment Name: At_Drought_Soil_Dry_P Parameter: Treatment Value: Drought vs. No Drought
aatcaaacccaaaagcccaaaacccagaagaacaaaaaatctctcttttgaaaattctccttttgcaaatcattcaagtgaagcacaatcatcttcttcttcttctccagcttcatcaatctcttctagactttttgcgtttacctgaaaaactgttttgatcgtaagtatctgattgcttcgatgtcgctgtcgaatcagattcccgtttactctcgatgaccctttgcttcttcttccactttttttccacagttttctgataactcttctcagatgagaagttctaagttacttcttctcaagttcttcttcttcttcttcttcaatctgacttcgcttgagtatcaagttgatggagcatttgttggaacatatgggataaattatggaaggatagctgacaacataccatctccggagaaagtagttttacttctaaagcaagctaaaattcggaatgtgcgtatatacgatgtagatcacactgttcttgaagcttttagtggaactggtttagaccttgttgttggacttcctaatgggtttttaaaagagatgagttcaaatgctgatcatgctttctcttgggttaaagaaaatattcagtctttcttacccaagactcggattcgcggtatcgctataggtaacgaagttcttggaggcggtgattctgagctcgcgggagctttacttggtgctgctaaaaatgtgtacaatgcgttgaagaaaatgaatctggaggacactgtgcagatcactacggctcattcacaggctgtgttttctgattcctacccgccttcgtcttgtgtgtttaaagagaatgttgttcagttcatgaagccattgttggagttttttcagcagattgggtctcctttttgtttgaatgcttacccttttttggcgtacacttataatccgaaggagattgatatcaactatgctcttttcaagccaacggaagggatatatgacccgaaaaccgatttgcattacgataacatgcttgatgctcagattgatgctgcttacatggcgttgcaagatgctgggtttaagaagatggaggttatgatcactgaaactgggtgggcttctaaaggggattcagatgaacctgcagcaacaccagagaacgcaagaacgtataactataacctcaggaagaggcttgctaagaagaaagggacacctcttagaccaaaaacggtgcttaaagcctatatctttgcattgttcaatgaaaactcaaaaccgggcaagagttctgagacacactttggactttttaaacctgatggaaccatatcatatgacattggattcaacaatctaaagtctgattctcccaagtcactcatttcatcatcaaagtcagctcgttactatgtggcattggtcatctctgtctcggctttcctcttgatgatataaatgcggaaatggtgtgagctttgacgatccttggatttggtcgtacattcgtagcactataatatatattactagggttgggacgctaacgaaatggtaggagcacaaatttactgcaattctcatatatgtagccaagagatatccagaaaagatatcaccagacactatcatatatacacatcttatgtaaaacaaatctaatacataaatttggg

SEQ ID NO: 104490 - protein, 388 aa, Arabidopsis thaliana
  peptide (1)..(388): Ceres Seq. ID no. 13615103
  misc_feature (34)..(353): Pfam Name: Glycosyl hydrolases family 17 Pfam Description: Glycosyl hydrolases family 17
  misc_feature (1)..(388): Homolog of NCBI NO: 18401187 NR Description: glycosyl hydrolase family 17 [Arabidopsis
  misc_feature (1)..(388): Homolog of NCBI NO: 21618052 NR Description: putative beta-1,3-glucanase [Arabidopsis thaliana]
  misc_feature (29)..(369): Homolog of NCBI NO: 7447981 NR Description: probable beta-1,3-glucanase At2g26600 [imported]
  misc_feature (95)..(388): Homolog of NCBI NO: 30683187 NR Description: glycosyl hydrolase family 17 [Arabidopsis
  misc_feature (95)..(388): Homolog of NCBI NO: 26452328 NR Description: putative beta-1,3-glucanase [Arabidopsis
  misc_feature (3)..(388): Homolog of NCBI NO: 15232696 NR Description: glycosyl hydrolase family 17 [Arabidopsis
  misc_feature (22)..(388): Homolog of NCBI NO: 11994352 NR Description: beta-1,3-glucanase-like protein [Arabidopsis
  misc_feature (32)..(360): Homolog of NCBI NO: 15209173 NR Description: putative elicitor inducible chitinase [Solanum
  misc_feature (31)..(363): Homolog of NCBI NO: 419789 NR Description: hypothetical protein - potato
  misc_feature (35)..(353): Homolog of NCBI NO: 25316443 NR Description: CDS protein F9L11.6 [imported] - Arabidopsis
MRSSKLLLLKFFFFFFFNLTSLEYQVDGAFVGTYGINYGRIADNIPSPEKVVLLLKQAKIRNVRIYDVDHTVLEAFSGTGLDLVVGLPNGFLKEMSSNADHAFSWVKENIQSFLPKTRIRGIAIGNEVLGGGDSELAGALLGAAKNVYNALKKMNLEDTVQITTAHSQAVFSDSYPPSSCVFKENVVQFMKPLLEFFQQIGSPFCLNAYPFLAYTYNPKEIDINYALFKPTEGIYDPKTDLHYDNMLDAQIDAAYMALQDAGFKKMEVMITETGWASKGDSDEPAATPENARTYNYNLRKRLAKKKGTPLRPKTVLKAYIFALFNENSKPGKSSETHFGLFKPDGTISYDIGFNNLKSDSPKSLISSSKSARYYVALVISVSAFLLMI

SEQ ID NO: 104491 - protein, 294 aa, Arabidopsis thaliana
  peptide (1)..(294): Ceres Seq. ID no. 13615104
  misc_feature (1)..(259): Pfam Name: Glycosyl hydrolases family 17 Pfam Description: Glycosyl hydrolases family 17
  misc_feature (1)..(294): Homolog of NCBI NO: 18401187 NR Description: glycosyl hydrolase family 17 [Arabidopsis
  misc_feature (1)..(294): Homolog of NCBI NO: 21618052 NR Description: putative beta-1,3-glucanase [Arabidopsis thaliana]
  misc_feature (1)..(275): Homolog of NCBI NO: 7447981 NR Description: probable beta-1,3-glucanase At2g26600 [imported]
  misc_feature (1)..(294): Homolog of NCBI NO: 30683187 NR Description: glycosyl hydrolase family 17 [Arabidopsis
  misc_feature (1)..(294): Homolog of NCBI NO: 26452328 NR Description: putative beta-1,3-glucanase [Arabidopsis
  misc_feature (1)..(294): Homolog of NCBI NO: 15232696 NR Description: glycosyl hydrolase family 17 [Arabidopsis
  misc_feature (1)..(294): Homolog of NCBI NO: 11994352 NR Description: beta-1,3-glucanase-like protein [Arabidopsis
  misc_feature (1)..(266): Homolog of NCBI NO: 15209173 NR Description: putative elicitor inducible chitinase [Solanum
  misc_feature (1)..(269): Homolog of NCBI NO: 419789 NR Description: hypothetical protein - potato
  misc_feature (1)..(259): Homolog of NCBI NO: 25316443 NR Description: CDS protein F9L11.6 [imported] - Arabidopsis
MSSNADHAFSWVKENIQSFLPKTRIRGIAIGNEVLGGGDSELAGALLGAAKNVYNALKKMNLEDTVQITTAHSQAVFSDSYPPSSCVFKENVVQFMKPLLEFFQQIGSPFCLNAYPFLAYTYNPKEIDINYALFKPTEGIYDPKTDLHYDNMLDAQIDAAYMALQDAGFKKMEVMITETGWASKGDSDEPAATPENARTYNYNLRKRLAKKKGTPLRPKTVLKAYIFALFNENSKPGKSSETHFGLFKPDGTISYDIGFNNLKSDSPKSLISSSKSARYYVALVISVSAFLLMI

SEQ ID NO: 104492 - protein, 235 aa, Arabidopsis thaliana
  peptide (1)..(235): Ceres Seq. ID no. 13615105
  misc_feature (1)..(200): Pfam Name: Glycosyl hydrolases family 17 Pfam Description: Glycosyl hydrolases family 17
  misc_feature (1)..(235): Homolog of NCBI NO: 18401187 NR Description: glycosyl hydrolase family 17 [Arabidopsis
  misc_feature (1)..(235): Homolog of NCBI NO: 21618052 NR Description: putative beta-1,3-glucanase [Arabidopsis thaliana]
  misc_feature (1)..(216): Homolog of NCBI NO: 7447981 NR Description: probable beta-1,3-glucanase At2g26600 [imported]
  misc_feature (1)..(235): Homolog of NCBI NO: 30683187 NR Description: glycosyl hydrolase family 17 [Arabidopsis
  misc_feature (1)..(235): Homolog of NCBI NO: 26452328 NR Description: putative beta-1,3-glucanase [Arabidopsis
  misc_feature (1)..(235): Homolog of NCBI NO: 15232696 NR Description: glycosyl hydrolase family 17 [Arabidopsis
  misc_feature (1)..(235): Homolog of NCBI NO: 11994352 NR Description: beta-1,3-glucanase-like protein [Arabidopsis
  misc_feature (1)..(207): Homolog of NCBI NO: 15209173 NR Description: putative elicitor inducible chitinase [Solanum
  misc_feature (1)..(210): Homolog of NCBI NO: 419789 NR Description: hypothetical protein - potato
  misc_feature (1)..(200): Homolog of NCBI NO: 25316443 NR Description: CDS protein F9L11.6 [imported] - Arabidopsis
MNLEDTVQITTAHSQAVFSDSYPPSSCVFKENVVQFMKPLLEFFQQIGSPFCLNAYPFLAYTYNPKEIDINYALFKPTEGIYDPKTDLHYDNMLDAQIDAAYMALQDAGFKKMEVMITETGWASKGDSDEPAATPENARTYNYNLRKRLAKKKGTPLRPKTVLKAYIFALFNENSKPGKSSETHFGLFKPDGTISYDIGFNNLKSDSPKSLISSSKSARYYVALVISVSAFLLMI

SEQ ID NO: 104493 - DNA, 1220 bp, Arabidopsis thaliana
  misc_feature (1)..(1220): Ceres Seq. ID no. 13615106
  misc_feature: MA Experiment ID: 20000180 Result: Up-regulated in Transcription
  misc_feature: MA Experiment 20000180 PARAMETER Experiment Name: At_Germinating_Seeds_P Parameter: Age (hr) Value: 24 vs. 0
  misc_feature: MA Experiment 20000180 PARAMETER Experiment Name: At_Germinating_Seeds_P Parameter: Tissue Value: Germinating Seeds
  misc_feature: MA Experiment ID: 20000234 Result: Up-regulated in Transcription
  misc_feature: MA Experiment 20000234 PARAMETER Experiment Name: At_Siliques_P Parameter: Age (day) Value: 21
  misc_feature: MA Experiment 20000234 PARAMETER Experiment Name: At_Siliques_P Parameter: Organism Value: A. thaliana
  misc_feature: MA Experiment 20000234 PARAMETER Experiment Name: At_Siliques_P Parameter: Plant Line Value: WS
  misc_feature: MA Experiment 20000234 PARAMETER Experiment Name: At_Siliques_P Parameter: Tissue Value: Less Than 5mm Siliques vs. Whole Plant
  misc_feature: MA Experiment ID: 20000235 Result: Up-regulated in Transcription
  misc_feature: MA Experiment 20000235 PARAMETER Experiment Name: At_Siliques_P Parameter: Age (day) Value: 21
  misc_feature: MA Experiment 20000235 PARAMETER Experiment Name: At_Siliques_P Parameter: Organism Value: A. thaliana
  misc_feature: MA Experiment 20000235 PARAMETER Experiment Name: At_Siliques_P Parameter: Plant Line Value: WS
  misc_feature: MA Experiment 20000235 PARAMETER Experiment Name: At_Siliques_P Parameter: Tissue Value: 5-10mm Siliques vs. Whole Plant
  misc_feature: MA Experiment ID: 20000264 Result: Up-regulated in Transcription
  misc_feature: MA Experiment 20000264 PARAMETER Experiment Name: At_Open_Flower_P Parameter: Age (day) Value: 21
  misc_feature: MA Experiment 20000264 PARAMETER Experiment Name: At_Open_Flower_P Parameter: Plant Line Value: WS
  misc_feature: MA Experiment 20000264 PARAMETER Experiment Name: At_Open_Flower_P Parameter: Tissue Value: Open Flower vs. Whole Plant
  misc_feature: MA Experiment ID: 20000265 Result: Up-regulated in Transcription
  misc_feature: MA Experiment 20000265 PARAMETER Experiment Name: At_Open_Flower_P Parameter: Age (day) Value: 21
  misc_feature: MA Experiment 20000265 PARAMETER Experiment Name: At_Open_Flower_P Parameter: Plant Line Value: WS
  misc_feature: MA Experiment 20000265 PARAMETER Experiment Name: At_Open_Flower_P Parameter: Tissue Value: Closed Flower vs. Whole Plant
  misc_feature: MA Experiment ID: 20000286 Result: Up-regulated in Transcription
  misc_feature: MA Experiment 20000286 PARAMETER Experiment Name: At_Open_Flower_P Parameter: Age (day) Value: 21
  misc_feature: MA Experiment 20000286 PARAMETER Experiment Name: At_Open_Flower_P Parameter: Plant Line Value: WS
  misc_feature: MA Experiment 20000286 PARAMETER Experiment Name: At_Open_Flower_P Parameter: Tissue Value: Half Open vs. Whole Plant
  misc_feature: MA Experiment ID: 20000438 Result: Up-regulated in Transcription
  misc_feature: MA Experiment 20000438 PARAMETER Experiment Name: At_Shoots__P Parameter: Age (day) Value: 14
  misc_feature: MA Experiment 20000438 PARAMETER Experiment Name: At_Shoots__P Parameter: Tissue Value: Shoots vs. Whole Plant
acccaagatctctccttcttgtttccccagatctgaaatttcaaaagctacccaattttaactcaagactctgaacaacacatctagatccatttccatggcgagcgcctggaaaaaagacaagaaccaaaaacttttatcaccaaagacactaatctcacttcttgtcctttccattatcttcctctcttctctcttcttcttcttctctaactcctctctccaatactccaatccaaatctctccatcaattccccataccctatccctccttttgattgcttcaaatgtccacaatcaaaacccataatcgcaaacgtcgtcgaaaatctcaagtacccttttgtttactctctcgctgatctcggtaatctcccggagaaaccacataagaacattgttaggctacttaaaggtaagccctttaggaaaccagatatctccgcaacgattcaggaggtattggatagtatgagagctagtggtaaaaatgggattgttgttgatgttggagctaatgttggtatggctagctttgctgctgcggttatggggtttaaagttcttgcctttgagcctgtttttgagaatttacagaggatttgtgatgggatttggtttaatagagttgcttctttggttactgtgtttgaagctgctgcttctgacagaacaggggatattaccttccataagttggtaggacggcttgacaatagcgcggtttcggaggtgggagcaaggcttgcattcaagtccaacaaagagatagcagtgcaagtcaaatccatacctcttgataaactaattccaccttctcaacctgttcttcttatcaagatcgacgttcaaggttgggaataccacgttttaaagggtgcgaagaagttgctttcagggaaaccagcagaagctccttatctaatctatgaggaagatgagagattgctcacggcaagcaatagtagctcgaaagagatacgtgattttcttaaaagcgttggatatagtaagtgtagccagcatgggacagatgcacattgcaccaaggagtgaaagacattggacttaccgacaaatggtaataagatgccatacaagttgaggaatataaggaagatgagcaataggtatttgcagagaaaaacatttagtttataagttgccaaatttggtcagtcatgtttgtttctccttgtaatatgtactcaattttttt

SEQ ID NO: 104494 - protein, 319 aa, Arabidopsis thaliana
  peptide (1)..(319): Ceres Seq. ID no. 13615107
  misc_feature (1)..(319): Homolog of NCBI NO: 18401209 NR Description: expressed protein [Arabidopsis thaliana]
  misc_feature (1)..(319): Homolog of NCBI NO: 21593723 NR Description: unknown [Arabidopsis thaliana]
  misc_feature (2)..(318): Homolog of NCBI NO: 34896590 NR Description: hypothetical protein [Oryza sativa]
MASAWKKDKNQKLLSPKTLISLLVLSIIFLSSLFFFFSNSSLQYSNPNLSINSPYPIPPFDCFKCPQSKPIIANVVENLKYPFVYSLADLGNLPEKPHKNIVRLLKGKPFRKPDISATIQEVLDSMRASGKNGIVVDVGANVGMASFAAAVMGFKVLAFEPVFENLQRICDGIWFNRVASLVTVFEAAASDRTGDITFHKLVGRLDNSAVSEVGARLAFKSNKEIAVQVKSIPLDKLIPPSQPVLLIKIDVQGWEYHVLKGAKKLLSGKPAEAPYLIYEEDERLLTASNSSSKEIRDFLKSVGYSKCSQHGTDAHCTKE

SEQ ID NO: 104495 - protein, 194 aa, Arabidopsis thaliana
  peptide (1)..(194): Ceres Seq. ID no. 13615108
  misc_feature (1)..(194): Homolog of NCBI NO: 18401209 NR Description: expressed protein [Arabidopsis thaliana]
  misc_feature (1)..(194): Homolog of NCBI NO: 21593723 NR Description: unknown [Arabidopsis thaliana]
  misc_feature (1)..(193): Homolog of NCBI NO: 34896590 NR Description: hypothetical protein [Oryza sativa]
MRASGKNGIVVDVGANVGMASFAAAVMGFKVLAFEPVFENLQRICDGIWFNRVASLVTVFEAAASDRTGDITFHKLVGRLDNSAVSEVGARLAFKSNKEIAVQVKSIPLDKLIPPSQPVLLIKIDVQGWEYHVLKGAKKLLSGKPAEAPYLIYEEDERLLTASNSSSKEIRDFLKSVGYSKCSQHGTDAHCTKE

SEQ ID NO: 104496 - protein, 176 aa, Arabidopsis thaliana
  peptide (1)..(176): Ceres Seq. ID no. 13615109
  misc_feature (1)..(176): Homolog of NCBI NO: 18401209 NR Description: expressed protein [Arabidopsis thaliana]
  misc_feature (1)..(176): Homolog of NCBI NO: 21593723 NR Description: unknown [Arabidopsis thaliana]
  misc_feature (1)..(175): Homolog of NCBI NO: 34896590 NR Description: hypothetical protein [Oryza sativa]
MASFAAAVMGFKVLAFEPVFENLQRICDGIWFNRVASLVTVFEAAASDRTGDITFHKLVGRLDNSAVSEVGARLAFKSNKEIAVQVKSIPLDKLIPPSQPVLLIKIDVQGWEYHVLKGAKKLLSGKPAEAPYLIYEEDERLLTASNSSSKEIRDFLKSVGYSKCSQHGTDAHCTKE

SEQ ID NO: 104497 - DNA, 1020 bp, Arabidopsis thaliana
  misc_feature (1)..(1020): Ceres Seq. ID no. 13615117
  misc_feature: MA Experiment ID: 20000179 Result: Down-regulated in Transcription
  misc_feature: MA Experiment 20000179 PARAMETER Experiment Name: At_Germinating_Seeds_P Parameter: Age (hr) Value: 6 vs. 0
  misc_feature: MA Experiment 20000179 PARAMETER Experiment Name: At_Germinating_Seeds_P Parameter: Tissue Value: Germinating Seeds
  misc_feature: MA Experiment ID: 20000234 Result: Up-regulated in Transcription
  misc_feature: MA Experiment 20000234 PARAMETER Experiment Name: At_Siliques_P Parameter: Age (day) Value: 21
  misc_feature: MA Experiment 20000234 PARAMETER Experiment Name: At_Siliques_P Parameter: Organism Value: A. thaliana
  misc_feature: MA Experiment 20000234 PARAMETER Experiment Name: At_Siliques_P Parameter: Plant Line Value: WS
  misc_feature: MA Experiment 20000234 PARAMETER Experiment Name: At_Siliques_P Parameter: Tissue Value: Less Than 5mm Siliques vs. Whole Plant
  misc_feature: MA Experiment ID: 20001560 Result: Up-regulated in Transcription
  misc_feature: MA Experiment 20001560 PARAMETER Experiment Name: At_Drought_Soil_Dry_P Parameter: Age (day) Value: 28
  misc_feature: MA Experiment 20001560 PARAMETER Experiment Name: At_Drought_Soil_Dry_P Parameter: Organism Value: A. thaliana
  misc_feature: MA Experiment 20001560 PARAMETER Experiment Name: At_Drought_Soil_Dry_P Parameter: Plant Line Value: WS
  misc_feature: MA Experiment 20001560 PARAMETER Experiment Name: At_Drought_Soil_Dry_P Parameter: Post Timepoint (hr) Value: None
  misc_feature: MA Experiment 20001560 PARAMETER Experiment Name: At_Drought_Soil_Dry_P Parameter: Post-Treatment Value: None
  misc_feature: MA Experiment 20001560 PARAMETER Experiment Name: At_Drought_Soil_Dry_P Parameter: Timepoint (day) Value: 14
  misc_feature: MA Experiment 20001560 PARAMETER Experiment Name: At_Drought_Soil_Dry_P Parameter: Treatment Value: Drought vs. No Drought
aaagatttggcttgtctctggcttgagaacaaagaaaacccctttcttcgatctcagcttaaatcactcgacgaagaagaaatcagaaaagagtcagagaaaaaaaaaatcaaggaagatgagtagcattggaactgggtacgatctctccgtcaccactttctctcccgatggccgtgttttccagatcgagtacgccgctaaagctgtcgacaacagtgggactgttgttggaatcaagtgcaaagatgggattgttatgggagttgagaaacttattgcatcaaagatgatgctaccaggttccaacaggagaatccattctgttcatcgtcatgctggcatggctgttgctgggcttgcagctgatgggaggcaaattgttgcgcgtgctaagtctgaagcacgaagctatgagagtgtttatggcgatgctgtacctgtgaaggaactttctgagcgtgttgcaagttatgtacatctgtgtaccctgtattggtggctcaggccttttggctgtggggttattcttggaggttatgatagagatggacctcaattgtacatgattgaaccatcaggcatatcatatagatactttggtgcggccattggcaaaggaaagcaagctgccaaaacggaaattgagaaattaaatttatctgagatgacatgcaaagaaggcgttatcgaggtggcgaaaatcatctacaagctacacgatgaagccaaggacaaggcttttgaattggagatgagctggatatgcgaggagtcaaaacgagagcatcagaaggtccctgatgatcttctggaagaagcaaagacggcagctaaaactgcgctcgaggagatggatgctgactaaaactgaggagtgtgttgaatttagatccgtcttattgcgtcgtttgatgtttcttatgtactctgaattgaattttgtctggagggacagttgttgcagtttcgcatgaaccattggagtcttttatcttattgctatcaacagttgctacg

SEQ ID NO: 104498 - protein, 288 aa, Arabidopsis thaliana
  peptide (1)..(288): Ceres Seq. ID no. 13615118
  misc_feature (70)..(255): Pfam Name: Proteasome A-type and B-type Pfam Description: Proteasome A-type and B-type
  misc_feature (40)..(288): Homolog of NCBI NO: 15225839 NR Description: 20S proteasome alpha subunit G (PAG1) thaliana] >gi|12644056|sp|O23715|PSA3_ARATH Proteasome subunit type 3 (20S proteasome alpha subunit G) >gi|25290056|pir||G84667
  misc_feature (40)..(288): Homolog of NCBI NO: 2511592 NR Description: multicatalytic endopeptidase complex, proteasome
  misc_feature (40)..(288): Homolog of NCBI NO: 3914431 NR Description: Proteasome subunit alpha type 3 (20S proteasome
  misc_feature (40)..(288): Homolog of NCBI NO: 14594925 NR Description: putative alpha7 proteasome subunit [Nicotiana
  misc_feature (40)..(288): Homolog of NCBI NO: 34909168 NR Description: proteasome subunit alpha type 3 [Oryza sativa
  misc_feature (42)..(284): Homolog of NCBI NO: 3914413 NR Description: Proteasome subunit alpha type 3 multicatalytic endopeptidase subunit C8 [Acanthamoeba
  misc_feature (40)..(286): Homolog of NCBI NO: 3914438 NR Description: Proteasome subunit alpha type 3 (Proteasome C8) (Macropain subunit C8) (Multicatalytic endopeptidase complex C8) (Proteasome subunit K) >gi|3037091|gb|AAC12943.1| proteasome
  misc_feature (40)..(286): Homolog of NCBI NO: 8394066 NR Description: proteasome (prosome, macropain) subunit, alpha alpha type 3 (Proteasome component C8) (Macropain subunit C8)
  misc_feature (40)..(286): Homolog of NCBI NO: 31981534 NR Description: proteasome (prosome, macropain) subunit, alpha
  misc_feature (40)..(286): Homolog of NCBI NO: 20810439 NR Description: proteasome (prosome, macropain) subunit, alpha
KIWLVSGLRTKKTPFFDLSLNHSTKKKSEKSQRKKKSRKMSSIGTGYDLSVTTFSPDGRVFQIEYAAKAVDNSGTVVGIKCKDGIVMGVEKLIASKMMLPGSNRRIHSVHRHAGMAVAGLAADGRQIVARAKSEARSYESVYGDAVPVKELSERVASYVHLCTLYWWLRPFGCGVILGGYDRDGPQLYMIEPSGISYRYFGAAIGKGKQAAKTEIEKLNLSEMTCKEGVIEVAKIIYKLHDEAKDKAFELEMSWICEESKREHQKVPDDLLEEAKTAAKTALEEMDAD

SEQ ID NO: 104499 - protein, 249 aa, Arabidopsis thaliana; identical to SEQ ID NO: 28051
  peptide (1)..(249): Ceres Seq. ID no. 13615119
  misc_feature (31)..(216): Pfam Name: Proteasome A-type and B-type Pfam Description: Proteasome A-type and B-type
  misc_feature (1)..(249): Homolog of NCBI NO: 15225839 NR Description: 20S proteasome alpha subunit G (PAG1) thaliana] >gi|12644056|sp|O23715|PSA3_ARATH Proteasome subunit type 3 (20S proteasome alpha subunit G) >gi|25290056|pir||G84667
  misc_feature (1)..(249): Homolog of NCBI NO: 2511592 NR Description: multicatalytic endopeptidase complex, proteasome
  misc_feature (1)..(249): Homolog of NCBI NO: 3914431 NR Description: Proteasome subunit alpha type 3 (20S proteasome
  misc_feature (1)..(249): Homolog of NCBI NO: 14594925 NR Description: putative alpha7 proteasome subunit [Nicotiana
  misc_feature (1)..(249): Homolog of NCBI NO: 34909168 NR Description: proteasome subunit alpha type 3 [Oryza sativa
  misc_feature (3)..(245): Homolog of NCBI NO: 3914413 NR Description: Proteasome subunit alpha type 3 multicatalytic endopeptidase subunit C8 [Acanthamoeba
  misc_feature (1)..(247): Homolog of NCBI NO: 3914438 NR Description: Proteasome subunit alpha type 3 (Proteasome C8) (Macropain subunit C8) (Multicatalytic endopeptidase complex C8) (Proteasome subunit K) >gi|3037091|gb|AAC12943.1| proteasome
  misc_feature (1)..(247): Homolog of NCBI NO: 8394066 NR Description: proteasome (prosome, macropain) subunit, alpha alpha type 3 (Proteasome component C8) (Macropain subunit C8)
  misc_feature (1)..(247): Homolog of NCBI NO: 31981534 NR Description: proteasome (prosome, macropain) subunit, alpha
  misc_feature (1)..(247): Homolog of NCBI NO: 20810439 NR Description: proteasome (prosome, macropain) subunit, alpha

SEQ ID NO: 104500 - protein, 202 aa, Arabidopsis thaliana; identical to SEQ ID NO: 28052
  peptide (1)..(202): Ceres Seq. ID no. 13615120
  misc_feature (1)..(169): Pfam Name: Proteasome A-type and B-type Pfam Description: Proteasome A-type and B-type
  misc_feature (1)..(202): Homolog of NCBI NO: 15225839 NR Description: 20S proteasome alpha subunit G (PAG1) thaliana] >gi|12644056|sp|O23715|PSA3_ARATH Proteasome subunit type 3 (20S proteasome alpha subunit G) >gi|25290056|pir||G84667
  misc_feature (1)..(202): Homolog of NCBI NO: 2511592 NR Description: multicatalytic endopeptidase complex, proteasome
  misc_feature (1)..(202): Homolog of NCBI NO: 3914431 NR Description: Proteasome subunit alpha type 3 (20S proteasome
  misc_feature (1)..(202): Homolog of NCBI NO: 14594925 NR Description: putative alpha7 proteasome subunit [Nicotiana
  misc_feature (1)..(202): Homolog of NCBI NO: 34909168 NR Description: proteasome subunit alpha type 3 [Oryza sativa
  misc_feature (1)..(198): Homolog of NCBI NO: 3914413 NR Description: Proteasome subunit alpha type 3 multicatalytic endopeptidase subunit C8 [Acanthamoeba
  misc_feature (1)..(200): Homolog of NCBI NO: 3914438 NR Description: Proteasome subunit alpha type 3 (Proteasome C8) (Macropain subunit C8) (Multicatalytic endopeptidase complex C8) (Proteasome subunit K) >gi|3037091|gb|AAC12943.1| proteasome
  misc_feature (1)..(200): Homolog of NCBI NO: 8394066 NR Description: proteasome (prosome, macropain) subunit, alpha alpha type 3 (Proteasome component C8) (Macropain subunit C8)
  misc_feature (1)..(200): Homolog of NCBI NO: 31981534 NR Description: proteasome (prosome, macropain) subunit, alpha
  misc_feature (1)..(200): Homolog of NCBI NO: 20810439 NR Description: proteasome (prosome, macropain) subunit, alpha

SEQ ID NO: 104501 - DNA, 1599 bp, Arabidopsis thaliana
  misc_feature (1)..(1599): Ceres Seq. ID no. 13615137
  misc_feature: MA Experiment ID: 108434 Result: Up-regulated in Transcription
  misc_feature: MA Experiment 108434 PARAMETER Experiment Name: At_Root_Tips_cDNA_P Parameter: Tissue Value: Root Tips
  misc_feature: MA Experiment ID: 108461 Result: Up-regulated in Transcription
  misc_feature: MA Experiment 108461 PARAMETER Experiment Name: At_Germinating_Seeds_cDNA_P Parameter: Age (day) Value: 1 vs. 0
  misc_feature: MA Experiment 108461 PARAMETER Experiment Name: At_Germinating_Seeds_cDNA_P Parameter: Tissue Value: Germinating Seeds
  misc_feature: MA Experiment ID: 108488 Result: Down-regulated in Transcription
  misc_feature: MA Experiment ID: 108501 Result: Down-regulated in Transcription
  misc_feature: MA Experiment 108501 PARAMETER Experiment Name: At_ap2_floral_buds_cDNA_P Parameter: Plant Line Value: ap2 (Ler.)
  misc_feature: MA Experiment 108501 PARAMETER Experiment Name: At_ap2_floral_buds_cDNA_P Parameter: Tissue Value: Closed Flower
  misc_feature: MA Experiment ID: 20000069 Result: Up-regulated in Transcription
  misc_feature: MA Experiment 20000069 PARAMETER Experiment Name: At_100uM_ABA_Mutants_cDNA_P Parameter: Plant Line Value: CS23
  misc_feature: MA Experiment 20000069 PARAMETER Experiment Name: At_100uM_ABA_Mutants_cDNA_P Parameter: Timepoint (hr) Value: 6
  misc_feature: MA Experiment 20000069 PARAMETER Experiment Name: At_100uM_ABA_Mutants_cDNA_P Parameter: Tissue Value: Aerial
  misc_feature: MA Experiment 20000069 PARAMETER Experiment Name: At_100uM_ABA_Mutants_cDNA_P Parameter: Treatment Value: 100uM ABA vs. No Treatment
  misc_feature: MA Experiment ID: 20000070 Result: Up-regulated in Transcription
  misc_feature: MA Experiment 20000070 PARAMETER Experiment Name: At_100uM_ABA_Mutants_cDNA_P Parameter: Plant Line Value: CS24
  misc_feature: MA Experiment 20000070 PARAMETER Experiment Name: At_100uM_ABA_Mutants_cDNA_P Parameter: Timepoint (hr) Value: 6
  misc_feature: MA Experiment 20000070 PARAMETER Experiment Name: At_100uM_ABA_Mutants_cDNA_P Parameter: Tissue Value: Aerial
  misc_feature: MA Experiment 20000070 PARAMETER Experiment Name: At_100uM_ABA_Mutants_cDNA_P Parameter: Treatment Value: 100uM ABA vs. No Treatment
  misc_feature: MA Experiment ID: 20000072 Result: Up-regulated in Transcription
  misc_feature: MA Experiment 20000072 PARAMETER Experiment Name: At_100uM_ABA_Mutants_cDNA_P Parameter: Plant Line Value: CS8105
  misc_feature: MA Experiment 20000072 PARAMETER Experiment Name: At_100uM_ABA_Mutants_cDNA_P Parameter: Timepoint (hr) Value: 6
  misc_feature: MA Experiment 20000072 PARAMETER Experiment Name: At_100uM_ABA_Mutants_cDNA_P Parameter: Tissue Value: Aerial
  misc_feature: MA Experiment 20000072 PARAMETER Experiment Name: At_100uM_ABA_Mutants_cDNA_P Parameter: Treatment Value: 100uM ABA vs. No Treatment
  misc_feature: MA Experiment ID: 20000112 Result: Down-regulated in Transcription
  misc_feature: MA Experiment 20000112 PARAMETER Experiment Name: At_42deg_Heat_cDNA_P Parameter: Temperature (deg C) Value: 42 vs. 22
  misc_feature: MA Experiment 20000112 PARAMETER Experiment Name: At_42deg_Heat_cDNA_P Parameter: Timepoint (hr) Value: 2
  misc_feature: MA Experiment 20000112 PARAMETER Experiment Name: At_42deg_Heat_cDNA_P Parameter: Tissue Value: Aerial
  misc_feature: MA Experiment ID: 20000117 Result: Up-regulated in Transcription
  misc_feature: MA Experiment 20000117 PARAMETER Experiment Name: At_100uM_ABA_Mutants_cDNA_P Parameter: Plant Line Value: Columbia
  misc_feature: MA Experiment 20000117 PARAMETER Experiment Name: At_100uM_ABA_Mutants_cDNA_P Parameter: Timepoint (hr) Value: 6
  misc_feature: MA Experiment 20000117 PARAMETER Experiment Name: At_100uM_ABA_Mutants_cDNA_P Parameter: Tissue Value: Aerial
  misc_feature: MA Experiment 20000117 PARAMETER Experiment Name: At_100uM_ABA_Mutants_cDNA_P Parameter: Treatment Value: 100uM ABA vs. No Treatment
  misc_feature: MA Experiment ID: 20000173 Result: Down-regulated in Transcription
  misc_feature: MA Experiment 20000173 PARAMETER Experiment Name: At_42deg_Heat_P Parameter: Age (day) Value: 14
  misc_feature: MA Experiment 20000173 PARAMETER Experiment Name: At_42deg_Heat_P Parameter: Organism Value: A. thaliana
  misc_feature: MA Experiment 20000173 PARAMETER Experiment Name: At_42deg_Heat_P Parameter: Plant Line Value: WS
  misc_feature: MA Experiment 20000173 PARAMETER Experiment Name: At_42deg_Heat_P Parameter: Temperature (deg C) Value: 42 vs. 22
  misc_feature: MA Experiment 20000173 PARAMETER Experiment Name: At_42deg_Heat_P Parameter: Timepoint (hr) Value: 6
  misc_feature: MA Experiment 20000173 PARAMETER Experiment Name: At_42deg_Heat_P Parameter: Tissue Value: Aerial
  misc_feature: MA Experiment ID: 20000179 Result: Up-regulated in Transcription
  misc_feature: MA Experiment 20000179 PARAMETER Experiment Name: At_Germinating_Seeds_P Parameter: Age (hr) Value: 6 vs. 0
  misc_feature: MA Experiment 20000179 PARAMETER Experiment Name: At_Germinating_Seeds_P Parameter: Tissue Value: Germinating Seeds
  misc_feature: MA Experiment ID: 20000180 Result: Up-regulated in Transcription
  misc_feature: MA Experiment 20000180 PARAMETER Experiment Name: At_Germinating_Seeds_P Parameter: Age (hr) Value: 24 vs. 0
  misc_feature: MA Experiment 20000180 PARAMETER Experiment Name: At_Germinating_Seeds_P Parameter: Tissue Value: Germinating Seeds
  misc_feature: MA Experiment ID: 20000184 Result: Down-regulated in Transcription
  misc_feature: MA Experiment 20000184 PARAMETER Experiment Name: At_Shoots__P Parameter: Age (day) Value: 7
  misc_feature: MA Experiment 20000184 PARAMETER Experiment Name: At_Shoots__P Parameter: Tissue Value: Shoots vs. Whole Plant
  misc_feature: MA Experiment ID: 20000451 Result: Down-regulated in Transcription
  misc_feature: MA Experiment 20000451 PARAMETER Experiment Name: At_CS6879_Shoots-Roots_P Parameter: Age (day) Value: 14
  misc_feature: MA Experiment 20000451 PARAMETER Experiment Name: At_CS6879_Shoots-Roots_P Parameter: Organism Value: A. thaliana
  misc_feature: MA Experiment 20000451 PARAMETER Experiment Name: At_CS6879_Shoots-Roots_P Parameter: Plant Line Value: CS6879 vs. WS
  misc_feature: MA Experiment 20000451 PARAMETER Experiment Name: At_CS6879_Shoots-Roots_P Parameter: Tissue Value: Roots
  misc_feature: MA Experiment ID: 20000527 Result: Down-regulated in Transcription
  misc_feature: MA Experiment 20000527 PARAMETER Experiment Name: At_10percent_PEG_P Parameter: Age (day) Value: 20
  misc_feature: MA Experiment 20000527 PARAMETER Experiment Name: At_10percent_PEG_P Parameter: Organism Value: A. thaliana
  misc_feature: MA Experiment 20000527 PARAMETER Experiment Name: At_10percent_PEG_P Parameter: Plant Line Value: WS
  misc_feature: MA Experiment 20000527 PARAMETER Experiment Name: At_10percent_PEG_P Parameter: Timepoint (day) Value: 20
  misc_feature: MA Experiment 20000527 PARAMETER Experiment Name: At_10percent_PEG_P Parameter: Tissue Value: Whole Plant
  misc_feature: MA Experiment 20000527 PARAMETER Experiment Name: At_10percent_PEG_P Parameter: Treatment Value: 10percent PEG vs. No Treatment
  misc_feature: MA Experiment ID: 20000794 Result: Up-regulated in Transcription
  misc_feature: MA Experiment 20000794 PARAMETER Experiment Name: At_Petals_P Parameter: Age (day) Value: 23-25 days
  misc_feature: MA Experiment 20000794 PARAMETER Experiment Name: At_Petals_P Parameter: Plant Line Value: WS
  misc_feature: MA Experiment 20000794 PARAMETER Experiment Name: At_Petals_P Parameter: Tissue Value: Petals vs. Whole plant
gaaactaatcttgaagatgagttcaagatctgacctcaaaatcaaacgagtttctttgataatcttcttgctaagtgttcttgttgagttttgctatggagggttcacaagtgaatatgtcagaggaagtgatttaccagatgacatgccactagacagcgatgtttttgaagttcctcctggtcataattcacctcaacaggttcatgtaacgcaagggaaccatgaaggtaatggagtgatcatttcttgggtgactccggttaagcccggttctaagactgttcaatattggtgtgagaatgagaaatcgaggaaacaagcagaagcaacagttaatacttaccggttctttaattacacgtctggttatattcaccattgcctcatcgatgatttggaatttgatacgaaatactactacgaaattgggagtggcaagtggtccagacggttctggttctttatcccgcctaaatcaggccctgacgtaccttacacatttggattaattggggatctaggacaaacttatgactcaaatagtacgttaagccattatgagatgaatccgggaaaaggacaagcggttctgtttgtaggagacttgtcttacgcggatcgctaccctaaccacgacaacaatagatgggatacttggggaaggttcgttgagcgaagtgttgcttatcaaccttggatatggactgctggcaaccacgaaatcgacttcgttcctgacattggtgaaatagaaccattcaagccttttatgaatcggtatcatacgccacataaggcatcaggaagtatctctccattgtggtattccatcaaaagggcgtcagcttatattattgttatgtcatgttactcatcttatgggatatacacacctcaatacaaatggctggaaaaggagttacaaggagtgaatcgaacagagacgccatggcttatagtcttagtgcatagcccgttttacagtagctatgtgcatcattacatggaaggtgaaacattgagagtcatgtacgaacaatggtttgtcaaatacaaggttgatgttgtgtttgcaggtcatgttcatgcctatgagagatcggaacgtgtttctaatattgcttacaacattgtcaatggattgtgtgagccaatatcggatgagtcagctcctatatacatcacaatcggggatggcggaaactcggaaggcttgcttaccgacatgatgcagccacaaccaaaatactccgcgtttcgagaagctagctttgggcacgggttgctagagattaaaaacagaactcatgcttacttcagctggaatcggaaccaagatgggaacgccgtggcagcagattctgtgtggttgcttaatcggttttggcgagctcaaaagaagacatggcttgatgcattttaaagacaaattgaagaaggttttatttttgcagcaattctaaacgaataaatcagttagtgactgttttacgagggttgttattgagatttgattaaaacctcctctcatacagaaaaaagtttgttattaccataagtggttttgcacctatacaagttaatataccatttcac

SEQ ID NO: 104502 - protein, 474 aa, Arabidopsis thaliana
  peptide (1)..(474): Ceres Seq. ID no. 13615138
  misc_feature (166)..(365): Pfam Name: Calcineurin-like phosphoesterase Pfam Description: Calcineurin-like phosphoesterase
  misc_feature (6)..(474): Homolog of NCBI NO: 15225855 NR Description: iron(III)-zinc(II) purple acid phosphatase
  misc_feature (6)..(474): Homolog of NCBI NO: 18086494 NR Description: At2g27190/T22O13.4 [Arabidopsis thaliana]
  misc_feature (6)..(474): Homolog of NCBI NO: 1218042 NR Description: secreted purple acid phosphatase precursor
  misc_feature (43)..(473): Homolog of NCBI NO: 25752258 NR Description: acid phosphatase (EC 3.1.3.2) purple 3
  misc_feature (48)..(473): Homolog of NCBI NO: 4210712 NR Description: purple acid phosphatase [Ipomoea batatas]
  misc_feature (19)..(464): Homolog of NCBI NO: 27597231 NR Description: purple acid phosphatase [Nicotiana tabacum]
  misc_feature (20)..(463): Homolog of NCBI NO: 27597229 NR Description: purple acid phosphatase [Nicotiana tabacum]
  misc_feature (19)..(463): Homolog of NCBI NO: 11262827 NR Description: acid phosphatase (EC 3.1.3.2) purple 1, precursor
  misc_feature (19)..(463): Homolog of NCBI NO: 11262828 NR Description: acid phosphatase (EC 3.1.3.2) purple 2, precursor
  misc_feature (14)..(463): Homolog of NCBI NO: 27597239 NR Description: purple acid phosphatase [Nicotiana tabacum]
KLILKMSSRSDLKIKRVSLIIFLLSVLVEFCYGGFTSEYVRGSDLPDDMPLDSDVFEVPPGHNSPQQVHVTQGNHEGNGVIISWVTPVKPGSKTVQYWCENEKSRKQAEATVNTYRFFNYTSGYIHHCLIDDLEFDTKYYYEIGSGKWSRRFWFFIPPKSGPDVPYTFGLIGDLGQTYDSNSTLSHYEMNPGKGQAVLFVGDLSYADRYPNHDNNRWDTWGRFVERSVAYQPWIWTAGNHEIDFVPDIGEIEPFKPFMNRYHTPHKASGSISPLWYSIKRASAYIIVMSCYSSYGIYTPQYKWLEKELQGVNRTETPWLIVLVHSPFYSSYVHHYMEGETLRVMYEQWFVKYKVDVVFAGHVHAYERSERVSNIAYNIVNGLCEPISDESAPIYITIGDGGNSEGLLTDMMQPQPKYSAFREASFGHGLLEIKNRTHAYFSWNRNQDGNAVAADSVWLLNRFWRAQKKTWLDAF

SEQ ID NO: 104503 - protein, 469 aa, Arabidopsis thaliana
  peptide (1)..(469): Ceres Seq. ID no. 13615139
  misc_feature (161)..(360): Pfam Name: Calcineurin-like phosphoesterase Pfam Description: Calcineurin-like phosphoesterase
  misc_feature (1)..(469): Homolog of NCBI NO: 15225855 NR Description: iron(III)-zinc(II) purple acid phosphatase
  misc_feature (1)..(469): Homolog of NCBI NO: 18086494 NR Description: At2g27190/T22O13.4 [Arabidopsis thaliana]
  misc_feature (1)..(469): Homolog of NCBI NO: 1218042 NR Description: secreted purple acid phosphatase precursor
  misc_feature (38)..(468): Homolog of NCBI NO: 25752258 NR Description: acid phosphatase (EC 3.1.3.2) purple 3
  misc_feature (43)..(468): Homolog of NCBI NO: 4210712 NR Description: purple acid phosphatase [Ipomoea batatas]
  misc_feature (14)..(459): Homolog of NCBI NO: 27597231 NR Description: purple acid phosphatase [Nicotiana tabacum]
  misc_feature (15)..(458): Homolog of NCBI NO: 27597229 NR Description: purple acid phosphatase [Nicotiana tabacum]
  misc_feature (14)..(458): Homolog of NCBI NO: 11262827 NR Description: acid phosphatase (EC 3.1.3.2) purple 1, precursor
  misc_feature (14)..(458): Homolog of NCBI NO: 11262828 NR Description: acid phosphatase (EC 3.1.3.2) purple 2, precursor
  misc_feature (9)..(458): Homolog of NCBI NO: 27597239 NR Description: purple acid phosphatase [Nicotiana tabacum]
MSSRSDLKIKRVSLIIFLLSVLVEFCYGGFTSEYVRGSDLPDDMPLDSDVFEVPPGHNSPQQVHVTQGNHEGNGVIISWVTPVKPGSKTVQYWCENEKSRKQAEATVNTYRFFNYTSGYIHHCLIDDLEFDTKYYYEIGSGKWSRRFWFFIPPKSGPDVPYTFGLIGDLGQTYDSNSTLSHYEMNPGKGQAVLFVGDLSYADRYPNHDNNRWDTWGRFVERSVAYQPWIWTAGNHEIDFVPDIGEIEPFKPFMNRYHTPHKASGSISPLWYSIKRASAYIIVMSCYSSYGIYTPQYKWLEKELQGVNRTETPWLIVLVHSPFYSSYVHHYMEGETLRVMYEQWFVKYKVDVVFAGHVHAYERSERVSNIAYNIVNGLCEPISDESAPIYITIGDGGNSEGLLTDMMQPQPKYSAFREASFGHGLLEIKNRTHAYFSWNRNQDGNAVAADSVWLLNRFWRAQKKTWLDAF

SEQ ID NO: 104504 - protein, 426 aa, Arabidopsis thaliana
  peptide (1)..(426): Ceres Seq. ID no. 13615140
  misc_feature (118)..(317): Pfam Name: Calcineurin-like phosphoesterase Pfam Description: Calcineurin-like phosphoesterase
  misc_feature (1)..(426): Homolog of NCBI NO: 15225855 NR Description: iron(III)-zinc(II) purple acid phosphatase
  misc_feature (1)..(426): Homolog of NCBI NO: 18086494 NR Description: At2g27190/T22O13.4 [Arabidopsis thaliana]
  misc_feature (1)..(426): Homolog of NCBI NO: 1218042 NR Description: secreted purple acid phosphatase precursor
  misc_feature (1)..(425): Homolog of NCBI NO: 25752258 NR Description: acid phosphatase (EC 3.1.3.2) purple 3
  misc_feature (1)..(425): Homolog of NCBI NO: 4210712 NR Description: purple acid phosphatase [Ipomoea batatas]
  misc_feature (1)..(416): Homolog of NCBI NO: 27597231 NR Description: purple acid phosphatase [Nicotiana tabacum]
  misc_feature (1)..(415): Homolog of NCBI NO: 27597229 NR Description: purple acid phosphatase [Nicotiana tabacum]
  misc_feature (1)..(415): Homolog of NCBI NO: 11262827 NR Description: acid phosphatase (EC 3.1.3.2) purple 1, precursor
  misc_feature (1)..(415): Homolog of NCBI NO: 11262828 NR Description: acid phosphatase (EC 3.1.3.2) purple 2, precursor
  misc_feature (1)..(415): Homolog of NCBI NO: 27597239 NR Description: purple acid phosphatase [Nicotiana tabacum]
MPLDSDVFEVPPGHNSPQQVHVTQGNHEGNGVIISWVTPVKPGSKTVQYWCENEKSRKQAEATVNTYRFFNYTSGYIHHCLIDDLEFDTKYYYEIGSGKWSRRFWFFIPPKSGPDVPYTFGLIGDLGQTYDSNSTLSHYEMNPGKGQAVLFVGDLSYADRYPNHDNNRWDTWGRFVERSVAYQPWIWTAGNHEIDFVPDIGEIEPFKPFMNRYHTPHKASGSISPLWYSIKRASAYIIVMSCYSSYGIYTPQYKWLEKELQGVNRTETPWLIVLVHSPFYSSYVHHYMEGETLRVMYEQWFVKYKVDVVFAGHVHAYERSERVSNIAYNIVNGLCEPISDESAPIYITIGDGGNSEGLLTDMMQPQPKYSAFREASFGHGLLEIKNRTHAYFSWNRNQDGNAVAADSVWLLNRFWRAQKKTWLDAF

SEQ ID NO: 104505 - DNA, 1061 bp, Arabidopsis thaliana
  misc_feature (1)..(1061): Ceres Seq. ID no. 13615159
  misc_feature: MA Experiment ID: 20000182 Result: Up-regulated in Transcription
  misc_feature: MA Experiment 20000182 PARAMETER Experiment Name: At_2mM_SA_P Parameter: Age (day) Value: 14
  misc_feature: MA Experiment 20000182 PARAMETER Experiment Name: At_2mM_SA_P Parameter: Organism Value: A. thaliana
  misc_feature: MA Experiment 20000182 PARAMETER Experiment Name: At_2mM_SA_P Parameter: Plant Line Value: WS
  misc_feature: MA Experiment 20000182 PARAMETER Experiment Name: At_2mM_SA_P Parameter: Timepoint (hr) Value: 6
  misc_feature: MA Experiment 20000182 PARAMETER Experiment Name: At_2mM_SA_P Parameter: Tissue Value: Aerial
  misc_feature: MA Experiment 20000182 PARAMETER Experiment Name: At_2mM_SA_P Parameter: Treatment Value: 2mM SA vs. No Treatment
  misc_feature: MA Experiment ID: 20000234 Result: Down-regulated in Transcription
  misc_feature: MA Experiment 20000234 PARAMETER Experiment Name: At_Siliques_P Parameter: Age (day) Value: 21
  misc_feature: MA Experiment 20000234 PARAMETER Experiment Name: At_Siliques_P Parameter: Organism Value: A. thaliana
  misc_feature: MA Experiment 20000234 PARAMETER Experiment Name: At_Siliques_P Parameter: Plant Line Value: WS
  misc_feature: MA Experiment 20000234 PARAMETER Experiment Name: At_Siliques_P Parameter: Tissue Value: Less Than 5mm Siliques vs. Whole Plant
  misc_feature: MA Experiment ID: 20000437 Result: Up-regulated in Transcription
  misc_feature: MA Experiment 20000437 PARAMETER Experiment Name: At_Drought_P Parameter: Age (day) Value: 8
  misc_feature: MA Experiment 20000437 PARAMETER Experiment Name: At_Drought_P Parameter: Organism Value: A. thaliana
  misc_feature: MA Experiment 20000437 PARAMETER Experiment Name: At_Drought_P Parameter: Plant Line Value: WS
  misc_feature: MA Experiment 20000437 PARAMETER Experiment Name: At_Drought_P Parameter: Timepoint (hr) Value: 24
  misc_feature: MA Experiment 20000437 PARAMETER Experiment Name: At_Drought_P Parameter: Tissue Value: Whole Plant
  misc_feature: MA Experiment 20000437 PARAMETER Experiment Name: At_Drought_P Parameter: Treatment Value: Drought vs. No Drought
  misc_feature: MA Experiment ID: 20001451 Result: Up-regulated in Transcription
  misc_feature: MA Experiment 20001451 PARAMETER Experiment Name: At_Far-red-induction_P Parameter: Age (day) Value: 7
  misc_feature: MA Experiment 20001451 PARAMETER Experiment Name: At_Far-red-induction_P Parameter: Light Value: Far-red vs. White
  misc_feature: MA Experiment 20001451 PARAMETER Experiment Name: At_Far-red-induction_P Parameter: Organism Value: A. thaliana
  misc_feature: MA Experiment 20001451 PARAMETER Experiment Name: At_Far-red-induction_P Parameter: Plant Line Value: Columbia
  misc_feature: MA Experiment 20001451 PARAMETER Experiment Name: At_Far-red-induction_P Parameter: Timepoint (hr) Value: 24
  misc_feature: MA Experiment 20001451 PARAMETER Experiment Name: At_Far-red-induction_P Parameter: Tissue Value: Whole Plant
  misc_feature: MA Experiment ID: 20001905 Result: Up-regulated in Transcription
  misc_feature: MA Experiment 20001905 PARAMETER Experiment Name: At_Drought_Reproduction_P Parameter: Age (day) Value: 40
  misc_feature: MA Experiment 20001905 PARAMETER Experiment Name: At_Drought_Reproduction_P Parameter: Organism Value: A. thaliana
  misc_feature: MA Experiment 20001905 PARAMETER Experiment Name: At_Drought_Reproduction_P Parameter: Plant Line Value: WS
  misc_feature: MA Experiment 20001905 PARAMETER Experiment Name: At_Drought_Reproduction_P Parameter: Timepoint (day) Value: 10
  misc_feature: MA Experiment 20001905 PARAMETER Experiment Name: At_Drought_Reproduction_P Parameter: Tissue Value: Rosettes
  misc_feature: MA Experiment 20001905 PARAMETER Experiment Name: At_Drought_Reproduction_P Parameter: Treatment Value: Drought vs. No Drought
caatcttttcttcgatctctttcttttttatctcttcatcgattgtgagaaaagttttgatttgtctctctatatctttcatctttcttatttttacactttgatagattctctatttttggaatctgattcatatgtttggggtttaatagtttcagctcaaagaaatctgggttaaagtgtgttagtgttcgtgtgttctctaaaggaaaatcctgaagaaaccaattgtaacttgtacactgggaaaatataagtgttcctgaggagtaaaagaggggaaaaagagaatgagaatagtcgggttaacgggaggcatagcgtctgggaagagtacagtgtctaacctcttcaaggctagtggcattcccgttgttgacgctgatgttgttgctcgagatgtattgaagaaaggaagcggtggatggaaaagagtcgttgcagcttttggtgaggagattctgcttcctagtggagaagtggatcggccaaaactcggtcagattgtgttctcgtctgattccaagcgtcaacttctaaacaagctgatggctccatacatatcaagtggtatcttctgggaaattctgaaacaatgggcgagtggagctaaagtgatagttgtcgatatccctttgttgttcgaagtgaagatggataaatggactaaacctattgtggttgtgtgggttagtcaagagacacaacttaagagactgatggagagagatggattgagtgaggaagatgcaagaaacagagtgatggctcagatgccgttggattcgaaaagaagcaaagctgatgttgtgatcgataataatggctctcttgacgaccttcaccaacagttcgagaaggttttgattgaaattagaagaccattgacgtggatcgagttttggcgttcaaggcaaggagccttctcggtccttggttcagtgattttaggattatctgtttgcaaacagctcaaaattggctcttaacatttcacttctgttactgctaaaaaacttgttataatcttaaagctttgatttattattctcttgctctct

SEQ ID NO: 104506 - protein, 232 aa, Arabidopsis thaliana
  peptide (1)..(232): Ceres Seq. ID no. 13615160
  misc_feature (2)..(183): Pfam Name: Dephospho-CoA kinase Pfam Description: Dephospho-CoA kinase
  misc_feature (1)..(232): Homolog of NCBI NO: 15225886 NR Description: expressed protein [Arabidopsis thaliana]
  misc_feature (1)..(227): Homolog of NCBI NO: 14587322 NR Description: P0460H02.3 [Oryza sativa (japonica
  misc_feature (2)..(187): Homolog of NCBI NO: 16800666 NR Description: similar to unknown proteins [Listeria innocua]
  misc_feature (1)..(230): Homolog of NCBI NO: 20151879 NR Description: RH63365p [Drosophila melanogaster]
  misc_feature (3)..(192): Homolog of NCBI NO: 16079958 NR Description: similar to hypothetical proteins [Bacillus
  misc_feature (2)..(194): Homolog of NCBI NO: 29375465 NR Description: dephospho-CoA kinase, putative [Enterococcus
  misc_feature (1)..(230): Homolog of NCBI NO: 24644728 NR Description: CG1939-PA [Drosophila melanogaster]
  misc_feature (3)..(192): Homolog of NCBI NO: 21402627 NR Description: CoaE, Dephospho-CoA kinase [Bacillus anthracis
  misc_feature (1)..(201): Homolog of NCBI NO: 39590766 NR Description: Hypothetical protein CBG10005 [Caenorhabditis
  misc_feature (2)..(187): Homolog of NCBI NO: 16803603 NR Description: similar to unknown proteins [Listeria
MRIVGLTGGIASGKSTVSNLFKASGIPVVDADVVARDVLKKGSGGWKRVVAAFGEEILLPSGEVDRPKLGQIVFSSDSKRQLLNKLMAPYISSGIFWEILKQWASGAKVIVVDIPLLFEVKMDKWTKPIVVVWVSQETQLKRLMERDGLSEEDARNRVMAQMPLDSKRSKADVVIDNNGSLDDLHQQFEKVLIEIRRPLTWIEFWRSRQGAFSVLGSVILGLSVCKQLKIGS

SEQ ID NO: 104507 - protein, 146 aa, Arabidopsis thaliana
  peptide (1)..(146): Ceres Seq. ID no. 13615161
  misc_feature (1)..(97): Pfam Name: Dephospho-CoA kinase Pfam Description: Dephospho-CoA kinase
  misc_feature (1)..(146): Homolog of NCBI NO: 15225886 NR Description: expressed protein [Arabidopsis thaliana]
  misc_feature (1)..(141): Homolog of NCBI NO: 14587322 NR Description: P0460H02.3 [Oryza sativa (japonica
  misc_feature (1)..(101): Homolog of NCBI NO: 16800666 NR Description: similar to unknown proteins [Listeria innocua]
  misc_feature (1)..(144): Homolog of NCBI NO: 20151879 NR Description: RH63365p [Drosophila melanogaster]
  misc_feature (1)..(106): Homolog of NCBI NO: 16079958 NR Description: similar to hypothetical proteins [Bacillus
  misc_feature (1)..(108): Homolog of NCBI NO: 29375465 NR Description: dephospho-CoA kinase, putative [Enterococcus
  misc_feature (1)..(144): Homolog of NCBI NO: 24644728 NR Description: CG1939-PA [Drosophila melanogaster]
  misc_feature (1)..(106): Homolog of NCBI NO: 21402627 NR Description: CoaE, Dephospho-CoA kinase [Bacillus anthracis
  misc_feature (1)..(115): Homolog of NCBI NO: 39590766 NR Description: Hypothetical protein CBG10005 [Caenorhabditis
  misc_feature (1)..(101): Homolog of NCBI NO: 16803603 NR Description: similar to unknown proteins [Listeria
MAPYISSGIFWEILKQWASGAKVIVVDIPLLFEVKMDKWTKPIVVVWVSQETQLKRLMERDGLSEEDARNRVMAQMPLDSKRSKADVVIDNNGSLDDLHQQFEKVLIEIRRPLTWIEFWRSRQGAFSVLGSVILGLSVCKQLKIGS

SEQ ID NO: 104508 - DNA, 1324 bp, Arabidopsis thaliana
  misc_feature (1)..(1324): Ceres Seq. ID no. 13615162
  misc_feature: MA Experiment ID: 108434 Result: Up-regulated in Transcription
  misc_feature: MA Experiment 108434 PARAMETER Experiment Name: At_Root_Tips_cDNA_P Parameter: Tissue Value: Root Tips
  misc_feature: MA Experiment ID: 108461 Result: Down-regulated in Transcription
  misc_feature: MA Experiment 108461 PARAMETER Experiment Name: At_Germinating_Seeds_cDNA_P Parameter: Age (day) Value: 1 vs. 0
  misc_feature: MA Experiment 108461 PARAMETER Experiment Name: At_Germinating_Seeds_cDNA_P Parameter: Tissue Value: Germinating Seeds
  misc_feature: MA Experiment ID: 108462 Result: Down-regulated in Transcription
  misc_feature: MA Experiment 108462 PARAMETER Experiment Name: At_Germinating_Seeds_cDNA_P Parameter: Age (day) Value: 2 vs. 0
  misc_feature: MA Experiment 108462 PARAMETER Experiment Name: At_Germinating_Seeds_cDNA_P Parameter: Tissue Value: Germinating Seeds
  misc_feature: MA Experiment ID: 108463 Result: Down-regulated in Transcription
  misc_feature: MA Experiment 108463 PARAMETER Experiment Name: At_Germinating_Seeds_cDNA_P Parameter: Age (day) Value: 3 vs. 0
  misc_feature: MA Experiment 108463 PARAMETER Experiment Name: At_Germinating_Seeds_cDNA_P Parameter: Tissue Value: Germinating Seeds
  misc_feature: MA Experiment ID: 108464 Result: Down-regulated in Transcription
  misc_feature: MA Experiment 108464 PARAMETER Experiment Name: At_Germinating_Seeds_cDNA_P Parameter: Age (day) Value: 4 vs. 0
  misc_feature: MA Experiment 108464 PARAMETER Experiment Name: At_Germinating_Seeds_cDNA_P Parameter: Tissue Value: Germinating Seeds
  misc_feature: MA Experiment ID: 108561 Result: Down-regulated in Transcription
  misc_feature: MA Experiment 108561 PARAMETER Experiment Name: At_100uM_ABA_cDNA_P Parameter: Timepoint (hr) Value: 6
  misc_feature: MA Experiment 108561 PARAMETER Experiment Name: At_100uM_ABA_cDNA_P Parameter: Tissue Value: Aerial
  misc_feature: MA Experiment 108561 PARAMETER Experiment Name: At_100uM_ABA_cDNA_P Parameter: Treatment Value: 100uM ABA vs. No Treatment
  misc_feature: MA Experiment ID: 20000179 Result: Down-regulated in Transcription
  misc_feature: MA Experiment 20000179 PARAMETER Experiment Name: At_Germinating_Seeds_P Parameter: Age (hr) Value: 6 vs. 0
  misc_feature: MA Experiment 20000179 PARAMETER Experiment Name: At_Germinating_Seeds_P Parameter: Tissue Value: Germinating Seeds
  misc_feature: MA Experiment ID: 20000180 Result: Down-regulated in Transcription
  misc_feature: MA Experiment 20000180 PARAMETER Experiment Name: At_Germinating_Seeds_P Parameter: Age (hr) Value: 24 vs. 0
  misc_feature: MA Experiment 20000180 PARAMETER Experiment Name: At_Germinating_Seeds_P Parameter: Tissue Value: Germinating Seeds
  misc_feature: MA Experiment ID: 20000437 Result: Down-regulated in Transcription
  misc_feature: MA Experiment 20000437 PARAMETER Experiment Name: At_Drought_P Parameter: Age (day) Value: 8
  misc_feature: MA Experiment 20000437 PARAMETER Experiment Name: At_Drought_P Parameter: Organism Value: A. thaliana
  misc_feature: MA Experiment 20000437 PARAMETER Experiment Name: At_Drought_P Parameter: Plant Line Value: WS
  misc_feature: MA Experiment 20000437 PARAMETER Experiment Name: At_Drought_P Parameter: Timepoint (hr) Value: 24
  misc_feature: MA Experiment 20000437 PARAMETER Experiment Name: At_Drought_P Parameter: Tissue Value: Whole Plant
  misc_feature: MA Experiment 20000437 PARAMETER Experiment Name: At_Drought_P Parameter: Treatment Value: Drought vs. No Drought
ttttctcttcttcctcgactgctctgctctgctctattctctggattgagaatttggactgagaacgacgacaaatggggaaacgagagaaaaaacctaatcgacgtcgccacaaaggtgaatattcgaatgatgctgaagatttctacgatcaacacccgccggctgttgcctccgtcgacgaagaagatgaagaaaactctgacgaagaagaagaagaaaatgatggaaacgaatcatcggatttgccttcaaagtttctcctttaccaacaatccgttcagtcaccaaaaggagacataagttacttgcagaagttctttttaatgtatgttggtggaagacaacctttccatttccaagaagatttctgcggcactgctcttttaagtgcggagtggctgaagactgacactagacggactgctatagggcttgattttgatcttgaggcgttagaatggtgtatggataacaacattagtaaacttggttctgacgtgtattcaagaatgtcgcttttccatgggaatgttttaactcctcttgaggctaagcaagtgaaatctaaatcccatgagctgatacaaaatatcagcttggatgatggtgatgataatgaagatttggctgatccgagtgttgtcgaatctttagagaaagatggacctgattcgttgccaaagagggatattgtgtgtgcttttaattttagttgttgttgtctccacaaacgctcggagttggtttcttacttcaagaatgcacgtgacgctttgtctaagaaaggtggtatcttcgtgatggatttatatggaggtgcttctgctgagggacagttgaagcttcaacggaaattccctaatttcacgtatacatgggagcaggctgagtttgatattttaagccgcaagacaaggatcagtctgcactatcaccttcagaagcagaacagaaagattcgccatgctttttcatatagctggagactgtggtcattgccggagataaaggattgtatggaggaagctgggtttagctcagtccatttctggctcagagaaatgccggacgcttctgaaatgcgtagaacagatgggtttggtgctggacgtgatatcaagtacgaacaagtcaagagctttcaacagtgtgattcttggaatgcttacattgttgcggtcagcctctagttatgctttctatcttttgatcaaaagacactagccctttaactcagatcctttgtcgattttacatctagtatttatttctgacacgcactggtttagtttcatgatttcaatattatttttttgtcgtc

SEQ ID NO: 104509 - protein, 372 aa, Arabidopsis thaliana; identical to SEQ ID NO: 40072
  peptide (1)..(372): Ceres Seq. ID no. 13615163
  misc_feature (1)..(372): Homolog of NCBI NO: 18401468 NR Description: expressed protein [Arabidopsis thaliana] unknown protein [Arabidopsis thaliana] expressed protein [Arabidopsis thaliana]
  misc_feature (1)..(372): Homolog of NCBI NO: 21536815 NR Description: unknown [Arabidopsis thaliana]
  misc_feature (1)..(372): Homolog of NCBI NO: 25370730 NR Description: hypothetical protein At2g27590 [imported] -
  misc_feature (1)..(371): Homolog of NCBI NO: 34908450 NR Description: P0683F02.16 [Oryza sativa (japonica

SEQ ID NO: 104510 - protein, 288 aa, Arabidopsis thaliana; identical to SEQ ID NO: 40073
  peptide (1)..(288): Ceres Seq. ID no. 13615164
  misc_feature (1)..(288): Homolog of NCBI NO: 18401468 NR Description: expressed protein [Arabidopsis thaliana] unknown protein [Arabidopsis thaliana] expressed protein [Arabidopsis thaliana]
  misc_feature (1)..(288): Homolog of NCBI NO: 21536815 NR Description: unknown [Arabidopsis thaliana]
  misc_feature (1)..(288): Homolog of NCBI NO: 25370730 NR Description: hypothetical protein At2g27590 [imported] -
  misc_feature (1)..(287): Homolog of NCBI NO: 34908450 NR Description: P0683F02.16 [Oryza sativa (japonica

SEQ ID NO: 104511 - protein, 241 aa, Arabidopsis thaliana; identical to SEQ ID NO: 40074
  peptide (1)..(241): Ceres Seq. ID no. 13615165
  misc_feature (1)..(241): Homolog of NCBI NO: 18401468 NR Description: expressed protein [Arabidopsis thaliana] unknown protein [Arabidopsis thaliana] expressed protein [Arabidopsis thaliana]
  misc_feature (1)..(241): Homolog of NCBI NO: 21536815 NR Description: unknown [Arabidopsis thaliana]
  misc_feature (1)..(241): Homolog of NCBI NO: 25370730 NR Description: hypothetical protein At2g27590 [imported] -
  misc_feature (1)..(240): Homolog of NCBI NO: 34908450 NR Description: P0683F02.16 [Oryza sativa (japonica

SEQ ID NO: 104512 - DNA, 1521 bp, Arabidopsis thaliana
  misc_feature (1)..(1521): Ceres Seq. ID no. 13615166
  misc_feature: MA Experiment ID: 108433 Result: Down-regulated in Transcription
  misc_feature: MA Experiment 108433 PARAMETER Experiment Name: At_rhl_Mutant2_cDNA_P Parameter: Age (day) Value: 7
  misc_feature: MA Experiment 108433 PARAMETER Experiment Name: At_rhl_Mutant2_cDNA_P Parameter: Organism Value: A. thaliana
  misc_feature: MA Experiment 108433 PARAMETER Experiment Name: At_rhl_Mutant2_cDNA_P Parameter: Plant Line Value: rhl Mutant vs. wt landsburg
  misc_feature: MA Experiment 108433 PARAMETER Experiment Name: At_rhl_Mutant2_cDNA_P Parameter: Tissue Value: Roots
  misc_feature: MA Experiment ID: 108461 Result: Up-regulated in Transcription
  misc_feature: MA Experiment 108461 PARAMETER Experiment Name: At_Germinating_Seeds_cDNA_P Parameter: Age (day) Value: 1 vs. 0
  misc_feature: MA Experiment 108461 PARAMETER Experiment Name: At_Germinating_Seeds_cDNA_P Parameter: Tissue Value: Germinating Seeds
  misc_feature: MA Experiment ID: 108462 Result: Up-regulated in Transcription
  misc_feature: MA Experiment 108462 PARAMETER Experiment Name: At_Germinating_Seeds_cDNA_P Parameter: Age (day) Value: 2 vs. 0
  misc_feature: MA Experiment 108462 PARAMETER Experiment Name: At_Germinating_Seeds_cDNA_P Parameter: Tissue Value: Germinating Seeds
  misc_feature: MA Experiment ID: 108463 Result: Up-regulated in Transcription
  misc_feature: MA Experiment 108463 PARAMETER Experiment Name: At_Germinating_Seeds_cDNA_P Parameter: Age (day) Value: 3 vs. 0
  misc_feature: MA Experiment 108463 PARAMETER Experiment Name: At_Germinating_Seeds_cDNA_P Parameter: Tissue Value: Germinating Seeds
  misc_feature: MA Experiment ID: 108489 Result: Down-regulated in Transcription
  misc_feature: MA Experiment ID: 108569 Result: Up-regulated in Transcription
  misc_feature: MA Experiment 108569 PARAMETER Experiment Name: At_0.001%_MeJA__cDNA_P Parameter: Timepoint (hr) Value: 6
  misc_feature: MA Experiment 108569 PARAMETER Experiment Name: At_0.001%_MeJA__cDNA_P Parameter: Tissue Value: Aerial
  misc_feature: MA Experiment 108569 PARAMETER Experiment Name: At_0.001%_MeJA__cDNA_P Parameter: Treatment Value: 0.001% MeJA vs. No Treatment
  misc_feature: MA Experiment ID: 108585 Result: Up-regulated in Transcription
  misc_feature: MA Experiment 108585 PARAMETER Experiment Name: At_5mM_NaNP_cDNA_P Parameter: Timepoint (hr) Value: 6
  misc_feature: MA Experiment 108585 PARAMETER Experiment Name: At_5mM_NaNP_cDNA_P Parameter: Tissue Value: Aerial
  misc_feature: MA Experiment 108585 PARAMETER Experiment Name: At_5mM_NaNP_cDNA_P Parameter: Treatment Value: null
  misc_feature: MA Experiment ID: 20000179 Result: Up-regulated in Transcription
  misc_feature: MA Experiment 20000179 PARAMETER Experiment Name: At_Germinating_Seeds_P Parameter: Age (hr) Value: 6 vs. 0
  misc_feature: MA Experiment 20000179 PARAMETER Experiment Name: At_Germinating_Seeds_P Parameter: Tissue Value: Germinating Seeds
  misc_feature: MA Experiment ID: 20000180 Result: Up-regulated in Transcription
  misc_feature: MA Experiment 20000180 PARAMETER Experiment Name: At_Germinating_Seeds_P Parameter: Age (hr) Value: 24 vs. 0
  misc_feature: MA Experiment 20000180 PARAMETER Experiment Name: At_Germinating_Seeds_P Parameter: Tissue Value: Germinating Seeds
  misc_feature: MA Experiment ID: 20000184 Result: Up-regulated in Transcription
  misc_feature: MA Experiment 20000184 PARAMETER Experiment Name: At_Shoots__P Parameter: Age (day) Value: 7
  misc_feature: MA Experiment 20000184 PARAMETER Experiment Name: At_Shoots__P Parameter: Tissue Value: Shoots vs. Whole Plant
  misc_feature: MA Experiment ID: 20000437 Result: Down-regulated in Transcription
  misc_feature: MA Experiment 20000437 PARAMETER Experiment Name: At_Drought_P Parameter: Age (day) Value: 8
  misc_feature: MA Experiment 20000437 PARAMETER Experiment Name: At_Drought_P Parameter: Organism Value: A. thaliana
  misc_feature: MA Experiment 20000437 PARAMETER Experiment Name: At_Drought_P Parameter: Plant Line Value: WS
  misc_feature: MA Experiment 20000437 PARAMETER Experiment Name: At_Drought_P Parameter: Timepoint (hr) Value: 24
  misc_feature: MA Experiment 20000437 PARAMETER Experiment Name: At_Drought_P Parameter: Tissue Value: Whole Plant
  misc_feature: MA Experiment 20000437 PARAMETER Experiment Name: At_Drought_P Parameter: Treatment Value: Drought vs. No Drought
  misc_feature: MA Experiment ID: 20000438 Result: Up-regulated in Transcription
  misc_feature: MA Experiment 20000438 PARAMETER Experiment Name: At_Shoots__P Parameter: Age (day) Value: 14
  misc_feature: MA Experiment 20000438 PARAMETER Experiment Name: At_Shoots__P Parameter: Tissue Value: Shoots vs. Whole Plant
  misc_feature: MA Experiment ID: 20001451 Result: Down-regulated in Transcription
  misc_feature: MA Experiment 20001451 PARAMETER Experiment Name: At_Far-red-induction_P Parameter: Age (day) Value: 7
  misc_feature: MA Experiment 20001451 PARAMETER Experiment Name: At_Far-red-induction_P Parameter: Light Value: Far-red vs. White
  misc_feature: MA Experiment 20001451 PARAMETER Experiment Name: At_Far-red-induction_P Parameter: Organism Value: A. thaliana
  misc_feature: MA Experiment 20001451 PARAMETER Experiment Name: At_Far-red-induction_P Parameter: Plant Line Value: Columbia
  misc_feature: MA Experiment 20001451 PARAMETER Experiment Name: At_Far-red-induction_P Parameter: Timepoint (hr) Value: 24
  misc_feature: MA Experiment 20001451 PARAMETER Experiment Name: At_Far-red-induction_P Parameter: Tissue Value: Whole Plant
  misc_feature: MA Experiment ID: 20001911 Result: Down-regulated in Transcription
  misc_feature: MA Experiment 20001911 PARAMETER Experiment Name: At_Drought_Reproduction_P Parameter: Age (day) Value: 40
  misc_feature: MA Experiment 20001911 PARAMETER Experiment Name: At_Drought_Reproduction_P Parameter: Organism Value: A. thaliana
  misc_feature: MA Experiment 20001911 PARAMETER Experiment Name: At_Drought_Reproduction_P Parameter: Plant Line Value: WS
  misc_feature: MA Experiment 20001911 PARAMETER Experiment Name: At_Drought_Reproduction_P Parameter: Timepoint (day) Value: 10
  misc_feature: MA Experiment 20001911 PARAMETER Experiment Name: At_Drought_Reproduction_P Parameter: Tissue Value: Flowers
  misc_feature: MA Experiment 20001911 PARAMETER Experiment Name: At_Drought_Reproduction_P Parameter: Treatment Value: Drought vs. No Drought
acaaaacatttccataaccaaaaaacctcaaaataaaaaaatgagaactctcttaccttcccatactccggcaacggtaacaacggcggcgagaagaagacacgtcatacattgcgccggtaagagatctgactctttctccattaattccagtagctccgattggcaaagctcctgcgccattctctcaagcaaagttaactcacaagaacaatctgaatccttatcttccaattccaatggatcatcatcctaccacgtttccgccgtcaacggtcacaacaacggcgccggagtctcagatttgaatctagttccattcaacaacaaccaatcgattcaatcgaagaagcctttaagtatttcagatctatctccagctccgatgcatggatctaacctccgtgtagcttatcaaggtgttcccggagcttactccgaagccgccgctggtaaagcttatcctaactgtcaagcgattccttgcgatcaattcgaagttgcgtttcaagcggttgagctttggatcgccgatcgcgctgttttacccgtcgaaaactcactcggcggttcgattcatcgtaattacgatcttctcctccgtcaccgtcttcacatcgtcggcgaagttcagcttccggttcatcattgtctcattgctcttcccggtgtacggaaagagtttctcactcgtgtgatctctcatcctcaaggactagctcaatgcgaacacacgttgactaaactcggtctcaacgtagctcgtgaagctgttgatgataccgccggtgcggcggagtttatcgctgcgaataatatccgtgacaccgccgcgattgcgagtgcacgcgcggcggagatctacggattggagattttggaagatgggatacaagatgacgcgagtaacgtcacgcgctttgtgatgttggcgcgtgaaccgattataccgagaactgatcggccgtttaagacgagtatagtgtttgctcacgagaaaggcacgtgcgttttgtttaaggttctctctgcttttgcgtttaggaacattagtttgactaagattgagtctaggccgaaccataatgttcctattaggctagtcgatgaggctaatgtgggcacggctaagcattttgagtatatgttttatatcgacttcgaggcttccatggccgagtcacgtgctcagaatgcgctttctgaggttcaagagtttacgtcgtttttacgggttttggggagttatccgatggatatgacttcttggtcaccatcgtcttcgtcctcttcgtcatcaacattttcattgtgacaacactaagatcataaccaacgtgtgaagtcaattgtgtatgtaaattggagaagaaagttgtaaacataattttggtgaaaataaattacttatttctccaaagatcaatcttttgtattttgctgtttacattattatactttggagtttcgtttgatcgtagttttattatgaaattgcaagttttgagttgatttattctc

SEQ ID NO: 104513 - protein, 437 aa, Arabidopsis thaliana
  peptide (1)..(437): Ceres Seq. ID no. 13615167
  misc_feature (136)..(315): Pfam Name: Prephenate dehydratase Pfam Description: Prephenate dehydratase
  misc_feature (14)..(437): Homolog of NCBI NO: 15226259 NR Description: prephenate dehydratase family [Arabidopsis
  misc_feature (14)..(437): Homolog of NCBI NO: 21593283 NR Description: putative chorismate mutase/prephenate dehydratase
  misc_feature (50)..(431): Homolog of NCBI NO: 18390869 NR Description: prephenate dehydratase family [Arabidopsis
  misc_feature (53)..(433): Homolog of NCBI NO: 38347597 NR Description: OSJNBa0042I15.10 [Oryza sativa (japonica
  misc_feature (13)..(431): Homolog of NCBI NO: 15230489 NR Description: prephenate dehydratase family [Arabidopsis >gi|2392772|gb|AAB70035.1|AAB70035 putative chloroplast
  misc_feature (32)..(424): Homolog of NCBI NO: 15242928 NR Description: prephenate dehydratase family [Arabidopsis
  misc_feature (113)..(421): Homolog of NCBI NO: 34394031 NR Description: putative prephenate dehydratase [Oryza sativa
  misc_feature (83)..(421): Homolog of NCBI NO: 15231489 NR Description: prephenate dehydratase family [Arabidopsis
  misc_feature (83)..(421): Homolog of NCBI NO: 21537054 NR Description: putative P-protein: chorismate mutase, prephenate
  misc_feature (117)..(420): Homolog of NCBI NO: 15221096 NR Description: prephenate dehydratase family [Arabidopsis
QNISITKKPQNKKMRTLLPSHTPATVTTAARRRHVIHCAGKRSDSFSINSSSSDWQSSCAILSSKVNSQEQSESLSSNSNGSSSYHVSAVNGHNNGAGVSDLNLVPFNNNQSIQSKKPLSISDLSPAPMHGSNLRVAYQGVPGAYSEAAAGKAYPNCQAIPCDQFEVAFQAVELWIADRAVLPVENSLGGSIHRNYDLLLRHRLHIVGEVQLPVHHCLIALPGVRKEFLTRVISHPQGLAQCEHTLTKLGLNVAREAVDDTAGAAEFIAANNIRDTAAIASARAAEIYGLEILEDGIQDDASNVTRFVMLAREPIIPRTDRPFKTSIVFAHEKGTCVLFKVLSAFAFRNISLTKIESRPNHNVPIRLVDEANVGTAKHFEYMFYIDFEASMAESRAQNALSEVQEFTSFLRVLGSYPMDMTSWSPSSSSSSSSTFSL

SEQ ID NO: 104514 - protein, 424 aa, Arabidopsis thaliana
  peptide (1)..(424): Ceres Seq. ID no. 13615168
  misc_feature (123)..(302): Pfam Name: Prephenate dehydratase Pfam Description: Prephenate dehydratase
  misc_feature (1)..(424): Homolog of NCBI NO: 15226259 NR Description: prephenate dehydratase family [Arabidopsis
  misc_feature (1)..(424): Homolog of NCBI NO: 21593283 NR Description: putative chorismate mutase/prephenate dehydratase
  misc_feature (37)..(418): Homolog of NCBI NO: 18390869 NR Description: prephenate dehydratase family [Arabidopsis
  misc_feature (40)..(420): Homolog of NCBI NO: 38347597 NR Description: OSJNBa0042I15.10 [Oryza sativa (japonica
  misc_feature (1)..(418): Homolog of NCBI NO: 15230489 NR Description: prephenate dehydratase family [Arabidopsis >gi|2392772|gb|AAB70035.1|AAB70035 putative chloroplast
  misc_feature (19)..(411): Homolog of NCBI NO: 15242928 NR Description: prephenate dehydratase family [Arabidopsis
  misc_feature (100)..(408): Homolog of NCBI NO: 34394031 NR Description: putative prephenate dehydratase [Oryza sativa
  misc_feature (70)..(408): Homolog of NCBI NO: 15231489 NR Description: prephenate dehydratase family [Arabidopsis
  misc_feature (70)..(408): Homolog of NCBI NO: 21537054 NR Description: putative P-protein: chorismate mutase, prephenate
  misc_feature (104)..(407): Homolog of NCBI NO: 15221096 NR Description: prephenate dehydratase family [Arabidopsis
MRTLLPSHTPATVTTAARRRHVIHCAGKRSDSFSINSSSSDWQSSCAILSSKVNSQEQSESLSSNSNGSSSYHVSAVNGHNNGAGVSDLNLVPFNNNQSIQSKKPLSISDLSPAPMHGSNLRVAYQGVPGAYSEAAAGKAYPNCQAIPCDQFEVAFQAVELWIADRAVLPVENSLGGSIHRNYDLLLRHRLHIVGEVQLPVHHCLIALPGVRKEFLTRVISHPQGLAQCEHTLTKLGLNVAREAVDDTAGAAEFIAANNIRDTAAIASARAAEIYGLEILEDGIQDDASNVTRFVMLAREPIIPRTDRPFKTSIVFAHEKGTCVLFKVLSAFAFRNISLTKIESRPNHNVPIRLVDEANVGTAKHFEYMFYIDFEASMAESRAQNALSEVQEFTSFLRVLGSYPMDMTSWSPSSSSSSSSTFSL

SEQ ID NO: 104515 - protein, 309 aa, Arabidopsis thaliana
  peptide (1)..(309): Ceres Seq. ID no. 13615169
  misc_feature (8)..(187): Pfam Name: Prephenate dehydratase Pfam Description: Prephenate dehydratase
  misc_feature (1)..(309): Homolog of NCBI NO: 15226259 NR Description: prephenate dehydratase family [Arabidopsis
  misc_feature (1)..(309): Homolog of NCBI NO: 21593283 NR Description: putative chorismate mutase/prephenate dehydratase
  misc_feature (1)..(303): Homolog of NCBI NO: 18390869 NR Description: prephenate dehydratase family [Arabidopsis
  misc_feature (1)..(305): Homolog of NCBI NO: 38347597 NR Description: OSJNBa0042I15.10 [Oryza sativa (japonica
  misc_feature (1)..(303): Homolog of NCBI NO: 15230489 NR Description: prephenate dehydratase family [Arabidopsis >gi|2392772|gb|AAB70035.1|AAB70035 putative chloroplast
  misc_feature (1)..(296): Homolog of NCBI NO: 15242928 NR Description: prephenate dehydratase family [Arabidopsis
  misc_feature (1)..(293): Homolog of NCBI NO: 34394031 NR Description: putative prephenate dehydratase [Oryza sativa
  misc_feature (1)..(293): Homolog of NCBI NO: 15231489 NR Description: prephenate dehydratase family [Arabidopsis
  misc_feature (1)..(293): Homolog of NCBI NO: 21537054 NR Description: putative P-protein: chorismate mutase, prephenate
  misc_feature (1)..(292): Homolog of NCBI NO: 15221096 NR Description: prephenate dehydratase family [Arabidopsis
MHGSNLRVAYQGVPGAYSEAAAGKAYPNCQAIPCDQFEVAFQAVELWIADRAVLPVENSLGGSIHRNYDLLLRHRLHIVGEVQLPVHHCLIALPGVRKEFLTRVISHPQGLAQCEHTLTKLGLNVAREAVDDTAGAAEFIAANNIRDTAAIASARAAEIYGLEILEDGIQDDASNVTRFVMLAREPIIPRTDRPFKTSIVFAHEKGTCVLFKVLSAFAFRNISLTKIESRPNHNVPIRLVDEANVGTAKHFEYMFYIDFEASMAESRAQNALSEVQEFTSFLRVLGSYPMDMTSWSPSSSSSSSSTFSL

SEQ ID NO: 104516 - DNA, 497 bp, Arabidopsis thaliana
  misc_feature (1)..(497): Ceres Seq. ID no. 13615170
  misc_feature: MA Experiment ID: 20000179 Result: Up-regulated in Transcription
  misc_feature: MA Experiment 20000179 PARAMETER Experiment Name: At_Germinating_Seeds_P Parameter: Age (hr) Value: 6 vs. 0
  misc_feature: MA Experiment 20000179 PARAMETER Experiment Name: At_Germinating_Seeds_P Parameter: Tissue Value: Germinating Seeds
  misc_feature: MA Experiment ID: 20000180 Result: Up-regulated in Transcription
  misc_feature: MA Experiment 20000180 PARAMETER Experiment Name: At_Germinating_Seeds_P Parameter: Age (hr) Value: 24 vs. 0
  misc_feature: MA Experiment 20000180 PARAMETER Experiment Name: At_Germinating_Seeds_P Parameter: Tissue Value: Germinating Seeds
  misc_feature: MA Experiment ID: 20000794 Result: Down-regulated in Transcription
  misc_feature: MA Experiment 20000794 PARAMETER Experiment Name: At_Petals_P Parameter: Age (day) Value: 23-25 days
  misc_feature: MA Experiment 20000794 PARAMETER Experiment Name: At_Petals_P Parameter: Plant Line Value: WS
  misc_feature: MA Experiment 20000794 PARAMETER Experiment Name: At_Petals_P Parameter: Tissue Value: Petals vs. Whole plant
  misc_feature: MA Experiment ID: 20001911 Result: Down-regulated in Transcription
  misc_feature: MA Experiment 20001911 PARAMETER Experiment Name: At_Drought_Reproduction_P Parameter: Age (day) Value: 40
  misc_feature: MA Experiment 20001911 PARAMETER Experiment Name: At_Drought_Reproduction_P Parameter: Organism Value: A. thaliana
  misc_feature: MA Experiment 20001911 PARAMETER Experiment Name: At_Drought_Reproduction_P Parameter: Plant Line Value: WS
  misc_feature: MA Experiment 20001911 PARAMETER Experiment Name: At_Drought_Reproduction_P Parameter: Timepoint (day) Value: 10
  misc_feature: MA Experiment 20001911 PARAMETER Experiment Name: At_Drought_Reproduction_P Parameter: Tissue Value: Flowers
  misc_feature: MA Experiment 20001911 PARAMETER Experiment Name: At_Drought_Reproduction_P Parameter: Treatment Value: Drought vs. No Drought
atgggtcagatccagtactccgacaaatatttcgatgatactttcgaatacaggcacgttgtacttcctccggaagttgctaagcttttacctaagaatcgtattctttcggaatgaatggagagccatcggagtgcagcaaagtcgtggatgggttcattacgcgattcatcgtcctgagccacatatcatgctctttaggaggcctcttaactaccagcaggagcaccaagctcagattgctaagtagaagaattatgcaaaattctccctaatctctgtttatgtctctcgtaaacgaggttttaaaatactactctgatgttttgttcctgtagttttttttattgtgttcatgaattctcttcagtggagaatcatgtgagtttggtagaacaacttttaatgttatgttaagtctggtcctttgctagactttggttggatccacgtttgaacttcttcatggttaagaatgaagacgttatttctcatgc

SEQ ID NO: 104517 - protein, 82 aa, Arabidopsis thaliana
  peptide (1)..(82): Ceres Seq. ID no. 13615171
  misc_feature (34)..(82): Homolog of NCBI NO: 15226297 NR Description: CDK-subunit 2 [Arabidopsis thaliana]
  misc_feature (38)..(79): Homolog of NCBI NO: 15226294 NR Description: CDK-subunit 1 [Arabidopsis thaliana]
  misc_feature (38)..(81): Homolog of NCBI NO: 15451612 NR Description: Putative cyclin-dependent kinase regulatory
  misc_feature (38)..(81): Homolog of NCBI NO: 40641585 NR Description: putative cyclin-dependent kinase regulatory
  misc_feature (38)..(82): Homolog of NCBI NO: 27435806 NR Description: CKS1 protein [Populus tremula x Populus
  misc_feature (39)..(68): Homolog of NCBI NO: 2493727 NR Description: PROBABLE CYCLIN-DEPENDENT KINASES REGULATORY
  misc_feature (38)..(76): Homolog of NCBI NO: 18158610 NR Description: CDC28 protein kinase 1-like protein
  misc_feature (39)..(69): Homolog of NCBI NO: 17136850 NR Description: Cyclin-dependent kinase subunit CG3738-PA
  misc_feature (38)..(70): Homolog of NCBI NO: 4502857 NR Description: CDC28 protein kinase 1B; CDC2-associated protein cell division control protein CKS1; NB4 apoptosis/differentiation
  misc_feature (38)..(70): Homolog of NCBI NO: 12847359 NR Description: unnamed protein product [Mus musculus]
WVRSSTPTNISMILSNTGTLYFLRKLLSFYLRIVFFRNEWRAIGVQQSRGWVHYAIHRPEPHIMLFRRPLNYQQEHQAQIAK

SEQ ID NO: 104518 - protein, 71 aa, Arabidopsis thaliana
  peptide (1)..(71): Ceres Seq. ID no. 13615172
  misc_feature (23)..(71): Homolog of NCBI NO: 15226297 NR Description: CDK-subunit 2 [Arabidopsis thaliana]
  misc_feature (27)..(68): Homolog of NCBI NO: 15226294 NR Description: CDK-subunit 1 [Arabidopsis thaliana]
  misc_feature (27)..(70): Homolog of NCBI NO: 15451612 NR Description: Putative cyclin-dependent kinase regulatory
  misc_feature (27)..(70): Homolog of NCBI NO: 40641585 NR Description: putative cyclin-dependent kinase regulatory
  misc_feature (27)..(71): Homolog of NCBI NO: 27435806 NR Description: CKS1 protein [Populus tremula x Populus
  misc_feature (28)..(57): Homolog of NCBI NO: 2493727 NR Description: PROBABLE CYCLIN-DEPENDENT KINASES REGULATORY
  misc_feature (27)..(65): Homolog of NCBI NO: 18158610 NR Description: CDC28 protein kinase 1-like protein
  misc_feature (28)..(58): Homolog of NCBI NO: 17136850 NR Description: Cyclin-dependent kinase subunit CG3738-PA
  misc_feature (27)..(59): Homolog of NCBI NO: 4502857 NR Description: CDC28 protein kinase 1B; CDC2-associated protein cell division control protein CKS1; NB4 apoptosis/differentiation
  misc_feature (27)..(59): Homolog of NCBI NO: 12847359 NR Description: unnamed protein product [Mus musculus]
MILSNTGTLYFLRKLLSFYLRIVFFRNEWRAIGVQQSRGWVHYAIHRPEPHIMLFRRPLNYQQEHQAQIAK

SEQ ID NO: 104519 - protein, 53 aa, Arabidopsis thaliana
  peptide (1)..(53): Ceres Seq. ID no. 13615173
MNGEPSECSKVVDGFITRFIVLSHISCSLGGLLTTSRSTKLRLLSRRIMQNSP

SEQ ID NO: 104520 - DNA, 1562 bp, Arabidopsis thaliana
  misc_feature (1)..(1562): Ceres Seq. ID no. 13615174
  misc_feature: MA Experiment ID: 108434 Result: Down-regulated in Transcription
  misc_feature: MA Experiment 108434 PARAMETER Experiment Name: At_Root_Tips_cDNA_P Parameter: Tissue Value: Root Tips
  misc_feature: MA Experiment ID: 108594 Result: Up-regulated in Transcription
  misc_feature: MA Experiment 108594 PARAMETER Experiment Name: At_Ler-rhl_Root_cDNA_P Parameter: Plant Line Value: null
  misc_feature: MA Experiment ID: 108595 Result: Up-regulated in Transcription
  misc_feature: MA Experiment 108595 PARAMETER Experiment Name: At_Ler-pi_Ovule_cDNA_P Parameter: Plant Line Value: null
  misc_feature: MA Experiment ID: 108608 Result: Down-regulated in Transcription
  misc_feature: MA Experiment 108608 PARAMETER Experiment Name: At_100uM_ABA_cDNA_P Parameter: Timepoint (hr) Value: 1
  misc_feature: MA Experiment 108608 PARAMETER Experiment Name: At_100uM_ABA_cDNA_P Parameter: Tissue Value: Aerial
  misc_feature: MA Experiment 108608 PARAMETER Experiment Name: At_100uM_ABA_cDNA_P Parameter: Treatment Value: 100uM ABA vs. No Treatment
  misc_feature: MA Experiment ID: 20000111 Result: Down-regulated in Transcription
  misc_feature: MA Experiment 20000111 PARAMETER Experiment Name: At_42deg_Heat_cDNA_P Parameter: Temperature (deg C) Value: 42 vs. 22
  misc_feature: MA Experiment 20000111 PARAMETER Experiment Name: At_42deg_Heat_cDNA_P Parameter: Timepoint (hr) Value: 6
  misc_feature: MA Experiment 20000111 PARAMETER Experiment Name: At_42deg_Heat_cDNA_P Parameter: Tissue Value: Aerial
  misc_feature: MA Experiment ID: 20000166 Result: Down-regulated in Transcription
  misc_feature: MA Experiment 20000166 PARAMETER Experiment Name: At_100uM_ABA_P Parameter: Age (day) Value: 14
  misc_feature: MA Experiment 20000166 PARAMETER Experiment Name: At_100uM_ABA_P Parameter: Organism Value: A. thaliana
  misc_feature: MA Experiment 20000166 PARAMETER Experiment Name: At_100uM_ABA_P Parameter: Plant Line Value: WS
  misc_feature: MA Experiment 20000166 PARAMETER Experiment Name: At_100uM_ABA_P Parameter: Timepoint (hr) Value: 1
  misc_feature: MA Experiment 20000166 PARAMETER Experiment Name: At_100uM_ABA_P Parameter: Tissue Value: Aerial
  misc_feature: MA Experiment 20000166 PARAMETER Experiment Name: At_100uM_ABA_P Parameter: Treatment Value: 100uM ABA vs. No Treatment
  misc_feature: MA Experiment ID: 20000173 Result: Down-regulated in Transcription
  misc_feature: MA Experiment 20000173 PARAMETER Experiment Name: At_42deg_Heat_P Parameter: Age (day) Value: 14
  misc_feature: MA Experiment 20000173 PARAMETER Experiment Name: At_42deg_Heat_P Parameter: Organism Value: A. thaliana
  misc_feature: MA Experiment 20000173 PARAMETER Experiment Name: At_42deg_Heat_P Parameter: Plant Line Value: WS
  misc_feature: MA Experiment 20000173 PARAMETER Experiment Name: At_42deg_Heat_P Parameter: Temperature (deg C) Value: 42 vs. 22
  misc_feature: MA Experiment 20000173 PARAMETER Experiment Name: At_42deg_Heat_P Parameter: Timepoint (hr) Value: 6
  misc_feature: MA Experiment 20000173 PARAMETER Experiment Name: At_42deg_Heat_P Parameter: Tissue Value: Aerial
  misc_feature: MA Experiment ID: 20000184 Result: Down-regulated in Transcription
  misc_feature: MA Experiment 20000184 PARAMETER Experiment Name: At_Shoots__P Parameter: Age (day) Value: 7
  misc_feature: MA Experiment 20000184 PARAMETER Experiment Name: At_Shoots__P Parameter: Tissue Value: Shoots vs. Whole Plant
  misc_feature: MA Experiment ID: 20000213 Result: Up-regulated in Transcription
  misc_feature: MA Experiment 20000213 PARAMETER Experiment Name: At_4deg_Cold_P Parameter: Timepoint (hr) Value: 2
  misc_feature: MA Experiment ID: 20000437 Result: Down-regulated in Transcription
  misc_feature: MA Experiment 20000437 PARAMETER Experiment Name: At_Drought_P Parameter: Age (day) Value: 8
  misc_feature: MA Experiment 20000437 PARAMETER Experiment Name: At_Drought_P Parameter: Organism Value: A. thaliana
  misc_feature: MA Experiment 20000437 PARAMETER Experiment Name: At_Drought_P Parameter: Plant Line Value: WS
  misc_feature: MA Experiment 20000437 PARAMETER Experiment Name: At_Drought_P Parameter: Timepoint (hr) Value: 24
  misc_feature: MA Experiment 20000437 PARAMETER Experiment Name: At_Drought_P Parameter: Tissue Value: Whole Plant
  misc_feature: MA Experiment 20000437 PARAMETER Experiment Name: At_Drought_P Parameter: Treatment Value: Drought vs. No Drought
  misc_feature: MA Experiment ID: 20000438 Result: Down-regulated in Transcription
  misc_feature: MA Experiment 20000438 PARAMETER Experiment Name: At_Shoots__P Parameter: Age (day) Value: 14
  misc_feature: MA Experiment 20000438 PARAMETER Experiment Name: At_Shoots__P Parameter: Tissue Value: Shoots vs. Whole Plant
  misc_feature: MA Experiment ID: 20001557 Result: Up-regulated in Transcription
  misc_feature: MA Experiment 20001557 PARAMETER Experiment Name: At_Drought_Soil_Dry_P Parameter: Age (day) Value: 27
  misc_feature: MA Experiment 20001557 PARAMETER Experiment Name: At_Drought_Soil_Dry_P Parameter: Organism Value: A. thaliana
  misc_feature: MA Experiment 20001557 PARAMETER Experiment Name: At_Drought_Soil_Dry_P Parameter: Plant Line Value: WS
  misc_feature: MA Experiment 20001557 PARAMETER Experiment Name: At_Drought_Soil_Dry_P Parameter: Post Timepoint (hr) Value: 3
  misc_feature: MA Experiment 20001557 PARAMETER Experiment Name: At_Drought_Soil_Dry_P Parameter: Post-Treatment Value: Re-Water vs. No Drought
  misc_feature: MA Experiment 20001557 PARAMETER Experiment Name: At_Drought_Soil_Dry_P Parameter: Timepoint (day) Value: 13
  misc_feature: MA Experiment 20001557 PARAMETER Experiment Name: At_Drought_Soil_Dry_P Parameter: Treatment Value: Drought vs. No Drought
  misc_feature: MA Experiment ID: 20001558 Result: Up-regulated in Transcription
  misc_feature: MA Experiment 20001558 PARAMETER Experiment Name: At_Drought_Soil_Dry_P Parameter: Age (day) Value: 27
  misc_feature: MA Experiment 20001558 PARAMETER Experiment Name: At_Drought_Soil_Dry_P Parameter: Organism Value: A. thaliana
  misc_feature: MA Experiment 20001558 PARAMETER Experiment Name: At_Drought_Soil_Dry_P Parameter: Plant Line Value: WS
  misc_feature: MA Experiment 20001558 PARAMETER Experiment Name: At_Drought_Soil_Dry_P Parameter: Post Timepoint (hr) Value: 6
  misc_feature: MA Experiment 20001558 PARAMETER Experiment Name: At_Drought_Soil_Dry_P Parameter: Post-Treatment Value: Re-Water vs. No Drought
  misc_feature: MA Experiment 20001558 PARAMETER Experiment Name: At_Drought_Soil_Dry_P Parameter: Timepoint (day) Value: 13
  misc_feature: MA Experiment 20001558 PARAMETER Experiment Name: At_Drought_Soil_Dry_P Parameter: Treatment Value: Drought vs. No Drought
  misc_feature: MA Experiment ID: 20001911 Result: Down-regulated in Transcription
  misc_feature: MA Experiment 20001911 PARAMETER Experiment Name: At_Drought_Reproduction_P Parameter: Age (day) Value: 40
  misc_feature: MA Experiment 20001911 PARAMETER Experiment Name: At_Drought_Reproduction_P Parameter: Organism Value: A. thaliana
  misc_feature: MA Experiment 20001911 PARAMETER Experiment Name: At_Drought_Reproduction_P Parameter: Plant Line Value: WS
  misc_feature: MA Experiment 20001911 PARAMETER Experiment Name: At_Drought_Reproduction_P Parameter: Timepoint (day) Value: 10
  misc_feature: MA Experiment 20001911 PARAMETER Experiment Name: At_Drought_Reproduction_P Parameter: Tissue Value: Flowers
  misc_feature: MA Experiment 20001911 PARAMETER Experiment Name: At_Drought_Reproduction_P Parameter: Treatment Value: Drought vs. No Drought
acaaaacccattttaatggcggacgttagaaaccctacaaaaaatcatcatggtcatcatcatcttcatgctctcttgatcccatatccatttcaagggcatgtaaacccatttgtacacttagccatcaagctcgcgtcacaggggatcaccgtcactttcgtcaacactcattacatccaccaccagatcacaaacggctccgatggagatattttcgctggagttaggtcagagtctggccttgacataaggtacgcgacggtttccgatggtttaccggtcggatttgaccggtcgttgaaccatgacacgtaccaatcgtcgctgttgcacgtgttctatgcgcatgtggaagagcttgtggcgagtcttgttggaggagacggcggtgtgaatgtgatgatcgccgacacattctttgtttggccgtctgtggtggctaggaagtttggtttggtttgtgtctcgttttggaccgaagctgctttagtattttcactttattaccatatggatctgcttcggattcatggccattttggtgctcaagaaacccgcagcgatctaatcgactacattcccggagtcgccgcaattaacccaaaagacacggcgtcgtatcttcaagaaaccgacacgtcatcagtagttcatcaaatcatcttcaaagcattcgaagacgtgaaaaaagtcgattttgtactctgcaacacaattcagcaattcgaagacaaaacaatcaaagccctaaacacaaaaatcccattttacgcaatcggaccaatcataccattcaataaccaaaccggttcagtcacaacctcactctggtctgaatcagattgtacacaatggctcaacactaaaccaaaaagctccgtactttatatctcctttggtagttacgctcatgtcacaaagaaggatcttgttgagatagctcacgggattttgttgagtaaagttaatttcgtttgggtggtgagaccagacattgttagttcagacgaaaccaatccattaccagaagggtttgaaacagaagctggagatcgtgggattgtaataccatggtgttgtcaaatgacggttttgtcacatgagagtgttggtgggtttttgacacattgtggttggaactcgatattggagacgatttggtgtgaggttcctgtgttgtgttttccattgttgactgatcaggttacgaataggaagcttgtggttgatgattgggagattgggattaatctttgtgaagataagagtgattttggtagagatgaagttgggaggaatattaaccgtttgatgtgtggtgtttcgaaagagaagatcggacgggttaaaatgagtttggaaggtgcggtgagaaacagtggatcttcttcggagatgaatttaggtttgtttattgatggacttttgtctaaggttggtttatctaatgggaaagcttaaattctatgaaaactaaaaaaaaaaaatgtatgaatttttgtcaaattttttatttggggaaactactgtctcttaaatttaaatttacttttttcttt

SEQ ID NO: 104521 - protein, 487 aa, Arabidopsis thaliana
  peptide (1)..(487): Ceres Seq. ID no. 13615175
  misc_feature (6)..(487): Homolog of NCBI NO: 15226332 NR Description: glycosyltransferase family [Arabidopsis thaliana]
  misc_feature (6)..(487): Homolog of NCBI NO: 21537408 NR Description: putative glucosyltransferase [Arabidopsis
  misc_feature (23)..(480): Homolog of NCBI NO: 15228063 NR Description: UDP-glycosyltransferase family [Arabidopsis
  misc_feature (80)..(486): Homolog of NCBI NO: 37534766 NR Description: putative putative glucosyltransferase [Oryza
  misc_feature (23)..(78): Homolog of NCBI NO: 37534766 NR Description: putative putative glucosyltransferase [Oryza
  misc_feature (17)..(484): Homolog of NCBI NO: 15219867 NR Description: UDP-glycosyltransferase family [Arabidopsis
  misc_feature (23)..(477): Homolog of NCBI NO: 25286821 NR Description: T16E15.2 protein - Arabidopsis thaliana
  misc_feature (17)..(477): Homolog of NCBI NO: 15219876 NR Description: glycosyltransferase family [Arabidopsis thaliana]
  misc_feature (23)..(478): Homolog of NCBI NO: 15218268 NR Description: UDP-glucose glucosyltransferase, putative thaliana] >gi|8052539|gb|AAF71803.1|AC013430_12 F3F9.19
  misc_feature (23)..(441): Homolog of NCBI NO: 19911203 NR Description: glucosyltransferase-10 [Vigna angularis]
TKPILMADVRNPTKNHHGHHHLHALLIPYPFQGHVNPFVHLAIKLASQGITVTFVNTHYIHHQITNGSDGDIFAGVRSESGLDIRYATVSDGLPVGFDRSLNHDTYQSSLLHVFYAHVEELVASLVGGDGGVNVMIADTFFVWPSVVARKFGLVCVSFWTEAALVFSLYYHMDLLRIHGHFGAQETRSDLIDYIPGVAAINPKDTASYLQETDTSSVVHQIIFKAFEDVKKVDFVLCNTIQQFEDKTIKALNTKIPFYAIGPIIPFNNQTGSVTTSLWSESDCTQWLNTKPKSSVLYISFGSYAHVTKKDLVEIAHGILLSKVNFVWVVRPDIVSSDETNPLPEGFETEAGDRGIVIPWCCQMTVLSHESVGGFLTHCGWNSILETIWCEVPVLCFPLLTDQVTNRKLVVDDWEIGINLCEDKSDFGRDEVGRNINRLMCGVSKEKIGRVKMSLEGAVRNSGSSSEMNLGLFIDGLLSKVGLSNGKA

SEQ ID NO: 104522 - protein, 482 aa, Arabidopsis thaliana
  peptide (1)..(482): Ceres Seq. ID no. 13615176
  misc_feature (1)..(482): Homolog of NCBI NO: 15226332 NR Description: glycosyltransferase family [Arabidopsis thaliana]
  misc_feature (1)..(482): Homolog of NCBI NO: 21537408 NR Description: putative glucosyltransferase [Arabidopsis
  misc_feature (18)..(475): Homolog of NCBI NO: 15228063 NR Description: UDP-glycosyltransferase family [Arabidopsis
  misc_feature (75)..(481): Homolog of NCBI NO: 37534766 NR Description: putative putative glucosyltransferase [Oryza
  misc_feature (18)..(73): Homolog of NCBI NO: 37534766 NR Description: putative putative glucosyltransferase [Oryza
  misc_feature (12)..(479): Homolog of NCBI NO: 15219867 NR Description: UDP-glycosyltransferase family [Arabidopsis
  misc_feature (18)..(472): Homolog of NCBI NO: 25286821 NR Description: T16E15.2 protein - Arabidopsis thaliana
  misc_feature (12)..(472): Homolog of NCBI NO: 15219876 NR Description: glycosyltransferase family [Arabidopsis thaliana]
  misc_feature (18)..(473): Homolog of NCBI NO: 15218268 NR Description: UDP-glucose glucosyltransferase, putative thaliana] >gi|8052539|gb|AAF71803.1|AC013430_12 F3F9.19
  misc_feature (18)..(436): Homolog of NCBI NO: 19911203 NR Description: glucosyltransferase-10 [Vigna angularis]
MADVRNPTKNHHGHHHLHALLIPYPFQGHVNPFVHLAIKLASQGITVTFVNTHYIHHQITNGSDGDIFAGVRSESGLDIRYATVSDGLPVGFDRSLNHDTYQSSLLHVFYAHVEELVASLVGGDGGVNVMIADTFFVWPSVVARKFGLVCVSFWTEAALVFSLYYHMDLLRIHGHFGAQETRSDLIDYIPGVAAINPKDTASYLQETDTSSVVHQIIFKAFEDVKKVDFVLCNTIQQFEDKTIKALNTKIPFYAIGPIIPFNNQTGSVTTSLWSESDCTQWLNTKPKSSVLYISFGSYAHVTKKDLVEIAHGILLSKVNFVWVVRPDIVSSDETNPLPEGFETEAGDRGIVIPWCCQMTVLSHESVGGFLTHCGWNSILETIWCEVPVLCFPLLTDQVTNRKLVVDDWEIGINLCEDKSDFGRDEVGRNINRLMCGVSKEKIGRVKMSLEGAVRNSGSSSEMNLGLFIDGLLSKVGLSNGKA

SEQ ID NO: 104523 - protein, 353 aa, Arabidopsis thaliana
  peptide (1)..(353): Ceres Seq. ID no. 13615177
  misc_feature (1)..(353): Homolog of NCBI NO: 15226332 NR Description: glycosyltransferase family [Arabidopsis thaliana]
  misc_feature (1)..(353): Homolog of NCBI NO: 21537408 NR Description: putative glucosyltransferase [Arabidopsis
  misc_feature (1)..(346): Homolog of NCBI NO: 15228063 NR Description: UDP-glycosyltransferase family [Arabidopsis
  misc_feature (1)..(352): Homolog of NCBI NO: 37534766 NR Description: putative putative glucosyltransferase [Oryza
  misc_feature (1)..(350): Homolog of NCBI NO: 15219867 NR Description: UDP-glycosyltransferase family [Arabidopsis
  misc_feature (1)..(343): Homolog of NCBI NO: 25286821 NR Description: T16E15.2 protein - Arabidopsis thaliana
  misc_feature (1)..(343): Homolog of NCBI NO: 15219876 NR Description: glycosyltransferase family [Arabidopsis thaliana]
  misc_feature (1)..(344): Homolog of NCBI NO: 15218268 NR Description: UDP-glucose glucosyltransferase, putative thaliana] >gi|8052539|gb|AAF71803.1|AC013430_12 F3F9.19
  misc_feature (1)..(307): Homolog of NCBI NO: 19911203 NR Description: glucosyltransferase-10 [Vigna angularis]
  misc_feature (1)..(343): Homolog of NCBI NO: 15219870 NR Description: UDP-glycosyltransferase family [Arabidopsis
MIADTFFVWPSVVARKFGLVCVSFWTEAALVFSLYYHMDLLRIHGHFGAQETRSDLIDYIPGVAAINPKDTASYLQETDTSSVVHQIIFKAFEDVKKVDFVLCNTIQQFEDKTIKALNTKIPFYAIGPIIPFNNQTGSVTTSLWSESDCTQWLNTKPKSSVLYISFGSYAHVTKKDLVEIAHGILLSKVNFVWVVRPDIVSSDETNPLPEGFETEAGDRGIVIPWCCQMTVLSHESVGGFLTHCGWNSILETIWCEVPVLCFPLLTDQVTNRKLVVDDWEIGINLCEDKSDFGRDEVGRNINRLMCGVSKEKIGRVKMSLEGAVRNSGSSSEMNLGLFIDGLLSKVGLSNGKA

SEQ ID NO: 104524 - DNA, 1396 bp, Arabidopsis thaliana
  misc_feature (1)..(1396): Ceres Seq. ID no. 13615198
  misc_feature: MA Experiment ID: 108435 Result: Down-regulated in Transcription
  misc_feature: MA Experiment 108435 PARAMETER Experiment Name: At_stm_Mutants_cDNA_P Parameter: Plant Line Value: wt Landsburg vs stm
  misc_feature: MA Experiment 108435 PARAMETER Experiment Name: At_stm_Mutants_cDNA_P Parameter: Tissue Value: Shoot Apical Meristem Region
  misc_feature: MA Experiment ID: 108462 Result: Up-regulated in Transcription
  misc_feature: MA Experiment 108462 PARAMETER Experiment Name: At_Germinating_Seeds_cDNA_P Parameter: Age (day) Value: 2 vs. 0
  misc_feature: MA Experiment 108462 PARAMETER Experiment Name: At_Germinating_Seeds_cDNA_P Parameter: Tissue Value: Germinating Seeds
  misc_feature: MA Experiment ID: 108577 Result: Down-regulated in Transcription
  misc_feature: MA Experiment 108577 PARAMETER Experiment Name: At_42deg_Heat_cDNA_P Parameter: Temperature (deg C) Value: 42 vs. 22
  misc_feature: MA Experiment 108577 PARAMETER Experiment Name: At_42deg_Heat_cDNA_P Parameter: Timepoint (hr) Value: 6
  misc_feature: MA Experiment 108577 PARAMETER Experiment Name: At_42deg_Heat_cDNA_P Parameter: Tissue Value: Aerial
  misc_feature: MA Experiment ID: 108595 Result: Down-regulated in Transcription
  misc_feature: MA Experiment 108595 PARAMETER Experiment Name: At_Ler-pi_Ovule_cDNA_P Parameter: Plant Line Value: null
  misc_feature: MA Experiment ID: 108668 Result: Down-regulated in Transcription
  misc_feature: MA Experiment 108668 PARAMETER Experiment Name: At_2mM_SA_cDNA_P Parameter: Plant Line Value: WS
  misc_feature: MA Experiment 108668 PARAMETER Experiment Name: At_2mM_SA_cDNA_P Parameter: Timepoint (hr) Value: 6
  misc_feature: MA Experiment 108668 PARAMETER Experiment Name: At_2mM_SA_cDNA_P Parameter: Treatment Value: 2mM SA vs. No Treatment
  misc_feature: MA Experiment ID: 20000069 Result: Down-regulated in Transcription
  misc_feature: MA Experiment 20000069 PARAMETER Experiment Name: At_100uM_ABA_Mutants_cDNA_P Parameter: Plant Line Value: CS23
  misc_feature: MA Experiment 20000069 PARAMETER Experiment Name: At_100uM_ABA_Mutants_cDNA_P Parameter: Timepoint (hr) Value: 6
  misc_feature: MA Experiment 20000069 PARAMETER Experiment Name: At_100uM_ABA_Mutants_cDNA_P Parameter: Tissue Value: Aerial
  misc_feature: MA Experiment 20000069 PARAMETER Experiment Name: At_100uM_ABA_Mutants_cDNA_P Parameter: Treatment Value: 100uM ABA vs. No Treatment
  misc_feature: MA Experiment ID: 20000184 Result: Up-regulated in Transcription
  misc_feature: MA Experiment 20000184 PARAMETER Experiment Name: At_Shoots__P Parameter: Age (day) Value: 7
  misc_feature: MA Experiment 20000184 PARAMETER Experiment Name: At_Shoots__P Parameter: Tissue Value: Shoots vs. Whole Plant
  misc_feature: MA Experiment ID: 20000224 Result: Down-regulated in Transcription
  misc_feature: MA Experiment ID: 20000437 Result: Down-regulated in Transcription
  misc_feature: MA Experiment 20000437 PARAMETER Experiment Name: At_Drought_P Parameter: Age (day) Value: 8
  misc_feature: MA Experiment 20000437 PARAMETER Experiment Name: At_Drought_P Parameter: Organism Value: A. thaliana
  misc_feature: MA Experiment 20000437 PARAMETER Experiment Name: At_Drought_P Parameter: Plant Line Value: WS
  misc_feature: MA Experiment 20000437 PARAMETER Experiment Name: At_Drought_P Parameter: Timepoint (hr) Value: 24
  misc_feature: MA Experiment 20000437 PARAMETER Experiment Name: At_Drought_P Parameter: Tissue Value: Whole Plant
  misc_feature: MA Experiment 20000437 PARAMETER Experiment Name: At_Drought_P Parameter: Treatment Value: Drought vs. No Drought
  misc_feature: MA Experiment ID: 20001911 Result: Down-regulated in Transcription
  misc_feature: MA Experiment 20001911 PARAMETER Experiment Name: At_Drought_Reproduction_P Parameter: Age (day) Value: 40
  misc_feature: MA Experiment 20001911 PARAMETER Experiment Name: At_Drought_Reproduction_P Parameter: Organism Value: A. thaliana
  misc_feature: MA Experiment 20001911 PARAMETER Experiment Name: At_Drought_Reproduction_P Parameter: Plant Line Value: WS
  misc_feature: MA Experiment 20001911 PARAMETER Experiment Name: At_Drought_Reproduction_P Parameter: Timepoint (day) Value: 10
  misc_feature: MA Experiment 20001911 PARAMETER Experiment Name: At_Drought_Reproduction_P Parameter: Tissue Value: Flowers
  misc_feature: MA Experiment 20001911 PARAMETER Experiment Name: At_Drought_Reproduction_P Parameter: Treatment Value: Drought vs. No Drought
ctctctcttttccaccggcgaccattcattctctctcctcctcctcctcctcctcctcctcagcttcctccattgctccttaaccctcattcctcgatttgttcttctcttcaccatttcccctttttaccctttttctactcagacgtgacggcgactttttattcctgtgtctcccacctttgactcgccctggggggatttttttttgctccagaggcgaaagaaacaaaaaaaagcaatggggtttctccgttgtctccagctgctgctgcttctgtttctatctcttcgtctacaaaagctctctgctcaatcttcttcacccaatgcttcttcttcttcttcactcgatgctcttcttcaagattactcttttagagccttgcttcgtcctcgtaccggcattctctacgaggctactactgttccttccaatttgactgggatcaaactcgctgctatgagactcagaagcggaagctttagaaaacgtggagtcactccttttaatgagttctcaattcccagcggcgttatcgtcaagccgtatgtgacaaggcttgttttggtttatcaaaacctagctaatttctctcacttgtattaccctttgtctggttatgattatgtcgctcctgtcttgggtcttctcgcttacgatgctaagaatctctctgcgcttaatttgcctcagcttgatttaagggtgtctaatgatcctatcagaatcgatttctctgatctggaacgaatcccgcaagggtctagtgctaagtgtgttagattcgattctaaaggtgaagcgagtttcagcgattcgattcagcctggaaacacatgcgagactgagcatcagggacatttctctgtggtggtgaaatctgtggcttctgctccgagtctagctcctcctgggattgagagtaagaagaagaagaagagctctgattccaattccaagacttggatcattgttgggtcggtggttggtggattgatactgttggggcttttactgtttctggttttgagatgtcgaaattacaagaagcaagagaaaatgagggagatggagagagctggagagacaggggaagctctgaggatgactcaggttggtgaaacaagagcaccaactgctactacgactcgtacacaaccaatgcttgaaaccgaatacgcagcttaggatacttttgtgtacatcatcatcatcatcacatcttcttgatcatctgttactgtctttttctttttttcttctacaattattcttcttttggtaaagtgtttctttttctgattattttttctttgtggtaagcaagttgatacttccacattcatcttgtttctctgctggtgataaggaaataagtaatattgttttctt

SEQ ID NO: 104525 - protein, 316 aa, Arabidopsis thaliana; identical to SEQ ID NO: 27612
  peptide (1)..(316): Ceres Seq. ID no. 13615199
  misc_feature (1)..(316): Homolog of NCBI NO: 18398173 NR Description: expressed protein [Arabidopsis thaliana]
  misc_feature (1)..(316): Homolog of NCBI NO: 21594262 NR Description: unknown [Arabidopsis thaliana]
  misc_feature (1)..(316): Homolog of NCBI NO: 27542756 NR Description: hypothetical protein-like protein [Sorghum
  misc_feature (1)..(316): Homolog of NCBI NO: 27542758 NR Description: hypothetical protein-like protein [Sorghum
  misc_feature (4)..(314): Homolog of NCBI NO: 25354607 NR Description: F16P17.15 [imported] - Arabidopsis thaliana
  misc_feature (7)..(311): Homolog of NCBI NO: 15234077 NR Description: expressed protein [Arabidopsis thaliana]
  misc_feature (7)..(311): Homolog of NCBI NO: 28393831 NR Description: unknown protein [Arabidopsis thaliana]
  misc_feature (3)..(217): Homolog of NCBI NO: 30685980 NR Description: expressed protein [Arabidopsis thaliana] unknown protein [Arabidopsis thaliana]
  misc_feature (25)..(217): Homolog of NCBI NO: 7486583 NR Description: hypothetical protein F7H19.80 - Arabidopsis >gi|3292815|emb|CAA19805.1| hypothetical protein [Arabidopsis >gi|7269137|emb|CAB79245.1| hypothetical protein [Arabidopsis
  misc_feature (9)..(313): Homolog of NCBI NO: 34898284 NR Description: hypothetical protien~similar to Arabidopsis

SEQ ID NO: 104526 - protein, 242 aa, Arabidopsis thaliana; identical to SEQ ID NO: 27613
  peptide (1)..(242): Ceres Seq. ID no. 13615200
  misc_feature (1)..(242): Homolog of NCBI NO: 18398173 NR Description: expressed protein [Arabidopsis thaliana]
  misc_feature (1)..(242): Homolog of NCBI NO: 21594262 NR Description: unknown [Arabidopsis thaliana]
  misc_feature (1)..(242): Homolog of NCBI NO: 27542756 NR Description: hypothetical protein-like protein [Sorghum
  misc_feature (1)..(242): Homolog of NCBI NO: 27542758 NR Description: hypothetical protein-like protein [Sorghum
  misc_feature (1)..(240): Homolog of NCBI NO: 25354607 NR Description: F16P17.15 [imported] - Arabidopsis thaliana
  misc_feature (1)..(237): Homolog of NCBI NO: 15234077 NR Description: expressed protein [Arabidopsis thaliana]
  misc_feature (1)..(237): Homolog of NCBI NO: 28393831 NR Description: unknown protein [Arabidopsis thaliana]
  misc_feature (1)..(143): Homolog of NCBI NO: 30685980 NR Description: expressed protein [Arabidopsis thaliana] unknown protein [Arabidopsis thaliana]
  misc_feature (1)..(143): Homolog of NCBI NO: 7486583 NR Description: hypothetical protein F7H19.80 - Arabidopsis >gi|3292815|emb|CAA19805.1| hypothetical protein [Arabidopsis >gi|7269137|emb|CAB79245.1| hypothetical protein [Arabidopsis
  misc_feature (1)..(239): Homolog of NCBI NO: 34898284 NR Description: hypothetical protien~similar to Arabidopsis

SEQ ID NO: 104527 - DNA, 939 bp, Arabidopsis thaliana
  misc_feature (1)..(939): Ceres Seq. ID no. 13615219
  misc_feature: MA Experiment ID: 108434 Result: Up-regulated in Transcription
  misc_feature: MA Experiment 108434 PARAMETER Experiment Name: At_Root_Tips_cDNA_P Parameter: Tissue Value: Root Tips
  misc_feature: MA Experiment ID: 108463 Result: Down-regulated in Transcription
  misc_feature: MA Experiment 108463 PARAMETER Experiment Name: At_Germinating_Seeds_cDNA_P Parameter: Age (day) Value: 3 vs. 0
  misc_feature: MA Experiment 108463 PARAMETER Experiment Name: At_Germinating_Seeds_cDNA_P Parameter: Tissue Value: Germinating Seeds
  misc_feature: MA Experiment ID: 108464 Result: Down-regulated in Transcription
  misc_feature: MA Experiment 108464 PARAMETER Experiment Name: At_Germinating_Seeds_cDNA_P Parameter: Age (day) Value: 4 vs. 0
  misc_feature: MA Experiment 108464 PARAMETER Experiment Name: At_Germinating_Seeds_cDNA_P Parameter: Tissue Value: Germinating Seeds
  misc_feature: MA Experiment ID: 108561 Result: Down-regulated in Transcription
  misc_feature: MA Experiment 108561 PARAMETER Experiment Name: At_100uM_ABA_cDNA_P Parameter: Timepoint (hr) Value: 6
  misc_feature: MA Experiment 108561 PARAMETER Experiment Name: At_100uM_ABA_cDNA_P Parameter: Tissue Value: Aerial
  misc_feature: MA Experiment 108561 PARAMETER Experiment Name: At_100uM_ABA_cDNA_P Parameter: Treatment Value: 100uM ABA vs. No Treatment
  misc_feature: MA Experiment ID: 108595 Result: Down-regulated in Transcription
  misc_feature: MA Experiment 108595 PARAMETER Experiment Name: At_Ler-pi_Ovule_cDNA_P Parameter: Plant Line Value: null
  misc_feature: MA Experiment ID: 108605 Result: Down-regulated in Transcription
  misc_feature: MA Experiment 108605 PARAMETER Experiment Name: At_100uM_ABA_cDNA_P Parameter: Timepoint (hr) Value: 6
  misc_feature: MA Experiment 108605 PARAMETER Experiment Name: At_100uM_ABA_cDNA_P Parameter: Tissue Value: Aerial
  misc_feature: MA Experiment 108605 PARAMETER Experiment Name: At_100uM_ABA_cDNA_P Parameter: Treatment Value: 100uM ABA vs. No Treatment
  misc_feature: MA Experiment ID: 108607 Result: Down-regulated in Transcription
  misc_feature: MA Experiment 108607 PARAMETER Experiment Name: At_100uM_ABA_cDNA_P Parameter: Timepoint (hr) Value: 4
  misc_feature: MA Experiment 108607 PARAMETER Experiment Name: At_100uM_ABA_cDNA_P Parameter: Tissue Value: Aerial
  misc_feature: MA Experiment 108607 PARAMETER Experiment Name: At_100uM_ABA_cDNA_P Parameter: Treatment Value: 100uM ABA vs. No Treatment
  misc_feature: MA Experiment ID: 108609 Result: Down-regulated in Transcription
  misc_feature: MA Experiment 108609 PARAMETER Experiment Name: At_100uM_ABA_cDNA_P Parameter: Timepoint (hr) Value: 24
  misc_feature: MA Experiment 108609 PARAMETER Experiment Name: At_100uM_ABA_cDNA_P Parameter: Tissue Value: Aerial
  misc_feature: MA Experiment 108609 PARAMETER Experiment Name: At_100uM_ABA_cDNA_P Parameter: Treatment Value: 100uM ABA vs. No Treatment
  misc_feature: MA Experiment ID: 20000069 Result: Down-regulated in Transcription
  misc_feature: MA Experiment 20000069 PARAMETER Experiment Name: At_100uM_ABA_Mutants_cDNA_P Parameter: Plant Line Value: CS23
  misc_feature: MA Experiment 20000069 PARAMETER Experiment Name: At_100uM_ABA_Mutants_cDNA_P Parameter: Timepoint (hr) Value: 6
  misc_feature: MA Experiment 20000069 PARAMETER Experiment Name: At_100uM_ABA_Mutants_cDNA_P Parameter: Tissue Value: Aerial
  misc_feature: MA Experiment 20000069 PARAMETER Experiment Name: At_100uM_ABA_Mutants_cDNA_P Parameter: Treatment Value: 100uM ABA vs. No Treatment
  misc_feature: MA Experiment ID: 20000070 Result: Down-regulated in Transcription
  misc_feature: MA Experiment 20000070 PARAMETER Experiment Name: At_100uM_ABA_Mutants_cDNA_P Parameter: Plant Line Value: CS24
  misc_feature: MA Experiment 20000070 PARAMETER Experiment Name: At_100uM_ABA_Mutants_cDNA_P Parameter: Timepoint (hr) Value: 6
  misc_feature: MA Experiment 20000070 PARAMETER Experiment Name: At_100uM_ABA_Mutants_cDNA_P Parameter: Tissue Value: Aerial
  misc_feature: MA Experiment 20000070 PARAMETER Experiment Name: At_100uM_ABA_Mutants_cDNA_P Parameter: Treatment Value: 100uM ABA vs. No Treatment
  misc_feature: MA Experiment ID: 20000071 Result: Down-regulated in Transcription
  misc_feature: MA Experiment 20000071 PARAMETER Experiment Name: At_100uM_ABA_Mutants_cDNA_P Parameter: Plant Line Value: CS8104
  misc_feature: MA Experiment 20000071 PARAMETER Experiment Name: At_100uM_ABA_Mutants_cDNA_P Parameter: Timepoint (hr) Value: 6
  misc_feature: MA Experiment 20000071 PARAMETER Experiment Name: At_100uM_ABA_Mutants_cDNA_P Parameter: Tissue Value: Aerial
  misc_feature: MA Experiment 20000071 PARAMETER Experiment Name: At_100uM_ABA_Mutants_cDNA_P Parameter: Treatment Value: 100uM ABA vs. No Treatment
  misc_feature: MA Experiment ID: 20000072 Result: Down-regulated in Transcription
  misc_feature: MA Experiment 20000072 PARAMETER Experiment Name: At_100uM_ABA_Mutants_cDNA_P Parameter: Plant Line Value: CS8105
  misc_feature: MA Experiment 20000072 PARAMETER Experiment Name: At_100uM_ABA_Mutants_cDNA_P Parameter: Timepoint (hr) Value: 6
  misc_feature: MA Experiment 20000072 PARAMETER Experiment Name: At_100uM_ABA_Mutants_cDNA_P Parameter: Tissue Value: Aerial
  misc_feature: MA Experiment 20000072 PARAMETER Experiment Name: At_100uM_ABA_Mutants_cDNA_P Parameter: Treatment Value: 100uM ABA vs. No Treatment
  misc_feature: MA Experiment ID: 20000086 Result: Down-regulated in Transcription
  misc_feature: MA Experiment 20000086 PARAMETER Experiment Name: At_100uM_ABA_Mutants_cDNA_P Parameter: Plant Line Value: CS22
  misc_feature: MA Experiment 20000086 PARAMETER Experiment Name: At_100uM_ABA_Mutants_cDNA_P Parameter: Timepoint (hr) Value: 6
  misc_feature: MA Experiment 20000086 PARAMETER Experiment Name: At_100uM_ABA_Mutants_cDNA_P Parameter: Tissue Value: Aerial
  misc_feature: MA Experiment 20000086 PARAMETER Experiment Name: At_100uM_ABA_Mutants_cDNA_P Parameter: Treatment Value: 100uM ABA vs. No Treatment
  misc_feature: MA Experiment ID: 20000087 Result: Down-regulated in Transcription
  misc_feature: MA Experiment 20000087 PARAMETER Experiment Name: At_100uM_ABA_Mutants_cDNA_P Parameter: Plant Line Value: WS
  misc_feature: MA Experiment 20000087 PARAMETER Experiment Name: At_100uM_ABA_Mutants_cDNA_P Parameter: Timepoint (hr) Value: 6
  misc_feature: MA Experiment 20000087 PARAMETER Experiment Name: At_100uM_ABA_Mutants_cDNA_P Parameter: Tissue Value: Aerial
  misc_feature: MA Experiment 20000087 PARAMETER Experiment Name: At_100uM_ABA_Mutants_cDNA_P Parameter: Treatment Value: 100uM ABA vs. No Treatment
  misc_feature: MA Experiment ID: 20000088 Result: Down-regulated in Transcription
  misc_feature: MA Experiment 20000088 PARAMETER Experiment Name: At_100uM_ABA_Mutants_cDNA_P Parameter: Plant Line Value: Landsberg
  misc_feature: MA Experiment 20000088 PARAMETER Experiment Name: At_100uM_ABA_Mutants_cDNA_P Parameter: Timepoint (hr) Value: 6
  misc_feature: MA Experiment 20000088 PARAMETER Experiment Name: At_100uM_ABA_Mutants_cDNA_P Parameter: Tissue Value: Aerial
  misc_feature: MA Experiment 20000088 PARAMETER Experiment Name: At_100uM_ABA_Mutants_cDNA_P Parameter: Treatment Value: 100uM ABA vs. No Treatment
  misc_feature: MA Experiment ID: 20000113 Result: Up-regulated in Transcription
  misc_feature: MA Experiment 20000113 PARAMETER Experiment Name: At_42deg_Heat_cDNA_P Parameter: Temperature (deg C) Value: 42 vs. 22
  misc_feature: MA Experiment 20000113 PARAMETER Experiment Name: At_42deg_Heat_cDNA_P Parameter: Timepoint (hr) Value: 8
  misc_feature: MA Experiment 20000113 PARAMETER Experiment Name: At_42deg_Heat_cDNA_P Parameter: Tissue Value: Aerial
  misc_feature: MA Experiment ID: 20000117 Result: Down-regulated in Transcription
  misc_feature: MA Experiment 20000117 PARAMETER Experiment Name: At_100uM_ABA_Mutants_cDNA_P Parameter: Plant Line Value: Columbia
  misc_feature: MA Experiment 20000117 PARAMETER Experiment Name: At_100uM_ABA_Mutants_cDNA_P Parameter: Timepoint (hr) Value: 6
  misc_feature: MA Experiment 20000117 PARAMETER Experiment Name: At_100uM_ABA_Mutants_cDNA_P Parameter: Tissue Value: Aerial
  misc_feature: MA Experiment 20000117 PARAMETER Experiment Name: At_100uM_ABA_Mutants_cDNA_P Parameter: Treatment Value: 100uM ABA vs. No Treatment
  misc_feature: MA Experiment ID: 20000180 Result: Up-regulated in Transcription
  misc_feature: MA Experiment 20000180 PARAMETER Experiment Name: At_Germinating_Seeds_P Parameter: Age (hr) Value: 24 vs. 0
  misc_feature: MA Experiment 20000180 PARAMETER Experiment Name: At_Germinating_Seeds_P Parameter: Tissue Value: Germinating Seeds
  misc_feature: MA Experiment ID: 20000185 Result: Down-regulated in Transcription
  misc_feature: MA Experiment 20000185 PARAMETER Experiment Name: At_Roots__P Parameter: Age (day) Value: 7 vs. 21
  misc_feature: MA Experiment 20000185 PARAMETER Experiment Name: At_Roots__P Parameter: Organism Value: A. thaliana
  misc_feature: MA Experiment 20000185 PARAMETER Experiment Name: At_Roots__P Parameter: Tissue Value: Roots vs. Whole Plant
  misc_feature: MA Experiment ID: 20000227 Result: Down-regulated in Transcription
  misc_feature: MA Experiment 20000227 PARAMETER Experiment Name: At_Root-Tips-vs-Tops_P Parameter: Tissue Value: Root Tips vs. Root Tops
  misc_feature: MA Experiment ID: 20000436 Result: Down-regulated in Transcription
  misc_feature: MA Experiment 20000436 PARAMETER Experiment Name: At_Drought_P Parameter: Age (day) Value: 7
  misc_feature: MA Experiment 20000436 PARAMETER Experiment Name: At_Drought_P Parameter: Organism Value: A. thaliana
  misc_feature: MA Experiment 20000436 PARAMETER Experiment Name: At_Drought_P Parameter: Plant Line Value: WS
  misc_feature: MA Experiment 20000436 PARAMETER Experiment Name: At_Drought_P Parameter: Timepoint (hr) Value: 12
  misc_feature: MA Experiment 20000436 PARAMETER Experiment Name: At_Drought_P Parameter: Tissue Value: Whole Plant
  misc_feature: MA Experiment 20000436 PARAMETER Experiment Name: At_Drought_P Parameter: Treatment Value: Drought vs. No Drought
  misc_feature: MA Experiment ID: 20000437 Result: Down-regulated in Transcription
  misc_feature: MA Experiment 20000437 PARAMETER Experiment Name: At_Drought_P Parameter: Age (day) Value: 8
  misc_feature: MA Experiment 20000437 PARAMETER Experiment Name: At_Drought_P Parameter: Organism Value: A. thaliana
  misc_feature: MA Experiment 20000437 PARAMETER Experiment Name: At_Drought_P Parameter: Plant Line Value: WS
  misc_feature: MA Experiment 20000437 PARAMETER Experiment Name: At_Drought_P Parameter: Timepoint (hr) Value: 24
  misc_feature: MA Experiment 20000437 PARAMETER Experiment Name: At_Drought_P Parameter: Tissue Value: Whole Plant
  misc_feature: MA Experiment 20000437 PARAMETER Experiment Name: At_Drought_P Parameter: Treatment Value: Drought vs. No Drought
  misc_feature: MA Experiment ID: 20000439 Result: Down-regulated in Transcription
  misc_feature: MA Experiment 20000439 PARAMETER Experiment Name: At_Roots__P Parameter: Age (day) Value: 14 vs. 21
  misc_feature: MA Experiment 20000439 PARAMETER Experiment Name: At_Roots__P Parameter: Organism Value: A. thaliana
  misc_feature: MA Experiment 20000439 PARAMETER Experiment Name: At_Roots__P Parameter: Tissue Value: Roots vs. Whole Plant
  misc_feature: MA Experiment ID: 20000453 Result: Down-regulated in Transcription
  misc_feature: MA Experiment 20000453 PARAMETER Experiment Name: At_100uM_ABA_P Parameter: Age (day) Value: 15
  misc_feature: MA Experiment 20000453 PARAMETER Experiment Name: At_100uM_ABA_P Parameter: Organism Value: A. thaliana
  misc_feature: MA Experiment 20000453 PARAMETER Experiment Name: At_100uM_ABA_P Parameter: Plant Line Value: WS
  misc_feature: MA Experiment 20000453 PARAMETER Experiment Name: At_100uM_ABA_P Parameter: Timepoint (hr) Value: 24
  misc_feature: MA Experiment 20000453 PARAMETER Experiment Name: At_100uM_ABA_P Parameter: Tissue Value: Aerial
  misc_feature: MA Experiment 20000453 PARAMETER Experiment Name: At_100uM_ABA_P Parameter: Treatment Value: 100uM ABA vs. No Treatment
  misc_feature: MA Experiment ID: 20000527 Result: Up-regulated in Transcription
  misc_feature: MA Experiment 20000527 PARAMETER Experiment Name: At_10percent_PEG_P Parameter: Age (day) Value: 20
  misc_feature: MA Experiment 20000527 PARAMETER Experiment Name: At_10percent_PEG_P Parameter: Organism Value: A. thaliana
  misc_feature: MA Experiment 20000527 PARAMETER Experiment Name: At_10percent_PEG_P Parameter: Plant Line Value: WS
  misc_feature: MA Experiment 20000527 PARAMETER Experiment Name: At_10percent_PEG_P Parameter: Timepoint (day) Value: 20
  misc_feature: MA Experiment 20000527 PARAMETER Experiment Name: At_10percent_PEG_P Parameter: Tissue Value: Whole Plant
  misc_feature: MA Experiment 20000527 PARAMETER Experiment Name: At_10percent_PEG_P Parameter: Treatment Value: 10percent PEG vs. No Treatment
  misc_feature: MA Experiment ID: 20000794 Result: Down-regulated in Transcription
  misc_feature: MA Experiment 20000794 PARAMETER Experiment Name: At_Petals_P Parameter: Age (day) Value: 23-25 days
  misc_feature: MA Experiment 20000794 PARAMETER Experiment Name: At_Petals_P Parameter: Plant Line Value: WS
  misc_feature: MA Experiment 20000794 PARAMETER Experiment Name: At_Petals_P Parameter: Tissue Value: Petals vs. Whole plant
  misc_feature: MA Experiment ID: 20001248 Result: Down-regulated in Transcription
  misc_feature: MA Experiment 20001248 PARAMETER Experiment Name: At_Far-red-induction_P Parameter: Age (day) Value: 7
  misc_feature: MA Experiment 20001248 PARAMETER Experiment Name: At_Far-red-induction_P Parameter: Light Value: Far-red vs. White
  misc_feature: MA Experiment 20001248 PARAMETER Experiment Name: At_Far-red-induction_P Parameter: Organism Value: A. thaliana
  misc_feature: MA Experiment 20001248 PARAMETER Experiment Name: At_Far-red-induction_P Parameter: Plant Line Value: Columbia
  misc_feature: MA Experiment 20001248 PARAMETER Experiment Name: At_Far-red-induction_P Parameter: Timepoint (hr) Value: 4
  misc_feature: MA Experiment 20001248 PARAMETER Experiment Name: At_Far-red-induction_P Parameter: Tissue Value: Whole Plant
  misc_feature: MA Experiment ID: 20001450 Result: Down-regulated in Transcription
  misc_feature: MA Experiment 20001450 PARAMETER Experiment Name: At_Far-red-induction_P Parameter: Age (day) Value: 7
  misc_feature: MA Experiment 20001450 PARAMETER Experiment Name: At_Far-red-induction_P Parameter: Light Value: Far-red vs. White
  misc_feature: MA Experiment 20001450 PARAMETER Experiment Name: At_Far-red-induction_P Parameter: Organism Value: A. thaliana
  misc_feature: MA Experiment 20001450 PARAMETER Experiment Name: At_Far-red-induction_P Parameter: Plant Line Value: Columbia
  misc_feature: MA Experiment 20001450 PARAMETER Experiment Name: At_Far-red-induction_P Parameter: Timepoint (hr) Value: 8
  misc_feature: MA Experiment 20001450 PARAMETER Experiment Name: At_Far-red-induction_P Parameter: Tissue Value: Whole Plant
  misc_feature: MA Experiment ID: 20001451 Result: Down-regulated in Transcription
  misc_feature: MA Experiment 20001451 PARAMETER Experiment Name: At_Far-red-induction_P Parameter: Age (day) Value: 7
  misc_feature: MA Experiment 20001451 PARAMETER Experiment Name: At_Far-red-induction_P Parameter: Light Value: Far-red vs. White
  misc_feature: MA Experiment 20001451 PARAMETER Experiment Name: At_Far-red-induction_P Parameter: Organism Value: A. thaliana
  misc_feature: MA Experiment 20001451 PARAMETER Experiment Name: At_Far-red-induction_P Parameter: Plant Line Value: Columbia
  misc_feature: MA Experiment 20001451 PARAMETER Experiment Name: At_Far-red-induction_P Parameter: Timepoint (hr) Value: 24
  misc_feature: MA Experiment 20001451 PARAMETER Experiment Name: At_Far-red-induction_P Parameter: Tissue Value: Whole Plant
  misc_feature: MA Experiment ID: 20001458 Result: Up-regulated in Transcription
  misc_feature: MA Experiment 20001458 PARAMETER Experiment Name: At_50mM_NH4NO3_L-to-H_P Parameter: Age (day) Value: Undefined
  misc_feature: MA Experiment 20001458 PARAMETER Experiment Name: At_50mM_NH4NO3_L-to-H_P Parameter: Organism Value: Undefined
  misc_feature: MA Experiment 20001458 PARAMETER Experiment Name: At_50mM_NH4NO3_L-to-H_P Parameter: Plant Line Value: Undefined
  misc_feature: MA Experiment 20001458 PARAMETER Experiment Name: At_50mM_NH4NO3_L-to-H_P Parameter: Timepoint (hr) Value: 2
  misc_feature: MA Experiment 20001458 PARAMETER Experiment Name: At_50mM_NH4NO3_L-to-H_P Parameter: Tissue Value: Siliques
  misc_feature: MA Experiment 20001458 PARAMETER Experiment Name: At_50mM_NH4NO3_L-to-H_P Parameter: Treatment Value: 50mM NH4NO3 vs. 100mM Manitol
  misc_feature: MA Experiment ID: 20001556 Result: Up-regulated in Transcription
  misc_feature: MA Experiment 20001556 PARAMETER Experiment Name: At_Drought_Soil_Dry_P Parameter: Age (day) Value: 26
  misc_feature: MA Experiment 20001556 PARAMETER Experiment Name: At_Drought_Soil_Dry_P Parameter: Organism Value: A. thaliana
  misc_feature: MA Experiment 20001556 PARAMETER Experiment Name: At_Drought_Soil_Dry_P Parameter: Plant Line Value: WS
  misc_feature: MA Experiment 20001556 PARAMETER Experiment Name: At_Drought_Soil_Dry_P Parameter: Post Timepoint (hr) Value: None
  misc_feature: MA Experiment 20001556 PARAMETER Experiment Name: At_Drought_Soil_Dry_P Parameter: Post-Treatment Value: None
  misc_feature: MA Experiment 20001556 PARAMETER Experiment Name: At_Drought_Soil_Dry_P Parameter: Timepoint (day) Value: 12
  misc_feature: MA Experiment 20001556 PARAMETER Experiment Name: At_Drought_Soil_Dry_P Parameter: Treatment Value: Drought vs. No Drought
  misc_feature: MA Experiment ID: 20001558 Result: Up-regulated in Transcription
  misc_feature: MA Experiment 20001558 PARAMETER Experiment Name: At_Drought_Soil_Dry_P Parameter: Age (day) Value: 27
  misc_feature: MA Experiment 20001558 PARAMETER Experiment Name: At_Drought_Soil_Dry_P Parameter: Organism Value: A. thaliana
  misc_feature: MA Experiment 20001558 PARAMETER Experiment Name: At_Drought_Soil_Dry_P Parameter: Plant Line Value: WS
  misc_feature: MA Experiment 20001558 PARAMETER Experiment Name: At_Drought_Soil_Dry_P Parameter: Post Timepoint (hr) Value: 6
  misc_feature: MA Experiment 20001558 PARAMETER Experiment Name: At_Drought_Soil_Dry_P Parameter: Post-Treatment Value: Re-Water vs. No Drought
  misc_feature: MA Experiment 20001558 PARAMETER Experiment Name: At_Drought_Soil_Dry_P Parameter: Timepoint (day) Value: 13
  misc_feature: MA Experiment 20001558 PARAMETER Experiment Name: At_Drought_Soil_Dry_P Parameter: Treatment Value: Drought vs. No Drought
  misc_feature: MA Experiment ID: 20001560 Result: Up-regulated in Transcription
  misc_feature: MA Experiment 20001560 PARAMETER Experiment Name: At_Drought_Soil_Dry_P Parameter: Age (day) Value: 28
  misc_feature: MA Experiment 20001560 PARAMETER Experiment Name: At_Drought_Soil_Dry_P Parameter: Organism Value: A. thaliana
  misc_feature: MA Experiment 20001560 PARAMETER Experiment Name: At_Drought_Soil_Dry_P Parameter: Plant Line Value: WS
  misc_feature: MA Experiment 20001560 PARAMETER Experiment Name: At_Drought_Soil_Dry_P Parameter: Post Timepoint (hr) Value: None
  misc_feature: MA Experiment 20001560 PARAMETER Experiment Name: At_Drought_Soil_Dry_P Parameter: Post-Treatment Value: None
  misc_feature: MA Experiment 20001560 PARAMETER Experiment Name: At_Drought_Soil_Dry_P Parameter: Timepoint (day) Value: 14
  misc_feature: MA Experiment 20001560 PARAMETER Experiment Name: At_Drought_Soil_Dry_P Parameter: Treatment Value: Drought vs. No Drought
  misc_feature: MA Experiment ID: 20001757 Result: Up-regulated in Transcription
  misc_feature: MA Experiment 20001757 PARAMETER Experiment Name: At_50mM_NH4NO3_L-to-H_P Parameter: Timepoint (hr) Value: 6
  misc_feature: MA Experiment 20001757 PARAMETER Experiment Name: At_50mM_NH4NO3_L-to-H_P Parameter: Tissue Value: Leaf
  misc_feature: MA Experiment 20001757 PARAMETER Experiment Name: At_50mM_NH4NO3_L-to-H_P Parameter: Treatment Value: 50mM NH4NO3 vs 100mM Mannitol
cctcctcgagtcctttccatcaggaccttatccacagtccacacacagcgagactctatttactcgccggcggaagaacaaaatggcgggaagagcgattttctctgtatcttgttcatctactccttccttgtgtatcccttattcaactgcttcgttttcatcgatgaatcgactggcgctccccgccgtccggatttctccccgaaccaacagatttcccaggattcactgctctatgtctgctaacgacatcaaagcgggaaccaatatcgaagtcgatggtgctccttggcgtgttcttgagtttcttcatgttaaaccaggaaaaggtgcggcatttgtgagaactaagatcaggaactatgtgaatggtagcacagtcgagagaacatttcgtgctggaatttctgttgaggaagctaatatatataaagaaaccaaacaattcacatacaaagatgggtctcagtttgttttcatggatttgaccacatacgaagaaacacgtcttaacgaatctgatatgggtgagaagacgaaatggttgaaagaaggaatggattgcattttgctctattggaaagacaaggttatcgatttcgatctaccgattacagttaagctaaaagtggttgacgttgatcctggccttcgcggtgatactgtgcaaggtggatcaaaaccggcgacaatggaaacgggtgcaatagttgctgtaccactctttattaacgtcggtgaagagatatttgtggacacaagaactggtgcatacatgaaccgagcgtgatccgggtctactacacctagttaattgggtcgttaacaacaaggcaatgatacatcttttttgtatatgagaatgttcgaatccggggacacatgtttgtttttctgaacatcgagagacaatttttcgattaaataaatttatat

SEQ ID NO: 104528 - protein, 263 aa, Arabidopsis thaliana; identical to SEQ ID NO: 26246
  peptide (1)..(263): Ceres Seq. ID no. 13615220
  misc_feature (79)..(263): Pfam Name: Elongation factor P (EF-P) Pfam Description: Elongation factor P (EF-P)
  misc_feature (28)..(263): Homolog of NCBI NO: 18398225 NR Description: elongation factor P (EF-P) -related [Arabidopsis
  misc_feature (80)..(263): Homolog of NCBI NO: 12322730 NR Description: putative elongation factor P (EF-P); 66839-65711
  misc_feature (80)..(262): Homolog of NCBI NO: 2494275 NR Description: Elongation factor P (EF-P) >gi|7469237|pir||T30278
  misc_feature (80)..(262): Homolog of NCBI NO: 23042812 NR Description: hypothetical protein [Trichodesmium erythraeum
  misc_feature (80)..(262): Homolog of NCBI NO: 23125000 NR Description: hypothetical protein [Nostoc punctiforme]
  misc_feature (80)..(262): Homolog of NCBI NO: 22298837 NR Description: translation elongation factor EF-P
  misc_feature (80)..(262): Homolog of NCBI NO: 16331453 NR Description: elongation factor P [Synechocystis sp. PCC 6803]
  misc_feature (80)..(262): Homolog of NCBI NO: 37520854 NR Description: elongation factor P [Gloeobacter violaceus]
  misc_feature (80)..(262): Homolog of NCBI NO: 33239478 NR Description: Translation elongation factor P [Prochlorococcus subsp. marinus str. CCMP1375] >gi|33237003|gb|AAP99072.1| elongation factor P [Prochlorococcus marinus subsp. marinus str.
  misc_feature (79)..(262): Homolog of NCBI NO: 32265607 NR Description: translation elongation factor P [Helicobacter ATCC 51449] >gi|32261655|gb|AAP76705.1| translation elongation

SEQ ID NO: 104529 - protein, 236 aa, Arabidopsis thaliana; identical to SEQ ID NO: 26247
  peptide (1)..(236): Ceres Seq. ID no. 13615221
  misc_feature (52)..(236): Pfam Name: Elongation factor P (EF-P) Pfam Description: Elongation factor P (EF-P)
  misc_feature (1)..(236): Homolog of NCBI NO: 18398225 NR Description: elongation factor P (EF-P) -related [Arabidopsis
  misc_feature (53)..(236): Homolog of NCBI NO: 12322730 NR Description: putative elongation factor P (EF-P); 66839-65711
  misc_feature (53)..(235): Homolog of NCBI NO: 2494275 NR Description: Elongation factor P (EF-P) >gi|7469237|pir||T30278
  misc_feature (53)..(235): Homolog of NCBI NO: 23042812 NR Description: hypothetical protein [Trichodesmium erythraeum
  misc_feature (53)..(235): Homolog of NCBI NO: 23125000 NR Description: hypothetical protein [Nostoc punctiforme]
  misc_feature (53)..(235): Homolog of NCBI NO: 22298837 NR Description: translation elongation factor EF-P
  misc_feature (53)..(235): Homolog of NCBI NO: 16331453 NR Description: elongation factor P [Synechocystis sp. PCC 6803]
  misc_feature (53)..(235): Homolog of NCBI NO: 37520854 NR Description: elongation factor P [Gloeobacter violaceus]
  misc_feature (53)..(235): Homolog of NCBI NO: 33239478 NR Description: Translation elongation factor P [Prochlorococcus subsp. marinus str. CCMP1375] >gi|33237003|gb|AAP99072.1| elongation factor P [Prochlorococcus marinus subsp. marinus str.
  misc_feature (52)..(235): Homolog of NCBI NO: 32265607 NR Description: translation elongation factor P [Helicobacter ATCC 51449] >gi|32261655|gb|AAP76705.1| translation elongation

SEQ ID NO: 104530 - protein, 208 aa, Arabidopsis thaliana; identical to SEQ ID NO: 26248
  peptide (1)..(208): Ceres Seq. ID no. 13615222
  misc_feature (24)..(208): Pfam Name: Elongation factor P (EF-P) Pfam Description: Elongation factor P (EF-P)
  misc_feature (1)..(208): Homolog of NCBI NO: 18398225 NR Description: elongation factor P (EF-P) -related [Arabidopsis
  misc_feature (25)..(208): Homolog of NCBI NO: 12322730 NR Description: putative elongation factor P (EF-P); 66839-65711
  misc_feature (25)..(207): Homolog of NCBI NO: 2494275 NR Description: Elongation factor P (EF-P) >gi|7469237|pir||T30278
  misc_feature (25)..(207): Homolog of NCBI NO: 23042812 NR Description: hypothetical protein [Trichodesmium erythraeum
  misc_feature (25)..(207): Homolog of NCBI NO: 23125000 NR Description: hypothetical protein [Nostoc punctiforme]
  misc_feature (25)..(207): Homolog of NCBI NO: 22298837 NR Description: translation elongation factor EF-P
  misc_feature (25)..(207): Homolog of NCBI NO: 16331453 NR Description: elongation factor P [Synechocystis sp. PCC 6803]
  misc_feature (25)..(207): Homolog of NCBI NO: 37520854 NR Description: elongation factor P [Gloeobacter violaceus]
  misc_feature (25)..(207): Homolog of NCBI NO: 33239478 NR Description: Translation elongation factor P [Prochlorococcus subsp. marinus str. CCMP1375] >gi|33237003|gb|AAP99072.1| elongation factor P [Prochlorococcus marinus subsp. marinus str.
  misc_feature (24)..(207): Homolog of NCBI NO: 32265607 NR Description: translation elongation factor P [Helicobacter ATCC 51449] >gi|32261655|gb|AAP76705.1| translation elongation

SEQ ID NO: 104531 - DNA, 796 bp, Arabidopsis thaliana
  misc_feature (1)..(796): Ceres Seq. ID no. 13615227
  misc_feature: MA Experiment ID: 108461 Result: Up-regulated in Transcription
  misc_feature: MA Experiment 108461 PARAMETER Experiment Name: At_Germinating_Seeds_cDNA_P Parameter: Age (day) Value: 1 vs. 0
  misc_feature: MA Experiment 108461 PARAMETER Experiment Name: At_Germinating_Seeds_cDNA_P Parameter: Tissue Value: Germinating Seeds
  misc_feature: MA Experiment ID: 108462 Result: Up-regulated in Transcription
  misc_feature: MA Experiment 108462 PARAMETER Experiment Name: At_Germinating_Seeds_cDNA_P Parameter: Age (day) Value: 2 vs. 0
  misc_feature: MA Experiment 108462 PARAMETER Experiment Name: At_Germinating_Seeds_cDNA_P Parameter: Tissue Value: Germinating Seeds
  misc_feature: MA Experiment ID: 108463 Result: Up-regulated in Transcription
  misc_feature: MA Experiment 108463 PARAMETER Experiment Name: At_Germinating_Seeds_cDNA_P Parameter: Age (day) Value: 3 vs. 0
  misc_feature: MA Experiment 108463 PARAMETER Experiment Name: At_Germinating_Seeds_cDNA_P Parameter: Tissue Value: Germinating Seeds
  misc_feature: MA Experiment ID: 108464 Result: Up-regulated in Transcription
  misc_feature: MA Experiment 108464 PARAMETER Experiment Name: At_Germinating_Seeds_cDNA_P Parameter: Age (day) Value: 4 vs. 0
  misc_feature: MA Experiment 108464 PARAMETER Experiment Name: At_Germinating_Seeds_cDNA_P Parameter: Tissue Value: Germinating Seeds
  misc_feature: MA Experiment ID: 20000111 Result: Down-regulated in Transcription
  misc_feature: MA Experiment 20000111 PARAMETER Experiment Name: At_42deg_Heat_cDNA_P Parameter: Temperature (deg C) Value: 42 vs. 22
  misc_feature: MA Experiment 20000111 PARAMETER Experiment Name: At_42deg_Heat_cDNA_P Parameter: Timepoint (hr) Value: 6
  misc_feature: MA Experiment 20000111 PARAMETER Experiment Name: At_42deg_Heat_cDNA_P Parameter: Tissue Value: Aerial
  misc_feature: MA Experiment ID: 20000113 Result: Down-regulated in Transcription
  misc_feature: MA Experiment 20000113 PARAMETER Experiment Name: At_42deg_Heat_cDNA_P Parameter: Temperature (deg C) Value: 42 vs. 22
  misc_feature: MA Experiment 20000113 PARAMETER Experiment Name: At_42deg_Heat_cDNA_P Parameter: Timepoint (hr) Value: 8
  misc_feature: MA Experiment 20000113 PARAMETER Experiment Name: At_42deg_Heat_cDNA_P Parameter: Tissue Value: Aerial
  misc_feature: MA Experiment ID: 20000179 Result: Up-regulated in Transcription
  misc_feature: MA Experiment 20000179 PARAMETER Experiment Name: At_Germinating_Seeds_P Parameter: Age (hr) Value: 6 vs. 0
  misc_feature: MA Experiment 20000179 PARAMETER Experiment Name: At_Germinating_Seeds_P Parameter: Tissue Value: Germinating Seeds
  misc_feature: MA Experiment ID: 20000180 Result: Up-regulated in Transcription
  misc_feature: MA Experiment 20000180 PARAMETER Experiment Name: At_Germinating_Seeds_P Parameter: Age (hr) Value: 24 vs. 0
  misc_feature: MA Experiment 20000180 PARAMETER Experiment Name: At_Germinating_Seeds_P Parameter: Tissue Value: Germinating Seeds
  misc_feature: MA Experiment ID: 20001911 Result: Down-regulated in Transcription
  misc_feature: MA Experiment 20001911 PARAMETER Experiment Name: At_Drought_Reproduction_P Parameter: Age (day) Value: 40
  misc_feature: MA Experiment 20001911 PARAMETER Experiment Name: At_Drought_Reproduction_P Parameter: Organism Value: A. thaliana
  misc_feature: MA Experiment 20001911 PARAMETER Experiment Name: At_Drought_Reproduction_P Parameter: Plant Line Value: WS
  misc_feature: MA Experiment 20001911 PARAMETER Experiment Name: At_Drought_Reproduction_P Parameter: Timepoint (day) Value: 10
  misc_feature: MA Experiment 20001911 PARAMETER Experiment Name: At_Drought_Reproduction_P Parameter: Tissue Value: Flowers
  misc_feature: MA Experiment 20001911 PARAMETER Experiment Name: At_Drought_Reproduction_P Parameter: Treatment Value: Drought vs. No Drought
gatagaaccaaaaaaaaaacacctccgatctcggcgagagaaagagaaacgatctgtgagagagaatggatcagatcttgaacaaggtaggctcgtactggttaggtaagaaggcgaacaagcagctcgattccgtcggtgacgatatcaactctttgtcttcgagcatcgaaggaggaacaaaatggttggtgaacaaaatcaaaggaaaaatgcagaagccattgcccgagttactaaaggagtttggtttgcctgtggggatctttccacgtgatgcaaccaactacgagttcaatgaacagacgaggaagttaactgtctttattccatcaatctgcgaagttggttacaaagatacatcagtcttgagattcaccactacagttaccggatttctcgagaagggaaagctagctgatgttgaagggatgaagacaaaagtaatgatatgggttaaagtcacaagtatctctgctgattcttcaaaggtacatttcacggcagggatgaagaaaagcagaagccgagatgcttatgaggttttaagagatggcgttgagattgataaattctagctctgttttgctggtaattctcaattcttttatcctctttctccaatctctatctttaaagtttcaactttcttcaaaattgttttgtatatgctgattttcaattatgttgaagttcatgaatttgataaactgaagaagatggtaactcagtacaccaaacaatgttcttatgtcttttggtattacttactgagtcactgtttaagcatatgacc

SEQ ID NO: 104532 - protein, 170 aa, Arabidopsis thaliana; identical to SEQ ID NO: 31063
  peptide (1)..(170): Ceres Seq. ID no. 13615228
  misc_feature (32)..(170): Pfam Name: Protein of unknown function, DUF538 Pfam Description: Protein of unknown function, DUF538
  misc_feature (1)..(170): Homolog of NCBI NO: 18398279 NR Description: expressed protein [Arabidopsis thaliana] expressed protein [Arabidopsis thaliana] unknown protein [Arabidopsis thaliana]
  misc_feature (1)..(170): Homolog of NCBI NO: 15240103 NR Description: hypothetical protein [Arabidopsis thaliana] gb|AAF07835.1~gene_id:MJG14.7~similar to unknown protein
  misc_feature (1)..(170): Homolog of NCBI NO: 15241019 NR Description: expressed protein [Arabidopsis thaliana]
  misc_feature (1)..(170): Homolog of NCBI NO: 28466909 NR Description: At5g01610 [Arabidopsis thaliana]
  misc_feature (1)..(170): Homolog of NCBI NO: 40642817 NR Description: cp protein [Celosia cristata]
  misc_feature (1)..(170): Homolog of NCBI NO: 34914210 NR Description: OSJNBb0049O23.18 [Oryza sativa (japonica
  misc_feature (7)..(167): Homolog of NCBI NO: 18395537 NR Description: expressed protein [Arabidopsis thaliana]
  misc_feature (7)..(167): Homolog of NCBI NO: 21553803 NR Description: unknown [Arabidopsis thaliana]
  misc_feature (56)..(167): Homolog of NCBI NO: 6041854 NR Description: unknown protein [Arabidopsis thaliana]
  misc_feature (56)..(167): Homolog of NCBI NO: 18397959 NR Description: expressed protein [Arabidopsis thaliana] AT3g07470/F21O3_18 [Arabidopsis thaliana]

SEQ ID NO: 104533 - protein, 121 aa, Arabidopsis thaliana; identical to SEQ ID NO: 31064
  peptide (1)..(121): Ceres Seq. ID no. 13615229
  misc_feature (1)..(121): Pfam Name: Protein of unknown function, DUF538 Pfam Description: Protein of unknown function, DUF538
  misc_feature (1)..(121): Homolog of NCBI NO: 18398279 NR Description: expressed protein [Arabidopsis thaliana] expressed protein [Arabidopsis thaliana] unknown protein [Arabidopsis thaliana]
  misc_feature (1)..(121): Homolog of NCBI NO: 15240103 NR Description: hypothetical protein [Arabidopsis thaliana] gb|AAF07835.1~gene_id:MJG14.7~similar to unknown protein
  misc_feature (1)..(121): Homolog of NCBI NO: 15241019 NR Description: expressed protein [Arabidopsis thaliana]
  misc_feature (1)..(121): Homolog of NCBI NO: 28466909 NR Description: At5g01610 [Arabidopsis thaliana]
  misc_feature (1)..(121): Homolog of NCBI NO: 40642817 NR Description: cp protein [Celosia cristata]
  misc_feature (1)..(121): Homolog of NCBI NO: 34914210 NR Description: OSJNBb0049O23.18 [Oryza sativa (japonica
  misc_feature (1)..(118): Homolog of NCBI NO: 18395537 NR Description: expressed protein [Arabidopsis thaliana]
  misc_feature (1)..(118): Homolog of NCBI NO: 21553803 NR Description: unknown [Arabidopsis thaliana]
  misc_feature (7)..(118): Homolog of NCBI NO: 6041854 NR Description: unknown protein [Arabidopsis thaliana]
  misc_feature (7)..(118): Homolog of NCBI NO: 18397959 NR Description: expressed protein [Arabidopsis thaliana] AT3g07470/F21O3_18 [Arabidopsis thaliana]

SEQ ID NO: 104534 - DNA, 1300 bp, Arabidopsis thaliana
  misc_feature (1)..(1300): Ceres Seq. ID no. 13615230
  misc_feature: MA Experiment ID: 20001905 Result: Up-regulated in Transcription
  misc_feature: MA Experiment 20001905 PARAMETER Experiment Name: At_Drought_Reproduction_P Parameter: Age (day) Value: 40
  misc_feature: MA Experiment 20001905 PARAMETER Experiment Name: At_Drought_Reproduction_P Parameter: Organism Value: A. thaliana
  misc_feature: MA Experiment 20001905 PARAMETER Experiment Name: At_Drought_Reproduction_P Parameter: Plant Line Value: WS
  misc_feature: MA Experiment 20001905 PARAMETER Experiment Name: At_Drought_Reproduction_P Parameter: Timepoint (day) Value: 10
  misc_feature: MA Experiment 20001905 PARAMETER Experiment Name: At_Drought_Reproduction_P Parameter: Tissue Value: Rosettes
  misc_feature: MA Experiment 20001905 PARAMETER Experiment Name: At_Drought_Reproduction_P Parameter: Treatment Value: Drought vs. No Drought
agagtttttcccattgaagaagatcgagtgaaattcgaagagcgaatcaaagaggaagaagaagaaggaggaggtatagcaatgggggtcgattattacaaggttcttcaggtggatcggaatgcgaaagacgacgacttgaagaaagcttatcgcaaactcgccatgaagtggcatccagacaagaaccctaacaacaaaaaagacgccgaagccaaattcaagcagatctccgaagcttacgatgttttgagtgatcctcaaaagagagccatctatgatcaatatggagaagaaggtctaacaagccaggctccgcctcccggagcaggcggcgggttttcggatggaggggcttcgttccggttcaacggtagaagcgcagatgatatcttctcggagttctttggcttcacaagaccatttggtgactcacgtggtgcaggtccctctaatgggttccggttcgcggaagacgttttctcgtcaaatgttgttccaccgaggaaagctgcccctattgagagacaacttccttgtagtttggaagatctctacaaaggagtcagtaagaagatgaagatctctcgggacgtcctcgattcaagcgggagacccacaacagttgaggagatcttgacgatagaaatcaagccagggtggaagaaagggacgaagattaccttcccggagaaaggaaacgagcagcgaggaatcataccatcagatcttgtattcatagttgatgagaagccacatgcggtgttcaagcgagacgggaatgaccttgtgatgacacagaagatccctcttgtggaagccctcacgggatacactgctcaggtctcgactctggatggaagatcagtaacggttccaattaacaacgtgatcagcccttcttatgaagaggtggtgaaaggtgaaggcatgccaatccctaaagacccatcaaagaaagggaacttgagaatcaagttcactgttaagttcccatcgaggctaacaacagagcagaaatctggaatcaaacgaatgttttcgtcttcctagtctgtctctttctatcttactgctacgtttgattttcggttatgactaggtatgtggtagtgtgggtctttgtttgggagattgtgaggttcttgaacgatgtcgcattgagatttctcaacgtccttcagagcttttggtttgggtttggggttttacattttagcatttttttttttttcgttcttttaaatttgttattagattgggggaaaaataaaaaactaaataaagattctttgcttct

SEQ ID NO: 104535 - protein, 350 aa, Arabidopsis thaliana
  peptide (1)..(350): Ceres Seq. ID no. 13615231
  misc_feature (225)..(347): Pfam Name: DnaJ C terminal region Pfam Description: DnaJ C terminal region
  misc_feature (28)..(350): Homolog of NCBI NO: 15231987 NR Description: DnaJ protein family [Arabidopsis thaliana]
  misc_feature (28)..(350): Homolog of NCBI NO: 21618097 NR Description: putative heat shock protein [Arabidopsis thaliana]
  misc_feature (28)..(348): Homolog of NCBI NO: 15240968 NR Description: DnaJ protein family [Arabidopsis thaliana]
  misc_feature (28)..(346): Homolog of NCBI NO: 15225377 NR Description: heat shock protein, putative [Arabidopsis
  misc_feature (143)..(349): Homolog of NCBI NO: 34904486 NR Description: putative heat shock protein 40 [Oryza sativa
  misc_feature (28)..(151): Homolog of NCBI NO: 34904486 NR Description: putative heat shock protein 40 [Oryza sativa
  misc_feature (123)..(350): Homolog of NCBI NO: 15218515 NR Description: heat shock protein, putative [Arabidopsis
  misc_feature (123)..(350): Homolog of NCBI NO: 21593202 NR Description: putative heat-shock protein [Arabidopsis thaliana]
  misc_feature (28)..(155): Homolog of NCBI NO: 15218515 NR Description: heat shock protein, putative [Arabidopsis
  misc_feature (28)..(155): Homolog of NCBI NO: 21593202 NR Description: putative heat-shock protein [Arabidopsis thaliana]
RVFPIEEDRVKFEERIKEEEEEGGGIAMGVDYYKVLQVDRNAKDDDLKKAYRKLAMKWHPDKNPNNKKDAEAKFKQISEAYDVLSDPQKRAIYDQYGEEGLTSQAPPPGAGGGFSDGGASFRFNGRSADDIFSEFFGFTRPFGDSRGAGPSNGFRFAEDVFSSNVVPPRKAAPIERQLPCSLEDLYKGVSKKMKISRDVLDSSGRPTTVEEILTIEIKPGWKKGTKITFPEKGNEQRGIIPSDLVFIVDEKPHAVFKRDGNDLVMTQKIPLVEALTGYTAQVSTLDGRSVTVPINNVISPSYEEVVKGEGMPIPKDPSKKGNLRIKFTVKFPSRLTTEQKSGIKRMFSSS

SEQ ID NO: 104536 - protein, 323 aa, Arabidopsis thaliana
  peptide (1)..(323): Ceres Seq. ID no. 13615232
  misc_feature (198)..(320): Pfam Name: DnaJ C terminal region Pfam Description: DnaJ C terminal region
  misc_feature (1)..(323): Homolog of NCBI NO: 15231987 NR Description: DnaJ protein family [Arabidopsis thaliana]
  misc_feature (1)..(323): Homolog of NCBI NO: 21618097 NR Description: putative heat shock protein [Arabidopsis thaliana]
  misc_feature (1)..(321): Homolog of NCBI NO: 15240968 NR Description: DnaJ protein family [Arabidopsis thaliana]
  misc_feature (1)..(319): Homolog of NCBI NO: 15225377 NR Description: heat shock protein, putative [Arabidopsis
  misc_feature (116)..(322): Homolog of NCBI NO: 34904486 NR Description: putative heat shock protein 40 [Oryza sativa
  misc_feature (1)..(124): Homolog of NCBI NO: 34904486 NR Description: putative heat shock protein 40 [Oryza sativa
  misc_feature (96)..(323): Homolog of NCBI NO: 15218515 NR Description: heat shock protein, putative [Arabidopsis
  misc_feature (96)..(323): Homolog of NCBI NO: 21593202 NR Description: putative heat-shock protein [Arabidopsis thaliana]
  misc_feature (1)..(128): Homolog of NCBI NO: 15218515 NR Description: heat shock protein, putative [Arabidopsis
  misc_feature (1)..(128): Homolog of NCBI NO: 21593202 NR Description: putative heat-shock protein [Arabidopsis thaliana]
MGVDYYKVLQVDRNAKDDDLKKAYRKLAMKWHPDKNPNNKKDAEAKFKQISEAYDVLSDPQKRAIYDQYGEEGLTSQAPPPGAGGGFSDGGASFRFNGRSADDIFSEFFGFTRPFGDSRGAGPSNGFRFAEDVFSSNVVPPRKAAPIERQLPCSLEDLYKGVSKKMKISRDVLDSSGRPTTVEEILTIEIKPGWKKGTKITFPEKGNEQRGIIPSDLVFIVDEKPHAVFKRDGNDLVMTQKIPLVEALTGYTAQVSTLDGRSVTVPINNVISPSYEEVVKGEGMPIPKDPSKKGNLRIKFTVKFPSRLTTEQKSGIKRMFSSS

SEQ ID NO: 104537 - protein, 295 aa, Arabidopsis thaliana
  peptide (1)..(295): Ceres Seq. ID no. 13615233
  misc_feature (170)..(292): Pfam Name: DnaJ C terminal region Pfam Description: DnaJ C terminal region
  misc_feature (1)..(295): Homolog of NCBI NO: 15231987 NR Description: DnaJ protein family [Arabidopsis thaliana]
  misc_feature (1)..(295): Homolog of NCBI NO: 21618097 NR Description: putative heat shock protein [Arabidopsis thaliana]
  misc_feature (1)..(293): Homolog of NCBI NO: 15240968 NR Description: DnaJ protein family [Arabidopsis thaliana]
  misc_feature (1)..(291): Homolog of NCBI NO: 15225377 NR Description: heat shock protein, putative [Arabidopsis
  misc_feature (88)..(294): Homolog of NCBI NO: 34904486 NR Description: putative heat shock protein 40 [Oryza sativa
  misc_feature (1)..(96): Homolog of NCBI NO: 34904486 NR Description: putative heat shock protein 40 [Oryza sativa
  misc_feature (68)..(295): Homolog of NCBI NO: 15218515 NR Description: heat shock protein, putative [Arabidopsis
  misc_feature (68)..(295): Homolog of NCBI NO: 21593202 NR Description: putative heat-shock protein [Arabidopsis thaliana]
  misc_feature (1)..(100): Homolog of NCBI NO: 15218515 NR Description: heat shock protein, putative [Arabidopsis
  misc_feature (1)..(100): Homolog of NCBI NO: 21593202 NR Description: putative heat-shock protein [Arabidopsis thaliana]
MKWHPDKNPNNKKDAEAKFKQISEAYDVLSDPQKRAIYDQYGEEGLTSQAPPPGAGGGFSDGGASFRFNGRSADDIFSEFFGFTRPFGDSRGAGPSNGFRFAEDVFSSNVVPPRKAAPIERQLPCSLEDLYKGVSKKMKISRDVLDSSGRPTTVEEILTIEIKPGWKKGTKITFPEKGNEQRGIIPSDLVFIVDEKPHAVFKRDGNDLVMTQKIPLVEALTGYTAQVSTLDGRSVTVPINNVISPSYEEVVKGEGMPIPKDPSKKGNLRIKFTVKFPSRLTTEQKSGIKRMFSSS

SEQ ID NO: 104538 - DNA, 1081 bp, Arabidopsis thaliana
  misc_feature (1)..(1081): Ceres Seq. ID no. 13615237
  misc_feature: MA Experiment ID: 108435 Result: Down-regulated in Transcription
  misc_feature: MA Experiment 108435 PARAMETER Experiment Name: At_stm_Mutants_cDNA_P Parameter: Plant Line Value: wt Landsburg vs stm
  misc_feature: MA Experiment 108435 PARAMETER Experiment Name: At_stm_Mutants_cDNA_P Parameter: Tissue Value: Shoot Apical Meristem Region
  misc_feature: MA Experiment ID: 108461 Result: Up-regulated in Transcription
  misc_feature: MA Experiment 108461 PARAMETER Experiment Name: At_Germinating_Seeds_cDNA_P Parameter: Age (day) Value: 1 vs. 0
  misc_feature: MA Experiment 108461 PARAMETER Experiment Name: At_Germinating_Seeds_cDNA_P Parameter: Tissue Value: Germinating Seeds
  misc_feature: MA Experiment ID: 108462 Result: Up-regulated in Transcription
  misc_feature: MA Experiment 108462 PARAMETER Experiment Name: At_Germinating_Seeds_cDNA_P Parameter: Age (day) Value: 2 vs. 0
  misc_feature: MA Experiment 108462 PARAMETER Experiment Name: At_Germinating_Seeds_cDNA_P Parameter: Tissue Value: Germinating Seeds
  misc_feature: MA Experiment ID: 108463 Result: Up-regulated in Transcription
  misc_feature: MA Experiment 108463 PARAMETER Experiment Name: At_Germinating_Seeds_cDNA_P Parameter: Age (day) Value: 3 vs. 0
  misc_feature: MA Experiment 108463 PARAMETER Experiment Name: At_Germinating_Seeds_cDNA_P Parameter: Tissue Value: Germinating Seeds
  misc_feature: MA Experiment ID: 108464 Result: Up-regulated in Transcription
  misc_feature: MA Experiment 108464 PARAMETER Experiment Name: At_Germinating_Seeds_cDNA_P Parameter: Age (day) Value: 4 vs. 0
  misc_feature: MA Experiment 108464 PARAMETER Experiment Name: At_Germinating_Seeds_cDNA_P Parameter: Tissue Value: Germinating Seeds
  misc_feature: MA Experiment ID: 108488 Result: Up-regulated in Transcription
  misc_feature: MA Experiment ID: 108489 Result: Down-regulated in Transcription
  misc_feature: MA Experiment ID: 108573 Result: Up-regulated in Transcription
  misc_feature: MA Experiment 108573 PARAMETER Experiment Name: At_Drought_cDNA_P Parameter: Timepoint (hr) Value: 6
  misc_feature: MA Experiment 108573 PARAMETER Experiment Name: At_Drought_cDNA_P Parameter: Tissue Value: Aerial
  misc_feature: MA Experiment 108573 PARAMETER Experiment Name: At_Drought_cDNA_P Parameter: Treatment Value: Drought vs. No Drought
  misc_feature: MA Experiment ID: 20000072 Result: Down-regulated in Transcription
  misc_feature: MA Experiment 20000072 PARAMETER Experiment Name: At_100uM_ABA_Mutants_cDNA_P Parameter: Plant Line Value: CS8105
  misc_feature: MA Experiment 20000072 PARAMETER Experiment Name: At_100uM_ABA_Mutants_cDNA_P Parameter: Timepoint (hr) Value: 6
  misc_feature: MA Experiment 20000072 PARAMETER Experiment Name: At_100uM_ABA_Mutants_cDNA_P Parameter: Tissue Value: Aerial
  misc_feature: MA Experiment 20000072 PARAMETER Experiment Name: At_100uM_ABA_Mutants_cDNA_P Parameter: Treatment Value: 100uM ABA vs. No Treatment
  misc_feature: MA Experiment ID: 20000086 Result: Down-regulated in Transcription
  misc_feature: MA Experiment 20000086 PARAMETER Experiment Name: At_100uM_ABA_Mutants_cDNA_P Parameter: Plant Line Value: CS22
  misc_feature: MA Experiment 20000086 PARAMETER Experiment Name: At_100uM_ABA_Mutants_cDNA_P Parameter: Timepoint (hr) Value: 6
  misc_feature: MA Experiment 20000086 PARAMETER Experiment Name: At_100uM_ABA_Mutants_cDNA_P Parameter: Tissue Value: Aerial
  misc_feature: MA Experiment 20000086 PARAMETER Experiment Name: At_100uM_ABA_Mutants_cDNA_P Parameter: Treatment Value: 100uM ABA vs. No Treatment
  misc_feature: MA Experiment ID: 20000087 Result: Down-regulated in Transcription
  misc_feature: MA Experiment 20000087 PARAMETER Experiment Name: At_100uM_ABA_Mutants_cDNA_P Parameter: Plant Line Value: WS
  misc_feature: MA Experiment 20000087 PARAMETER Experiment Name: At_100uM_ABA_Mutants_cDNA_P Parameter: Timepoint (hr) Value: 6
  misc_feature: MA Experiment 20000087 PARAMETER Experiment Name: At_100uM_ABA_Mutants_cDNA_P Parameter: Tissue Value: Aerial
  misc_feature: MA Experiment 20000087 PARAMETER Experiment Name: At_100uM_ABA_Mutants_cDNA_P Parameter: Treatment Value: 100uM ABA vs. No Treatment
  misc_feature: MA Experiment ID: 20000089 Result: Down-regulated in Transcription
  misc_feature: MA Experiment ID: 20000307 Result: Up-regulated in Transcription
  misc_feature: MA Experiment 20000307 PARAMETER Experiment Name: At_Germinating_Seeds_Sub_P Parameter: Age (hr) Value: 24 vs. 0
  misc_feature: MA Experiment 20000307 PARAMETER Experiment Name: At_Germinating_Seeds_Sub_P Parameter: Organism Value: A. thaliana
  misc_feature: MA Experiment 20000307 PARAMETER Experiment Name: At_Germinating_Seeds_Sub_P Parameter: Plant Line Value: WS
  misc_feature: MA Experiment 20000307 PARAMETER Experiment Name: At_Germinating_Seeds_Sub_P Parameter: Tissue Value: Germinating Seeds
  misc_feature: MA Experiment ID: 20000314 Result: Down-regulated in Transcription
  misc_feature: MA Experiment 20000314 PARAMETER Experiment Name: At_14day_Shoots-Roots_Sub_P Parameter: Age (day) Value: 14
  misc_feature: MA Experiment 20000314 PARAMETER Experiment Name: At_14day_Shoots-Roots_Sub_P Parameter: Organism Value: A. thaliana
  misc_feature: MA Experiment 20000314 PARAMETER Experiment Name: At_14day_Shoots-Roots_Sub_P Parameter: Plant Line Value: WS
  misc_feature: MA Experiment 20000314 PARAMETER Experiment Name: At_14day_Shoots-Roots_Sub_P Parameter: Tissue Value: Roots vs. Whole Plant
  misc_feature: MA Experiment ID: 20000327 Result: Up-regulated in Transcription
  misc_feature: MA Experiment 20000327 PARAMETER Experiment Name: At_42deg_Heat_Sub_P Parameter: Age (day) Value: 14
  misc_feature: MA Experiment 20000327 PARAMETER Experiment Name: At_42deg_Heat_Sub_P Parameter: Organism Value: A. thaliana
  misc_feature: MA Experiment 20000327 PARAMETER Experiment Name: At_42deg_Heat_Sub_P Parameter: Plant Line Value: WS
  misc_feature: MA Experiment 20000327 PARAMETER Experiment Name: At_42deg_Heat_Sub_P Parameter: Temperature (deg C) Value: 42 vs. 22
  misc_feature: MA Experiment 20000327 PARAMETER Experiment Name: At_42deg_Heat_Sub_P Parameter: Timepoint (hr) Value: 1
  misc_feature: MA Experiment 20000327 PARAMETER Experiment Name: At_42deg_Heat_Sub_P Parameter: Tissue Value: Aerial
  misc_feature: MA Experiment ID: 20000328 Result: Up-regulated in Transcription
  misc_feature: MA Experiment 20000328 PARAMETER Experiment Name: At_42deg_Heat_Sub_P Parameter: Age (day) Value: 14
  misc_feature: MA Experiment 20000328 PARAMETER Experiment Name: At_42deg_Heat_Sub_P Parameter: Organism Value: A. thaliana
  misc_feature: MA Experiment 20000328 PARAMETER Experiment Name: At_42deg_Heat_Sub_P Parameter: Plant Line Value: WS
  misc_feature: MA Experiment 20000328 PARAMETER Experiment Name: At_42deg_Heat_Sub_P Parameter: Temperature (deg C) Value: 42 vs. 22
  misc_feature: MA Experiment 20000328 PARAMETER Experiment Name: At_42deg_Heat_Sub_P Parameter: Timepoint (hr) Value: 6
  misc_feature: MA Experiment 20000328 PARAMETER Experiment Name: At_42deg_Heat_Sub_P Parameter: Tissue Value: Aerial
  misc_feature: MA Experiment ID: 20000355 Result: Down-regulated in Transcription
  misc_feature: MA Experiment 20000355 PARAMETER Experiment Name: At_Siliques_Sub_P Parameter: Age (day) Value: 21
  misc_feature: MA Experiment 20000355 PARAMETER Experiment Name: At_Siliques_Sub_P Parameter: Organism Value: A. thaliana
  misc_feature: MA Experiment 20000355 PARAMETER Experiment Name: At_Siliques_Sub_P Parameter: Plant Line Value: WS
  misc_feature: MA Experiment 20000355 PARAMETER Experiment Name: At_Siliques_Sub_P Parameter: Tissue Value: Less Than 5mm Siliques vs. Whole Plant
  misc_feature: MA Experiment ID: 20000440 Result: Down-regulated in Transcription
  misc_feature: MA Experiment 20000440 PARAMETER Experiment Name: At_Closed-Flower__Sub_P Parameter: Tissue Value: Closed Flower vs. Whole Plant
acaaaccgcaaacgcgacagaactaactaacgacgccggagatggccgccacttcaaccgccgctgctgcttcttcaatcatgggtacccgggtggtttccgacattagctccaattcaagccggttcacagcccggttcggattcggaaccaagaaagcatctcccaaaaaggctaagacggttatctcagaccggcctctatggttcccaggcgcaaaatcacccgaatatctcgacggttcacttgtcggggactacgggttcgatccttttggtttaggcaaaccggcggagtatctccaattcgatttggattccttggaccagaacttagccaagaacttatacggagaagtgatcgggactcgtaccgaggcggtggaccccaaatcgacgccgtttcagccatatagtgaagtcttcgggctacaaagattcagagaatgtgagctgattcacggtcggtgggcaatgctcgccactcttggcgctatcaccgtcgaatggctcaccggtgttacttggcaagacgccggcaaggtagagctagtggatggatcatcttacttaggacagccattgccgttctctatctcgacattgatatggatcgaagtgttagtgatcggctacattgagttccaacgaaacgctgaactggactcggagaagcgtttgtatccaggaggcaagttctttgacccgttaggactagcgtctgacccggtgaagaaggctcagcttcagctagctgagatcaaacatgctcgtttagccatggttggattcttgggttttgcggttcaggcggctgcaaccggtaaaggaccgctcaacaactgggcgactcaccttagtgacccacttcacaccaccattatcgataccttctcttcctcctgatgtggtggcttttagcttctactggtgtcatgtaatgatgtaacgtcgttattttaaagaaaatttggcaccttttgtataaacggaatttcttatacctcgcagtttgtgtttacgtagatcatcggagttatgatgagcctttacatcaaattaatcgtttgctaaattctgtc

SEQ ID NO: 104539 - protein, 287 aa, Arabidopsis thaliana; identical to SEQ ID NO: 34996
  peptide (1)..(287): Ceres Seq. ID no. 13615238
  misc_feature (60)..(258): Pfam Name: Chlorophyll A-B binding protein Pfam Description: Chlorophyll A-B binding protein
  misc_feature (1)..(287): Homolog of NCBI NO: 15231990 NR Description: chlorophyll a/b-binding protein -related
  misc_feature (1)..(287): Homolog of NCBI NO: 15241005 NR Description: light-harvesting chlorophyll a/b binding protein
  misc_feature (1)..(287): Homolog of NCBI NO: 20260162 NR Description: chlorophyll a/b-binding protein CP29 [Arabidopsis
  misc_feature (1)..(287): Homolog of NCBI NO: 13877547 NR Description: chlorophyll a/b-binding protein CP29 [Arabidopsis
  misc_feature (1)..(287): Homolog of NCBI NO: 15081739 NR Description: AT5g01530/F7A7_50 [Arabidopsis thaliana]
  misc_feature (3)..(287): Homolog of NCBI NO: 4689382 NR Description: chlorophyll a/b binding protein CP29 [Vigna
  misc_feature (3)..(287): Homolog of NCBI NO: 445116 NR Description: light-harvesting complex IIa protein;
  misc_feature (3)..(287): Homolog of NCBI NO: 7443230 NR Description: probable chlorophyll a/b-binding protein - rice
  misc_feature (3)..(287): Homolog of NCBI NO: 7443231 NR Description: chlorophyll a/b-binding protein CP29 precursor -
  misc_feature (1)..(183): Homolog of NCBI NO: 30680697 NR Description: chlorophyll a/b-binding protein -related

SEQ ID NO: 104540 - protein, 274 aa, Arabidopsis thaliana; identical to SEQ ID NO: 34997
  peptide (1)..(274): Ceres Seq. ID no. 13615239
  misc_feature (47)..(245): Pfam Name: Chlorophyll A-B binding protein Pfam Description: Chlorophyll A-B binding protein
  misc_feature (1)..(274): Homolog of NCBI NO: 15231990 NR Description: chlorophyll a/b-binding protein -related
  misc_feature (1)..(274): Homolog of NCBI NO: 15241005 NR Description: light-harvesting chlorophyll a/b binding protein
  misc_feature (1)..(274): Homolog of NCBI NO: 20260162 NR Description: chlorophyll a/b-binding protein CP29 [Arabidopsis
  misc_feature (1)..(274): Homolog of NCBI NO: 13877547 NR Description: chlorophyll a/b-binding protein CP29 [Arabidopsis
  misc_feature (1)..(274): Homolog of NCBI NO: 15081739 NR Description: AT5g01530/F7A7_50 [Arabidopsis thaliana]
  misc_feature (1)..(274): Homolog of NCBI NO: 4689382 NR Description: chlorophyll a/b binding protein CP29 [Vigna
  misc_feature (1)..(274): Homolog of NCBI NO: 445116 NR Description: light-harvesting complex IIa protein;
  misc_feature (1)..(274): Homolog of NCBI NO: 7443230 NR Description: probable chlorophyll a/b-binding protein - rice
  misc_feature (1)..(274): Homolog of NCBI NO: 7443231 NR Description: chlorophyll a/b-binding protein CP29 precursor -
  misc_feature (1)..(170): Homolog of NCBI NO: 30680697 NR Description: chlorophyll a/b-binding protein -related

SEQ ID NO: 104541 - protein, 143 aa, Arabidopsis thaliana; identical to SEQ ID NO: 34998
  peptide (1)..(143): Ceres Seq. ID no. 13615240
  misc_feature (1)..(114): Pfam Name: Chlorophyll A-B binding protein Pfam Description: Chlorophyll A-B binding protein
  misc_feature (1)..(143): Homolog of NCBI NO: 15231990 NR Description: chlorophyll a/b-binding protein -related
  misc_feature (1)..(143): Homolog of NCBI NO: 15241005 NR Description: light-harvesting chlorophyll a/b binding protein
  misc_feature (1)..(143): Homolog of NCBI NO: 20260162 NR Description: chlorophyll a/b-binding protein CP29 [Arabidopsis
  misc_feature (1)..(143): Homolog of NCBI NO: 13877547 NR Description: chlorophyll a/b-binding protein CP29 [Arabidopsis
  misc_feature (1)..(143): Homolog of NCBI NO: 15081739 NR Description: AT5g01530/F7A7_50 [Arabidopsis thaliana]
  misc_feature (1)..(143): Homolog of NCBI NO: 4689382 NR Description: chlorophyll a/b binding protein CP29 [Vigna
  misc_feature (1)..(143): Homolog of NCBI NO: 445116 NR Description: light-harvesting complex IIa protein;
  misc_feature (1)..(143): Homolog of NCBI NO: 7443230 NR Description: probable chlorophyll a/b-binding protein - rice
  misc_feature (1)..(143): Homolog of NCBI NO: 7443231 NR Description: chlorophyll a/b-binding protein CP29 precursor -
  misc_feature (1)..(39): Homolog of NCBI NO: 30680697 NR Description: chlorophyll a/b-binding protein -related

SEQ ID NO: 104542 - DNA, 1495 bp, Arabidopsis thaliana
  misc_feature (1)..(1495): Ceres Seq. ID no. 13615241
  misc_feature: MA Experiment ID: 108434 Result: Down-regulated in Transcription
  misc_feature: MA Experiment 108434 PARAMETER Experiment Name: At_Root_Tips_cDNA_P Parameter: Tissue Value: Root Tips
  misc_feature: MA Experiment ID: 108469 Result: Up-regulated in Transcription
  misc_feature: MA Experiment ID: 108585 Result: Up-regulated in Transcription
  misc_feature: MA Experiment 108585 PARAMETER Experiment Name: At_5mM_NaNP_cDNA_P Parameter: Timepoint (hr) Value: 6
  misc_feature: MA Experiment 108585 PARAMETER Experiment Name: At_5mM_NaNP_cDNA_P Parameter: Tissue Value: Aerial
  misc_feature: MA Experiment 108585 PARAMETER Experiment Name: At_5mM_NaNP_cDNA_P Parameter: Treatment Value: null
  misc_feature: MA Experiment ID: 108667 Result: Up-regulated in Transcription
  misc_feature: MA Experiment 108667 PARAMETER Experiment Name: At_2mM_SA_cDNA_P Parameter: Plant Line Value: WS
  misc_feature: MA Experiment 108667 PARAMETER Experiment Name: At_2mM_SA_cDNA_P Parameter: Timepoint (hr) Value: 1
  misc_feature: MA Experiment 108667 PARAMETER Experiment Name: At_2mM_SA_cDNA_P Parameter: Treatment Value: 2mM SA vs. No Treatment
  misc_feature: MA Experiment ID: 108668 Result: Up-regulated in Transcription
  misc_feature: MA Experiment 108668 PARAMETER Experiment Name: At_2mM_SA_cDNA_P Parameter: Plant Line Value: WS
  misc_feature: MA Experiment 108668 PARAMETER Experiment Name: At_2mM_SA_cDNA_P Parameter: Timepoint (hr) Value: 6
  misc_feature: MA Experiment 108668 PARAMETER Experiment Name: At_2mM_SA_cDNA_P Parameter: Treatment Value: 2mM SA vs. No Treatment
  misc_feature: MA Experiment ID: 20000090 Result: Up-regulated in Transcription
  misc_feature: MA Experiment ID: 20000173 Result: Down-regulated in Transcription
  misc_feature: MA Experiment 20000173 PARAMETER Experiment Name: At_42deg_Heat_P Parameter: Age (day) Value: 14
  misc_feature: MA Experiment 20000173 PARAMETER Experiment Name: At_42deg_Heat_P Parameter: Organism Value: A. thaliana
  misc_feature: MA Experiment 20000173 PARAMETER Experiment Name: At_42deg_Heat_P Parameter: Plant Line Value: WS
  misc_feature: MA Experiment 20000173 PARAMETER Experiment Name: At_42deg_Heat_P Parameter: Temperature (deg C) Value: 42 vs. 22
  misc_feature: MA Experiment 20000173 PARAMETER Experiment Name: At_42deg_Heat_P Parameter: Timepoint (hr) Value: 6
  misc_feature: MA Experiment 20000173 PARAMETER Experiment Name: At_42deg_Heat_P Parameter: Tissue Value: Aerial
  misc_feature: MA Experiment ID: 20000182 Result: Up-regulated in Transcription
  misc_feature: MA Experiment 20000182 PARAMETER Experiment Name: At_2mM_SA_P Parameter: Age (day) Value: 14
  misc_feature: MA Experiment 20000182 PARAMETER Experiment Name: At_2mM_SA_P Parameter: Organism Value: A. thaliana
  misc_feature: MA Experiment 20000182 PARAMETER Experiment Name: At_2mM_SA_P Parameter: Plant Line Value: WS
  misc_feature: MA Experiment 20000182 PARAMETER Experiment Name: At_2mM_SA_P Parameter: Timepoint (hr) Value: 6
  misc_feature: MA Experiment 20000182 PARAMETER Experiment Name: At_2mM_SA_P Parameter: Tissue Value: Aerial
  misc_feature: MA Experiment 20000182 PARAMETER Experiment Name: At_2mM_SA_P Parameter: Treatment Value: 2mM SA vs. No Treatment
  misc_feature: MA Experiment ID: 20000227 Result: Down-regulated in Transcription
  misc_feature: MA Experiment 20000227 PARAMETER Experiment Name: At_Root-Tips-vs-Tops_P Parameter: Tissue Value: Root Tips vs. Root Tops
  misc_feature: MA Experiment ID: 20000234 Result: Down-regulated in Transcription
  misc_feature: MA Experiment 20000234 PARAMETER Experiment Name: At_Siliques_P Parameter: Age (day) Value: 21
  misc_feature: MA Experiment 20000234 PARAMETER Experiment Name: At_Siliques_P Parameter: Organism Value: A. thaliana
  misc_feature: MA Experiment 20000234 PARAMETER Experiment Name: At_Siliques_P Parameter: Plant Line Value: WS
  misc_feature: MA Experiment 20000234 PARAMETER Experiment Name: At_Siliques_P Parameter: Tissue Value: Less Than 5mm Siliques vs. Whole Plant
  misc_feature: MA Experiment ID: 20000264 Result: Down-regulated in Transcription
  misc_feature: MA Experiment 20000264 PARAMETER Experiment Name: At_Open_Flower_P Parameter: Age (day) Value: 21
  misc_feature: MA Experiment 20000264 PARAMETER Experiment Name: At_Open_Flower_P Parameter: Plant Line Value: WS
  misc_feature: MA Experiment 20000264 PARAMETER Experiment Name: At_Open_Flower_P Parameter: Tissue Value: Open Flower vs. Whole Plant
  misc_feature: MA Experiment ID: 20000265 Result: Down-regulated in Transcription
  misc_feature: MA Experiment 20000265 PARAMETER Experiment Name: At_Open_Flower_P Parameter: Age (day) Value: 21
  misc_feature: MA Experiment 20000265 PARAMETER Experiment Name: At_Open_Flower_P Parameter: Plant Line Value: WS
  misc_feature: MA Experiment 20000265 PARAMETER Experiment Name: At_Open_Flower_P Parameter: Tissue Value: Closed Flower vs. Whole Plant
  misc_feature: MA Experiment ID: 20000286 Result: Down-regulated in Transcription
  misc_feature: MA Experiment 20000286 PARAMETER Experiment Name: At_Open_Flower_P Parameter: Age (day) Value: 21
  misc_feature: MA Experiment 20000286 PARAMETER Experiment Name: At_Open_Flower_P Parameter: Plant Line Value: WS
  misc_feature: MA Experiment 20000286 PARAMETER Experiment Name: At_Open_Flower_P Parameter: Tissue Value: Half Open vs. Whole Plant
  misc_feature: MA Experiment ID: 20000438 Result: Down-regulated in Transcription
  misc_feature: MA Experiment 20000438 PARAMETER Experiment Name: At_Shoots__P Parameter: Age (day) Value: 14
  misc_feature: MA Experiment 20000438 PARAMETER Experiment Name: At_Shoots__P Parameter: Tissue Value: Shoots vs. Whole Plant
  misc_feature: MA Experiment ID: 20000527 Result: Down-regulated in Transcription
  misc_feature: MA Experiment 20000527 PARAMETER Experiment Name: At_10percent_PEG_P Parameter: Age (day) Value: 20
  misc_feature: MA Experiment 20000527 PARAMETER Experiment Name: At_10percent_PEG_P Parameter: Organism Value: A. thaliana
  misc_feature: MA Experiment 20000527 PARAMETER Experiment Name: At_10percent_PEG_P Parameter: Plant Line Value: WS
  misc_feature: MA Experiment 20000527 PARAMETER Experiment Name: At_10percent_PEG_P Parameter: Timepoint (day) Value: 20
  misc_feature: MA Experiment 20000527 PARAMETER Experiment Name: At_10percent_PEG_P Parameter: Tissue Value: Whole Plant
  misc_feature: MA Experiment 20000527 PARAMETER Experiment Name: At_10percent_PEG_P Parameter: Treatment Value: 10percent PEG vs. No Treatment
cttttaaagaaaagttccatttcatatctctatcaaacccttttctgaatattattttgcttgtgaatttgaatttgagcttttttcctctgttcttgggaggaatttttgtctgtgtttgtgatgcgttataattgcttcggacttctagatatgtgcaacggaagtgatcgtcttggacaaagagaagctgaagagatttgcaccaacaatgtgagggtcttttcatataattcattaagatcagccactgatagtttccatccaacgaacagaatcggaggtggtggctatggcgttgtctttaagggagttttgagagatggcacacaagtagctgtgaaatcactatcagcagaatctaaacaagggacacgcgagttcttgaccgagattaacttgatatcaaacattcatcatcctaaccttgttaaactcatcggttgctgcatcgaagggaacaatcggattcttgtctatgagtaccttgagaacaacagtcttgctagtgttttgcttggttcaaggagtagatatgtaccgcttgattggtccaaaagagctgcgatttgcgttgggacagcttcgggtttagctttccttcacgaggaagtcgaacctcatgttgttcaccgtgacatcaaggcgagtaatatcttactagactcaaacttttctcccaaaattggtgatttcgggttggctaagctttttccagacaatgtcactcatgtcagtacccgagtcgctggaacagtgggatacttggctccagaatatgcacttcttggtcaactgacaaaaaaagcagacgtttacagcttcgggatacttgtgcttgaggtcattagtggtaatagtagcaccagagccgcctttggagacgagtacatggttcttgttgaatgggtgtggaagctgagagaagaaaggaggctactagagtgtgtagatccagaactaaccaagttccccgcagatgaagtgacccgtttcatcaaggtggctcttttctgcactcaagccgcggcgcaaaagagaccaaacatgaagcaagtgatggagatgcttcgcaggaaagagcttaacctcaacgaggatgccttaacggaacctggcgtctacagaggtgtcaacaggggacgcaaccaccgtggaatcggtcttagggtcggccaaggaggcagctcacaggagagctcgtcaacgcaacgtgacaaagggaaaagctcagccgttcctcaagggtcgacgtccaactctaatatttccttccagagcatcacagagttggctcctagatgatttttttctgttaatagagcacaattttattcttgagtatattaattagtttatgatgtgttaatatcttatacatagggtatatatgaataaaccaaagatgctatctgataaaatgttatgtagttgtctgacatttccctttgtgtcagaagccagcagtttaaaattatgattggcatgattttgc

SEQ ID NO: 104543 - protein, 393 aa, Arabidopsis thaliana; identical to SEQ ID NO: 41872
  peptide (1)..(393): Ceres Seq. ID no. 13615242
  misc_feature (1)..(393): Homolog of NCBI NO: 18398327 NR Description: protein kinase family [Arabidopsis thaliana]
  misc_feature (11)..(393): Homolog of NCBI NO: 5923666 NR Description: putative receptor ser/thr protein kinase
  misc_feature (11)..(393): Homolog of NCBI NO: 6403501 NR Description: putative protein kinase [Arabidopsis thaliana]
  misc_feature (13)..(393): Homolog of NCBI NO: 34901978 NR Description: putative receptor ser/thr protein [Oryza sativa
  misc_feature (30)..(338): Homolog of NCBI NO: 38344039 NR Description: OSJNBb0017I01.6 [Oryza sativa (japonica
  misc_feature (20)..(386): Homolog of NCBI NO: 18394385 NR Description: protein kinase family [Arabidopsis thaliana] Unknown protein [Arabidopsis thaliana]
  misc_feature (22)..(386): Homolog of NCBI NO: 25287648 NR Description: hypothetical protein F19K19.4 [imported] - thaliana >gi|9989053|gb|AAG10816.1|AC011808_4 Unknown protein
  misc_feature (29)..(333): Homolog of NCBI NO: 38344329 NR Description: OSJNBa0058K23.11 [Oryza sativa (japonica
  misc_feature (17)..(375): Homolog of NCBI NO: 6056375 NR Description: Similar to serine/threonine kinases [Arabidopsis
  misc_feature (17)..(375): Homolog of NCBI NO: 18405703 NR Description: receptor protein kinase -related [Arabidopsis

SEQ ID NO: 104544 - protein, 383 aa, Arabidopsis thaliana; identical to SEQ ID NO: 41873
  peptide (1)..(383): Ceres Seq. ID no. 13615243
  misc_feature (1)..(383): Homolog of NCBI NO: 18398327 NR Description: protein kinase family [Arabidopsis thaliana]
  misc_feature (1)..(383): Homolog of NCBI NO: 5923666 NR Description: putative receptor ser/thr protein kinase
  misc_feature (1)..(383): Homolog of NCBI NO: 6403501 NR Description: putative protein kinase [Arabidopsis thaliana]
  misc_feature (3)..(383): Homolog of NCBI NO: 34901978 NR Description: putative receptor ser/thr protein [Oryza sativa
  misc_feature (20)..(328): Homolog of NCBI NO: 38344039 NR Description: OSJNBb0017I01.6 [Oryza sativa (japonica
  misc_feature (10)..(376): Homolog of NCBI NO: 18394385 NR Description: protein kinase family [Arabidopsis thaliana] Unknown protein [Arabidopsis thaliana]
  misc_feature (12)..(376): Homolog of NCBI NO: 25287648 NR Description: hypothetical protein F19K19.4 [imported] - thaliana >gi|9989053|gb|AAG10816.1|AC011808_4 Unknown protein
  misc_feature (19)..(323): Homolog of NCBI NO: 38344329 NR Description: OSJNBa0058K23.11 [Oryza sativa (japonica
  misc_feature (7)..(365): Homolog of NCBI NO: 6056375 NR Description: Similar to serine/threonine kinases [Arabidopsis
  misc_feature (7)..(365): Homolog of NCBI NO: 18405703 NR Description: receptor protein kinase -related [Arabidopsis

SEQ ID NO: 104545 - DNA, 1793 bp, Arabidopsis thaliana
  misc_feature (1)..(1793): Ceres Seq. ID no. 13615252
  misc_feature: MA Experiment ID: 20000169 Result: Up-regulated in Transcription
  misc_feature: MA Experiment 20000169 PARAMETER Experiment Name: At_100uM_ABA_P Parameter: Age (day) Value: 14
  misc_feature: MA Experiment 20000169 PARAMETER Experiment Name: At_100uM_ABA_P Parameter: Organism Value: A. thaliana
  misc_feature: MA Experiment 20000169 PARAMETER Experiment Name: At_100uM_ABA_P Parameter: Plant Line Value: WS
  misc_feature: MA Experiment 20000169 PARAMETER Experiment Name: At_100uM_ABA_P Parameter: Timepoint (hr) Value: 6
  misc_feature: MA Experiment 20000169 PARAMETER Experiment Name: At_100uM_ABA_P Parameter: Tissue Value: Aerial
  misc_feature: MA Experiment 20000169 PARAMETER Experiment Name: At_100uM_ABA_P Parameter: Treatment Value: 100uM ABA vs. No Treatment
  misc_feature: MA Experiment ID: 20000173 Result: Down-regulated in Transcription
  misc_feature: MA Experiment 20000173 PARAMETER Experiment Name: At_42deg_Heat_P Parameter: Age (day) Value: 14
  misc_feature: MA Experiment 20000173 PARAMETER Experiment Name: At_42deg_Heat_P Parameter: Organism Value: A. thaliana
  misc_feature: MA Experiment 20000173 PARAMETER Experiment Name: At_42deg_Heat_P Parameter: Plant Line Value: WS
  misc_feature: MA Experiment 20000173 PARAMETER Experiment Name: At_42deg_Heat_P Parameter: Temperature (deg C) Value: 42 vs. 22
  misc_feature: MA Experiment 20000173 PARAMETER Experiment Name: At_42deg_Heat_P Parameter: Timepoint (hr) Value: 6
  misc_feature: MA Experiment 20000173 PARAMETER Experiment Name: At_42deg_Heat_P Parameter: Tissue Value: Aerial
  misc_feature: MA Experiment ID: 20000179 Result: Up-regulated in Transcription
  misc_feature: MA Experiment 20000179 PARAMETER Experiment Name: At_Germinating_Seeds_P Parameter: Age (hr) Value: 6 vs. 0
  misc_feature: MA Experiment 20000179 PARAMETER Experiment Name: At_Germinating_Seeds_P Parameter: Tissue Value: Germinating Seeds
  misc_feature: MA Experiment ID: 20000180 Result: Up-regulated in Transcription
  misc_feature: MA Experiment 20000180 PARAMETER Experiment Name: At_Germinating_Seeds_P Parameter: Age (hr) Value: 24 vs. 0
  misc_feature: MA Experiment 20000180 PARAMETER Experiment Name: At_Germinating_Seeds_P Parameter: Tissue Value: Germinating Seeds
  misc_feature: MA Experiment ID: 20000184 Result: Up-regulated in Transcription
  misc_feature: MA Experiment 20000184 PARAMETER Experiment Name: At_Shoots__P Parameter: Age (day) Value: 7
  misc_feature: MA Experiment 20000184 PARAMETER Experiment Name: At_Shoots__P Parameter: Tissue Value: Shoots vs. Whole Plant
  misc_feature: MA Experiment ID: 20000185 Result: Up-regulated in Transcription
  misc_feature: MA Experiment 20000185 PARAMETER Experiment Name: At_Roots__P Parameter: Age (day) Value: 7 vs. 21
  misc_feature: MA Experiment 20000185 PARAMETER Experiment Name: At_Roots__P Parameter: Organism Value: A. thaliana
  misc_feature: MA Experiment 20000185 PARAMETER Experiment Name: At_Roots__P Parameter: Tissue Value: Roots vs. Whole Plant
  misc_feature: MA Experiment ID: 20000235 Result: Down-regulated in Transcription
  misc_feature: MA Experiment 20000235 PARAMETER Experiment Name: At_Siliques_P Parameter: Age (day) Value: 21
  misc_feature: MA Experiment 20000235 PARAMETER Experiment Name: At_Siliques_P Parameter: Organism Value: A. thaliana
  misc_feature: MA Experiment 20000235 PARAMETER Experiment Name: At_Siliques_P Parameter: Plant Line Value: WS
  misc_feature: MA Experiment 20000235 PARAMETER Experiment Name: At_Siliques_P Parameter: Tissue Value: 5-10mm Siliques vs. Whole Plant
  misc_feature: MA Experiment ID: 20000264 Result: Down-regulated in Transcription
  misc_feature: MA Experiment 20000264 PARAMETER Experiment Name: At_Open_Flower_P Parameter: Age (day) Value: 21
  misc_feature: MA Experiment 20000264 PARAMETER Experiment Name: At_Open_Flower_P Parameter: Plant Line Value: WS
  misc_feature: MA Experiment 20000264 PARAMETER Experiment Name: At_Open_Flower_P Parameter: Tissue Value: Open Flower vs. Whole Plant
  misc_feature: MA Experiment ID: 20000286 Result: Down-regulated in Transcription
  misc_feature: MA Experiment 20000286 PARAMETER Experiment Name: At_Open_Flower_P Parameter: Age (day) Value: 21
  misc_feature: MA Experiment 20000286 PARAMETER Experiment Name: At_Open_Flower_P Parameter: Plant Line Value: WS
  misc_feature: MA Experiment 20000286 PARAMETER Experiment Name: At_Open_Flower_P Parameter: Tissue Value: Half Open vs. Whole Plant
  misc_feature: MA Experiment ID: 20000438 Result: Up-regulated in Transcription
  misc_feature: MA Experiment 20000438 PARAMETER Experiment Name: At_Shoots__P Parameter: Age (day) Value: 14
  misc_feature: MA Experiment 20000438 PARAMETER Experiment Name: At_Shoots__P Parameter: Tissue Value: Shoots vs. Whole Plant
  misc_feature: MA Experiment ID: 20000439 Result: Up-regulated in Transcription
  misc_feature: MA Experiment 20000439 PARAMETER Experiment Name: At_Roots__P Parameter: Age (day) Value: 14 vs. 21
  misc_feature: MA Experiment 20000439 PARAMETER Experiment Name: At_Roots__P Parameter: Organism Value: A. thaliana
  misc_feature: MA Experiment 20000439 PARAMETER Experiment Name: At_Roots__P Parameter: Tissue Value: Roots vs. Whole Plant
  misc_feature: MA Experiment ID: 20000445 Result: Down-regulated in Transcription
  misc_feature: MA Experiment 20000445 PARAMETER Experiment Name: At_100uM_NAA__P Parameter: Age (day) Value: 14
  misc_feature: MA Experiment 20000445 PARAMETER Experiment Name: At_100uM_NAA__P Parameter: Organism Value: A. thaliana
  misc_feature: MA Experiment 20000445 PARAMETER Experiment Name: At_100uM_NAA__P Parameter: Plant Line Value: WS
  misc_feature: MA Experiment 20000445 PARAMETER Experiment Name: At_100uM_NAA__P Parameter: Timepoint (hr) Value: 6
  misc_feature: MA Experiment 20000445 PARAMETER Experiment Name: At_100uM_NAA__P Parameter: Tissue Value: Aerial
  misc_feature: MA Experiment 20000445 PARAMETER Experiment Name: At_100uM_NAA__P Parameter: Treatment Value: 100uM NAA vs. No Treatment
  misc_feature: MA Experiment ID: 20000452 Result: Up-regulated in Transcription
  misc_feature: MA Experiment 20000452 PARAMETER Experiment Name: At_CS6879_Shoots-Roots_P Parameter: Age (day) Value: 14
  misc_feature: MA Experiment 20000452 PARAMETER Experiment Name: At_CS6879_Shoots-Roots_P Parameter: Organism Value: A. thaliana
  misc_feature: MA Experiment 20000452 PARAMETER Experiment Name: At_CS6879_Shoots-Roots_P Parameter: Plant Line Value: CS6879 vs. WS
  misc_feature: MA Experiment 20000452 PARAMETER Experiment Name: At_CS6879_Shoots-Roots_P Parameter: Tissue Value: Shoots
  misc_feature: MA Experiment ID: 20000453 Result: Up-regulated in Transcription
  misc_feature: MA Experiment 20000453 PARAMETER Experiment Name: At_100uM_ABA_P Parameter: Age (day) Value: 15
  misc_feature: MA Experiment 20000453 PARAMETER Experiment Name: At_100uM_ABA_P Parameter: Organism Value: A. thaliana
  misc_feature: MA Experiment 20000453 PARAMETER Experiment Name: At_100uM_ABA_P Parameter: Plant Line Value: WS
  misc_feature: MA Experiment 20000453 PARAMETER Experiment Name: At_100uM_ABA_P Parameter: Timepoint (hr) Value: 24
  misc_feature: MA Experiment 20000453 PARAMETER Experiment Name: At_100uM_ABA_P Parameter: Tissue Value: Aerial
  misc_feature: MA Experiment 20000453 PARAMETER Experiment Name: At_100uM_ABA_P Parameter: Treatment Value: 100uM ABA vs. No Treatment
  misc_feature: MA Experiment ID: 20000455 Result: Up-regulated in Transcription
  misc_feature: MA Experiment 20000455 PARAMETER Experiment Name: At_100uM_ABA_P Parameter: Age (day) Value: 16
  misc_feature: MA Experiment 20000455 PARAMETER Experiment Name: At_100uM_ABA_P Parameter: Organism Value: A. thaliana
  misc_feature: MA Experiment 20000455 PARAMETER Experiment Name: At_100uM_ABA_P Parameter: Plant Line Value: WS
  misc_feature: MA Experiment 20000455 PARAMETER Experiment Name: At_100uM_ABA_P Parameter: Timepoint (hr) Value: 48
  misc_feature: MA Experiment 20000455 PARAMETER Experiment Name: At_100uM_ABA_P Parameter: Tissue Value: Aerial
  misc_feature: MA Experiment 20000455 PARAMETER Experiment Name: At_100uM_ABA_P Parameter: Treatment Value: 100uM ABA vs. No Treatment
  misc_feature: MA Experiment ID: 20000495 Result: Up-regulated in Transcription
  misc_feature: MA Experiment 20000495 PARAMETER Experiment Name: At_Guard_Cells_P Parameter: Harvest Date Value: 8/2/2002
  misc_feature: MA Experiment 20000495 PARAMETER Experiment Name: At_Guard_Cells_P Parameter: Organism Value: A. thaliana
  misc_feature: MA Experiment 20000495 PARAMETER Experiment Name: At_Guard_Cells_P Parameter: Tissue Value: Guard Cells vs. Leaves
  misc_feature: MA Experiment ID: 20000794 Result: Down-regulated in Transcription
  misc_feature: MA Experiment 20000794 PARAMETER Experiment Name: At_Petals_P Parameter: Age (day) Value: 23-25 days
  misc_feature: MA Experiment 20000794 PARAMETER Experiment Name: At_Petals_P Parameter: Plant Line Value: WS
  misc_feature: MA Experiment 20000794 PARAMETER Experiment Name: At_Petals_P Parameter: Tissue Value: Petals vs. Whole plant
  misc_feature: MA Experiment ID: 20001450 Result: Down-regulated in Transcription
  misc_feature: MA Experiment 20001450 PARAMETER Experiment Name: At_Far-red-induction_P Parameter: Age (day) Value: 7
  misc_feature: MA Experiment 20001450 PARAMETER Experiment Name: At_Far-red-induction_P Parameter: Light Value: Far-red vs. White
  misc_feature: MA Experiment 20001450 PARAMETER Experiment Name: At_Far-red-induction_P Parameter: Organism Value: A. thaliana
  misc_feature: MA Experiment 20001450 PARAMETER Experiment Name: At_Far-red-induction_P Parameter: Plant Line Value: Columbia
  misc_feature: MA Experiment 20001450 PARAMETER Experiment Name: At_Far-red-induction_P Parameter: Timepoint (hr) Value: 8
  misc_feature: MA Experiment 20001450 PARAMETER Experiment Name: At_Far-red-induction_P Parameter: Tissue Value: Whole Plant
  misc_feature: MA Experiment ID: 20001451 Result: Down-regulated in Transcription
  misc_feature: MA Experiment 20001451 PARAMETER Experiment Name: At_Far-red-induction_P Parameter: Age (day) Value: 7
  misc_feature: MA Experiment 20001451 PARAMETER Experiment Name: At_Far-red-induction_P Parameter: Light Value: Far-red vs. White
  misc_feature: MA Experiment 20001451 PARAMETER Experiment Name: At_Far-red-induction_P Parameter: Organism Value: A. thaliana
  misc_feature: MA Experiment 20001451 PARAMETER Experiment Name: At_Far-red-induction_P Parameter: Plant Line Value: Columbia
  misc_feature: MA Experiment 20001451 PARAMETER Experiment Name: At_Far-red-induction_P Parameter: Timepoint (hr) Value: 24
  misc_feature: MA Experiment 20001451 PARAMETER Experiment Name: At_Far-red-induction_P Parameter: Tissue Value: Whole Plant
  misc_feature: MA Experiment ID: 20001558 Result: Down-regulated in Transcription
  misc_feature: MA Experiment 20001558 PARAMETER Experiment Name: At_Drought_Soil_Dry_P Parameter: Age (day) Value: 27
  misc_feature: MA Experiment 20001558 PARAMETER Experiment Name: At_Drought_Soil_Dry_P Parameter: Organism Value: A. thaliana
  misc_feature: MA Experiment 20001558 PARAMETER Experiment Name: At_Drought_Soil_Dry_P Parameter: Plant Line Value: WS
  misc_feature: MA Experiment 20001558 PARAMETER Experiment Name: At_Drought_Soil_Dry_P Parameter: Post Timepoint (hr) Value: 6
  misc_feature: MA Experiment 20001558 PARAMETER Experiment Name: At_Drought_Soil_Dry_P Parameter: Post-Treatment Value: Re-Water vs. No Drought
  misc_feature: MA Experiment 20001558 PARAMETER Experiment Name: At_Drought_Soil_Dry_P Parameter: Timepoint (day) Value: 13
  misc_feature: MA Experiment 20001558 PARAMETER Experiment Name: At_Drought_Soil_Dry_P Parameter: Treatment Value: Drought vs. No Drought
  misc_feature: MA Experiment ID: 20001768 Result: Down-regulated in Transcription
  misc_feature: MA Experiment 20001768 PARAMETER Experiment Name: At_Far-red-enriched-adult_P Parameter: Age (day) Value: 28
  misc_feature: MA Experiment 20001768 PARAMETER Experiment Name: At_Far-red-enriched-adult_P Parameter: Light Value: Far-red enriched vs. White
  misc_feature: MA Experiment 20001768 PARAMETER Experiment Name: At_Far-red-enriched-adult_P Parameter: Organism Value: A. thaliana
  misc_feature: MA Experiment 20001768 PARAMETER Experiment Name: At_Far-red-enriched-adult_P Parameter: Plant Line Value: Columbia
  misc_feature: MA Experiment 20001768 PARAMETER Experiment Name: At_Far-red-enriched-adult_P Parameter: Timepoint (hr) Value: 1
  misc_feature: MA Experiment 20001768 PARAMETER Experiment Name: At_Far-red-enriched-adult_P Parameter: Tissue Value: Aerial
accatcctaaacattttttcttgaataaaatcagaattacaaacaaaaatggttttgcaaaagcttcctctcattgggctgcttttgctcctgaccatcgtcgcctctccagcaaatgcagatggacctgtttgcccgccgtcgaacaaactaagccgggcaagtttccctgaaggttttttatttggcacggctactgcggcataccaggtcgaaggtgcgattaatgaaacttgtcgtggaccagccttatgggacatctactgtagaagatatccagagaggtgcaataacgataacggcgatgtggccgttgatttcttccatcgttataaggaagatatccaactaatgaagaatctaaacacagacgcctttagaatgtctatcgcatggccaagaatatttcctcatgggagaaaggagaaaggagtgagtcaagctggtgtgcaattctaccacgacctcatcgacgagctcataaaaaatggtataactccattcgttactgtttttcactgggacactccacaagatttagaagatgaatatggcggctttttaagcgaaaggattgtgaaggatttccgagagtatgcagattttgttttccaagaatacggtggaaaagtgaaacattggatcactttcaatgagccatgggttttctcgcacgctggctatgacgtaggcaaaaaggcacctggtcgttgctcttcttacgtcaatgctaaatgccaagacggacgatcaggatacgaggcttaccttgtcactcacaatctccttatctctcacgcagaagcagttgaagcttaccggaaatgcgaaaagtgtaaaggtgggaagatcggaattgcacatagtcctgcttggttcgaagcacatgaccttgctgattcacaagacggtgcgtccatcgaccgtgcacttgactttattttgggatggcatctagacacaactacatttggagattatccacagatcatgaaagacattgttggacatagattgcctaaatttacaactgagcagaaagcaaaactgaaagcttctaccgatttcgttgggctcaactactatacttcagtgttttcaaaccatttggagaaacctgatccttcaaaaccaagatggatgcaagattctcttattacatgggagtctaagaatgcgcaaaattacgccattggtagcaagcctttgaccgctgcattgaacgtttactcgagaggttttagaagtctgttgaagtacattaaggacaaatacgcaaatccggaaattatgatcatggaaaacggatatggagaagaactaggggcctcagattctgttgctgttggtaccgctgatcataacaggaaatattatcttcagaggcatcttttgagtatgcaagaagctgtttgcatcgacaaagtgaatgttacaggatactttgtatggtcattgttggataacttcgagtggcaagatggttacaaaaacagatttggactctactacgttgatttcaaaaataacctcacacgttacgagaaagaatccggcaagtattacaaggatttcctcagtcaaggtgttcgtccatccgcgctcaagaaggatgagctttaagctatttctgtttcaatgtgtttttcctatgttttactttgtgagtgaccaagattcatgaggtcttggttctaataaaaagagtttatttttcttctcatttttcattgtctacatgatttgccagatctacaaggctctggttataataaaatgatcctttgtgcctc

SEQ ID NO: 104546 - protein, 524 aa, Arabidopsis thaliana; identical to SEQ ID NO: 22472
  peptide (1)..(524): Ceres Seq. ID no. 13615253
  misc_feature (1)..(524): Homolog of NCBI NO: 15232626 NR Description: glycosyl hydrolase family 1 [Arabidopsis >gi|6478919|gb|AAF14024.1|AC011436_8 thioglucosidase 3D precursor thaliana] >gi|14423460|gb|AAK62412.1|AF386967_1 thioglucosidase
  misc_feature (1)..(524): Homolog of NCBI NO: 1363489 NR Description: thioglucosidase (EC 3.2.1.147) 3D precursor - thaliana >gi|984052|emb|CAA61592.1| thioglucoside glucohydrolase thaliana] >gi|5524767|emb|CAB50792.1| thioglucoside
  misc_feature (1)..(524): Homolog of NCBI NO: 1732570 NR Description: beta-glucosidase [Arabidopsis thaliana]
  misc_feature (1)..(524): Homolog of NCBI NO: 15219623 NR Description: glycosyl hydrolase family 1 [Arabidopsis thaliana]
  misc_feature (1)..(524): Homolog of NCBI NO: 15219605 NR Description: glycosyl hydrolase family 1, beta-glucosidase
  misc_feature (1)..(524): Homolog of NCBI NO: 2286069 NR Description: beta-glucosidase [Arabidopsis thaliana]
  misc_feature (1)..(524): Homolog of NCBI NO: 30697327 NR Description: glycosyl hydrolase family 1, beta-glucosidase
  misc_feature (1)..(524): Homolog of NCBI NO: 15241841 NR Description: glycosyl hydrolase family 1 [Arabidopsis thaliana]
  misc_feature (89)..(524): Homolog of NCBI NO: 1732572 NR Description: beta-glucosidase [Brassica nigra]
  misc_feature (4)..(522): Homolog of NCBI NO: 12043529 NR Description: beta-glucosidase 1 [Arabidopsis thaliana]

SEQ ID NO: 104547 - protein, 423 aa, Arabidopsis thaliana; identical to SEQ ID NO: 22473
  peptide (1)..(423): Ceres Seq. ID no. 13615254
  misc_feature (1)..(423): Homolog of NCBI NO: 15232626 NR Description: glycosyl hydrolase family 1 [Arabidopsis >gi|6478919|gb|AAF14024.1|AC011436_8 thioglucosidase 3D precursor thaliana] >gi|14423460|gb|AAK62412.1|AF386967_1 thioglucosidase
  misc_feature (1)..(423): Homolog of NCBI NO: 1363489 NR Description: thioglucosidase (EC 3.2.1.147) 3D precursor - thaliana >gi|984052|emb|CAA61592.1| thioglucoside glucohydrolase thaliana] >gi|5524767|emb|CAB50792.1| thioglucoside
  misc_feature (1)..(423): Homolog of NCBI NO: 1732570 NR Description: beta-glucosidase [Arabidopsis thaliana]
  misc_feature (1)..(423): Homolog of NCBI NO: 15219623 NR Description: glycosyl hydrolase family 1 [Arabidopsis thaliana]
  misc_feature (1)..(423): Homolog of NCBI NO: 15219605 NR Description: glycosyl hydrolase family 1, beta-glucosidase
  misc_feature (1)..(423): Homolog of NCBI NO: 2286069 NR Description: beta-glucosidase [Arabidopsis thaliana]
  misc_feature (1)..(423): Homolog of NCBI NO: 30697327 NR Description: glycosyl hydrolase family 1, beta-glucosidase
  misc_feature (1)..(423): Homolog of NCBI NO: 15241841 NR Description: glycosyl hydrolase family 1 [Arabidopsis thaliana]
  misc_feature (1)..(423): Homolog of NCBI NO: 1732572 NR Description: beta-glucosidase [Brassica nigra]
  misc_feature (1)..(421): Homolog of NCBI NO: 12043529 NR Description: beta-glucosidase 1 [Arabidopsis thaliana]

SEQ ID NO: 104548 - protein, 413 aa, Arabidopsis thaliana; identical to SEQ ID NO: 22474
  peptide (1)..(413): Ceres Seq. ID no. 13615255
  misc_feature (1)..(413): Homolog of NCBI NO: 15232626 NR Description: glycosyl hydrolase family 1 [Arabidopsis >gi|6478919|gb|AAF14024.1|AC011436_8 thioglucosidase 3D precursor thaliana] >gi|14423460|gb|AAK62412.1|AF386967_1 thioglucosidase
  misc_feature (1)..(413): Homolog of NCBI NO: 1363489 NR Description: thioglucosidase (EC 3.2.1.147) 3D precursor - thaliana >gi|984052|emb|CAA61592.1| thioglucoside glucohydrolase thaliana] >gi|5524767|emb|CAB50792.1| thioglucoside
  misc_feature (1)..(413): Homolog of NCBI NO: 1732570 NR Description: beta-glucosidase [Arabidopsis thaliana]
  misc_feature (1)..(413): Homolog of NCBI NO: 15219623 NR Description: glycosyl hydrolase family 1 [Arabidopsis thaliana]
  misc_feature (1)..(413): Homolog of NCBI NO: 15219605 NR Description: glycosyl hydrolase family 1, beta-glucosidase
  misc_feature (1)..(413): Homolog of NCBI NO: 2286069 NR Description: beta-glucosidase [Arabidopsis thaliana]
  misc_feature (1)..(413): Homolog of NCBI NO: 30697327 NR Description: glycosyl hydrolase family 1, beta-glucosidase
  misc_feature (1)..(413): Homolog of NCBI NO: 15241841 NR Description: glycosyl hydrolase family 1 [Arabidopsis thaliana]
  misc_feature (1)..(413): Homolog of NCBI NO: 1732572 NR Description: beta-glucosidase [Brassica nigra]
  misc_feature (1)..(411): Homolog of NCBI NO: 12043529 NR Description: beta-glucosidase 1 [Arabidopsis thaliana]

SEQ ID NO: 104549 - DNA, 1464 bp, Arabidopsis thaliana
  misc_feature (1)..(1464): Ceres Seq. ID no. 13615259
  misc_feature: MA Experiment ID: 108434 Result: Up-regulated in Transcription
  misc_feature: MA Experiment 108434 PARAMETER Experiment Name: At_Root_Tips_cDNA_P Parameter: Tissue Value: Root Tips
  misc_feature: MA Experiment ID: 108461 Result: Down-regulated in Transcription
  misc_feature: MA Experiment 108461 PARAMETER Experiment Name: At_Germinating_Seeds_cDNA_P Parameter: Age (day) Value: 1 vs. 0
  misc_feature: MA Experiment 108461 PARAMETER Experiment Name: At_Germinating_Seeds_cDNA_P Parameter: Tissue Value: Germinating Seeds
  misc_feature: MA Experiment ID: 108462 Result: Down-regulated in Transcription
  misc_feature: MA Experiment 108462 PARAMETER Experiment Name: At_Germinating_Seeds_cDNA_P Parameter: Age (day) Value: 2 vs. 0
  misc_feature: MA Experiment 108462 PARAMETER Experiment Name: At_Germinating_Seeds_cDNA_P Parameter: Tissue Value: Germinating Seeds
  misc_feature: MA Experiment ID: 108463 Result: Down-regulated in Transcription
  misc_feature: MA Experiment 108463 PARAMETER Experiment Name: At_Germinating_Seeds_cDNA_P Parameter: Age (day) Value: 3 vs. 0
  misc_feature: MA Experiment 108463 PARAMETER Experiment Name: At_Germinating_Seeds_cDNA_P Parameter: Tissue Value: Germinating Seeds
  misc_feature: MA Experiment ID: 108576 Result: Up-regulated in Transcription
  misc_feature: MA Experiment 108576 PARAMETER Experiment Name: At_42deg_Heat_cDNA_P Parameter: Temperature (deg C) Value: 42 vs. 22
  misc_feature: MA Experiment 108576 PARAMETER Experiment Name: At_42deg_Heat_cDNA_P Parameter: Timepoint (hr) Value: 1
  misc_feature: MA Experiment 108576 PARAMETER Experiment Name: At_42deg_Heat_cDNA_P Parameter: Tissue Value: Aerial
  misc_feature: MA Experiment ID: 108577 Result: Up-regulated in Transcription
  misc_feature: MA Experiment 108577 PARAMETER Experiment Name: At_42deg_Heat_cDNA_P Parameter: Temperature (deg C) Value: 42 vs. 22
  misc_feature: MA Experiment 108577 PARAMETER Experiment Name: At_42deg_Heat_cDNA_P Parameter: Timepoint (hr) Value: 6
  misc_feature: MA Experiment 108577 PARAMETER Experiment Name: At_42deg_Heat_cDNA_P Parameter: Tissue Value: Aerial
  misc_feature: MA Experiment ID: 108595 Result: Up-regulated in Transcription
  misc_feature: MA Experiment 108595 PARAMETER Experiment Name: At_Ler-pi_Ovule_cDNA_P Parameter: Plant Line Value: null
  misc_feature: MA Experiment ID: 108668 Result: Up-regulated in Transcription
  misc_feature: MA Experiment 108668 PARAMETER Experiment Name: At_2mM_SA_cDNA_P Parameter: Plant Line Value: WS
  misc_feature: MA Experiment 108668 PARAMETER Experiment Name: At_2mM_SA_cDNA_P Parameter: Timepoint (hr) Value: 6
  misc_feature: MA Experiment 108668 PARAMETER Experiment Name: At_2mM_SA_cDNA_P Parameter: Treatment Value: 2mM SA vs. No Treatment
  misc_feature: MA Experiment ID: 20000070 Result: Up-regulated in Transcription
  misc_feature: MA Experiment 20000070 PARAMETER Experiment Name: At_100uM_ABA_Mutants_cDNA_P Parameter: Plant Line Value: CS24
  misc_feature: MA Experiment 20000070 PARAMETER Experiment Name: At_100uM_ABA_Mutants_cDNA_P Parameter: Timepoint (hr) Value: 6
  misc_feature: MA Experiment 20000070 PARAMETER Experiment Name: At_100uM_ABA_Mutants_cDNA_P Parameter: Tissue Value: Aerial
  misc_feature: MA Experiment 20000070 PARAMETER Experiment Name: At_100uM_ABA_Mutants_cDNA_P Parameter: Treatment Value: 100uM ABA vs. No Treatment
  misc_feature: MA Experiment ID: 20000089 Result: Up-regulated in Transcription
  misc_feature: MA Experiment ID: 20000090 Result: Up-regulated in Transcription
  misc_feature: MA Experiment ID: 20000093 Result: Up-regulated in Transcription
  misc_feature: MA Experiment 20000093 PARAMETER Experiment Name: At_42deg_Heat_cDNA_P Parameter: Temperature (deg C) Value: 42 vs. 22
  misc_feature: MA Experiment 20000093 PARAMETER Experiment Name: At_42deg_Heat_cDNA_P Parameter: Timepoint (hr) Value: 0.5
  misc_feature: MA Experiment 20000093 PARAMETER Experiment Name: At_42deg_Heat_cDNA_P Parameter: Tissue Value: Aerial
  misc_feature: MA Experiment ID: 20000112 Result: Up-regulated in Transcription
  misc_feature: MA Experiment 20000112 PARAMETER Experiment Name: At_42deg_Heat_cDNA_P Parameter: Temperature (deg C) Value: 42 vs. 22
  misc_feature: MA Experiment 20000112 PARAMETER Experiment Name: At_42deg_Heat_cDNA_P Parameter: Timepoint (hr) Value: 2
  misc_feature: MA Experiment 20000112 PARAMETER Experiment Name: At_42deg_Heat_cDNA_P Parameter: Tissue Value: Aerial
  misc_feature: MA Experiment ID: 20000113 Result: Up-regulated in Transcription
  misc_feature: MA Experiment 20000113 PARAMETER Experiment Name: At_42deg_Heat_cDNA_P Parameter: Temperature (deg C) Value: 42 vs. 22
  misc_feature: MA Experiment 20000113 PARAMETER Experiment Name: At_42deg_Heat_cDNA_P Parameter: Timepoint (hr) Value: 8
  misc_feature: MA Experiment 20000113 PARAMETER Experiment Name: At_42deg_Heat_cDNA_P Parameter: Tissue Value: Aerial
  misc_feature: MA Experiment ID: 20000117 Result: Up-regulated in Transcription
  misc_feature: MA Experiment 20000117 PARAMETER Experiment Name: At_100uM_ABA_Mutants_cDNA_P Parameter: Plant Line Value: Columbia
  misc_feature: MA Experiment 20000117 PARAMETER Experiment Name: At_100uM_ABA_Mutants_cDNA_P Parameter: Timepoint (hr) Value: 6
  misc_feature: MA Experiment 20000117 PARAMETER Experiment Name: At_100uM_ABA_Mutants_cDNA_P Parameter: Tissue Value: Aerial
  misc_feature: MA Experiment 20000117 PARAMETER Experiment Name: At_100uM_ABA_Mutants_cDNA_P Parameter: Treatment Value: 100uM ABA vs. No Treatment
  misc_feature: MA Experiment ID: 20000144 Result: Up-regulated in Transcription
  misc_feature: MA Experiment 20000144 PARAMETER Experiment Name: At_42deg_Heat_cDNA_P Parameter: Temperature (deg C) Value: 42 vs. 22
  misc_feature: MA Experiment 20000144 PARAMETER Experiment Name: At_42deg_Heat_cDNA_P Parameter: Timepoint (hr) Value: 1
  misc_feature: MA Experiment 20000144 PARAMETER Experiment Name: At_42deg_Heat_cDNA_P Parameter: Tissue Value: Aerial
  misc_feature: MA Experiment ID: 20000171 Result: Up-regulated in Transcription
  misc_feature: MA Experiment 20000171 PARAMETER Experiment Name: At_42deg_Heat_P Parameter: Age (day) Value: 14
  misc_feature: MA Experiment 20000171 PARAMETER Experiment Name: At_42deg_Heat_P Parameter: Organism Value: A. thaliana
  misc_feature: MA Experiment 20000171 PARAMETER Experiment Name: At_42deg_Heat_P Parameter: Plant Line Value: WS
  misc_feature: MA Experiment 20000171 PARAMETER Experiment Name: At_42deg_Heat_P Parameter: Temperature (deg C) Value: 42 vs. 22
  misc_feature: MA Experiment 20000171 PARAMETER Experiment Name: At_42deg_Heat_P Parameter: Timepoint (hr) Value: 1
  misc_feature: MA Experiment 20000171 PARAMETER Experiment Name: At_42deg_Heat_P Parameter: Tissue Value: Aerial
  misc_feature: MA Experiment ID: 20000173 Result: Up-regulated in Transcription
  misc_feature: MA Experiment 20000173 PARAMETER Experiment Name: At_42deg_Heat_P Parameter: Age (day) Value: 14
  misc_feature: MA Experiment 20000173 PARAMETER Experiment Name: At_42deg_Heat_P Parameter: Organism Value: A. thaliana
  misc_feature: MA Experiment 20000173 PARAMETER Experiment Name: At_42deg_Heat_P Parameter: Plant Line Value: WS
  misc_feature: MA Experiment 20000173 PARAMETER Experiment Name: At_42deg_Heat_P Parameter: Temperature (deg C) Value: 42 vs. 22
  misc_feature: MA Experiment 20000173 PARAMETER Experiment Name: At_42deg_Heat_P Parameter: Timepoint (hr) Value: 6
  misc_feature: MA Experiment 20000173 PARAMETER Experiment Name: At_42deg_Heat_P Parameter: Tissue Value: Aerial
  misc_feature: MA Experiment ID: 20000180 Result: Down-regulated in Transcription
  misc_feature: MA Experiment 20000180 PARAMETER Experiment Name: At_Germinating_Seeds_P Parameter: Age (hr) Value: 24 vs. 0
  misc_feature: MA Experiment 20000180 PARAMETER Experiment Name: At_Germinating_Seeds_P Parameter: Tissue Value: Germinating Seeds
  misc_feature: MA Experiment ID: 20000182 Result: Up-regulated in Transcription
  misc_feature: MA Experiment 20000182 PARAMETER Experiment Name: At_2mM_SA_P Parameter: Age (day) Value: 14
  misc_feature: MA Experiment 20000182 PARAMETER Experiment Name: At_2mM_SA_P Parameter: Organism Value: A. thaliana
  misc_feature: MA Experiment 20000182 PARAMETER Experiment Name: At_2mM_SA_P Parameter: Plant Line Value: WS
  misc_feature: MA Experiment 20000182 PARAMETER Experiment Name: At_2mM_SA_P Parameter: Timepoint (hr) Value: 6
  misc_feature: MA Experiment 20000182 PARAMETER Experiment Name: At_2mM_SA_P Parameter: Tissue Value: Aerial
  misc_feature: MA Experiment 20000182 PARAMETER Experiment Name: At_2mM_SA_P Parameter: Treatment Value: 2mM SA vs. No Treatment
  misc_feature: MA Experiment ID: 20000437 Result: Up-regulated in Transcription
  misc_feature: MA Experiment 20000437 PARAMETER Experiment Name: At_Drought_P Parameter: Age (day) Value: 8
  misc_feature: MA Experiment 20000437 PARAMETER Experiment Name: At_Drought_P Parameter: Organism Value: A. thaliana
  misc_feature: MA Experiment 20000437 PARAMETER Experiment Name: At_Drought_P Parameter: Plant Line Value: WS
  misc_feature: MA Experiment 20000437 PARAMETER Experiment Name: At_Drought_P Parameter: Timepoint (hr) Value: 24
  misc_feature: MA Experiment 20000437 PARAMETER Experiment Name: At_Drought_P Parameter: Tissue Value: Whole Plant
  misc_feature: MA Experiment 20000437 PARAMETER Experiment Name: At_Drought_P Parameter: Treatment Value: Drought vs. No Drought
  misc_feature: MA Experiment ID: 20000456 Result: Up-regulated in Transcription
  misc_feature: MA Experiment 20000456 PARAMETER Experiment Name: At_100uM_BA_P Parameter: Age (day) Value: 14
  misc_feature: MA Experiment 20000456 PARAMETER Experiment Name: At_100uM_BA_P Parameter: Organism Value: A. thaliana
  misc_feature: MA Experiment 20000456 PARAMETER Experiment Name: At_100uM_BA_P Parameter: Plant Line Value: WS
  misc_feature: MA Experiment 20000456 PARAMETER Experiment Name: At_100uM_BA_P Parameter: Timepoint (hr) Value: 6
  misc_feature: MA Experiment 20000456 PARAMETER Experiment Name: At_100uM_BA_P Parameter: Tissue Value: Aerial
  misc_feature: MA Experiment 20000456 PARAMETER Experiment Name: At_100uM_BA_P Parameter: Treatment Value: 100uM BA vs. No Treatment
  misc_feature: MA Experiment ID: 20000709 Result: Up-regulated in Transcription
  misc_feature: MA Experiment 20000709 PARAMETER Experiment Name: At_15mM_NH4NO3_L-to-H_P Parameter: Age (hr) Value: 14
  misc_feature: MA Experiment 20000709 PARAMETER Experiment Name: At_15mM_NH4NO3_L-to-H_P Parameter: Organism Value: A. thaliana
  misc_feature: MA Experiment 20000709 PARAMETER Experiment Name: At_15mM_NH4NO3_L-to-H_P Parameter: Plant Line Value: WS
  misc_feature: MA Experiment 20000709 PARAMETER Experiment Name: At_15mM_NH4NO3_L-to-H_P Parameter: Timepoint (hr) Value: 4
  misc_feature: MA Experiment 20000709 PARAMETER Experiment Name: At_15mM_NH4NO3_L-to-H_P Parameter: Tissue Value: Aerial
  misc_feature: MA Experiment 20000709 PARAMETER Experiment Name: At_15mM_NH4NO3_L-to-H_P Parameter: Treatment Value: 15mM NH4NO3 vs. 30mM Mannitol
  misc_feature: MA Experiment ID: 20001247 Result: Down-regulated in Transcription
  misc_feature: MA Experiment 20001247 PARAMETER Experiment Name: At_Far-red-induction_P Parameter: Age (day) Value: 7
  misc_feature: MA Experiment 20001247 PARAMETER Experiment Name: At_Far-red-induction_P Parameter: Light Value: Far-red vs. White
  misc_feature: MA Experiment 20001247 PARAMETER Experiment Name: At_Far-red-induction_P Parameter: Organism Value: A. thaliana
  misc_feature: MA Experiment 20001247 PARAMETER Experiment Name: At_Far-red-induction_P Parameter: Plant Line Value: Columbia
  misc_feature: MA Experiment 20001247 PARAMETER Experiment Name: At_Far-red-induction_P Parameter: Timepoint (hr) Value: 1
  misc_feature: MA Experiment 20001247 PARAMETER Experiment Name: At_Far-red-induction_P Parameter: Tissue Value: Whole Plant
  misc_feature: MA Experiment ID: 20001248 Result: Down-regulated in Transcription
  misc_feature: MA Experiment 20001248 PARAMETER Experiment Name: At_Far-red-induction_P Parameter: Age (day) Value: 7
  misc_feature: MA Experiment 20001248 PARAMETER Experiment Name: At_Far-red-induction_P Parameter: Light Value: Far-red vs. White
  misc_feature: MA Experiment 20001248 PARAMETER Experiment Name: At_Far-red-induction_P Parameter: Organism Value: A. thaliana
  misc_feature: MA Experiment 20001248 PARAMETER Experiment Name: At_Far-red-induction_P Parameter: Plant Line Value: Columbia
  misc_feature: MA Experiment 20001248 PARAMETER Experiment Name: At_Far-red-induction_P Parameter: Timepoint (hr) Value: 4
  misc_feature: MA Experiment 20001248 PARAMETER Experiment Name: At_Far-red-induction_P Parameter: Tissue Value: Whole Plant
  misc_feature: MA Experiment ID: 20001450 Result: Down-regulated in Transcription
  misc_feature: MA Experiment 20001450 PARAMETER Experiment Name: At_Far-red-induction_P Parameter: Age (day) Value: 7
  misc_feature: MA Experiment 20001450 PARAMETER Experiment Name: At_Far-red-induction_P Parameter: Light Value: Far-red vs. White
  misc_feature: MA Experiment 20001450 PARAMETER Experiment Name: At_Far-red-induction_P Parameter: Organism Value: A. thaliana
  misc_feature: MA Experiment 20001450 PARAMETER Experiment Name: At_Far-red-induction_P Parameter: Plant Line Value: Columbia
  misc_feature: MA Experiment 20001450 PARAMETER Experiment Name: At_Far-red-induction_P Parameter: Timepoint (hr) Value: 8
  misc_feature: MA Experiment 20001450 PARAMETER Experiment Name: At_Far-red-induction_P Parameter: Tissue Value: Whole Plant
  misc_feature: MA Experiment ID: 20001451 Result: Down-regulated in Transcription
  misc_feature: MA Experiment 20001451 PARAMETER Experiment Name: At_Far-red-induction_P Parameter: Age (day) Value: 7
  misc_feature: MA Experiment 20001451 PARAMETER Experiment Name: At_Far-red-induction_P Parameter: Light Value: Far-red vs. White
  misc_feature: MA Experiment 20001451 PARAMETER Experiment Name: At_Far-red-induction_P Parameter: Organism Value: A. thaliana
  misc_feature: MA Experiment 20001451 PARAMETER Experiment Name: At_Far-red-induction_P Parameter: Plant Line Value: Columbia
  misc_feature: MA Experiment 20001451 PARAMETER Experiment Name: At_Far-red-induction_P Parameter: Timepoint (hr) Value: 24
  misc_feature: MA Experiment 20001451 PARAMETER Experiment Name: At_Far-red-induction_P Parameter: Tissue Value: Whole Plant
  misc_feature: MA Experiment ID: 20001557 Result: Up-regulated in Transcription
  misc_feature: MA Experiment 20001557 PARAMETER Experiment Name: At_Drought_Soil_Dry_P Parameter: Age (day) Value: 27
  misc_feature: MA Experiment 20001557 PARAMETER Experiment Name: At_Drought_Soil_Dry_P Parameter: Organism Value: A. thaliana
  misc_feature: MA Experiment 20001557 PARAMETER Experiment Name: At_Drought_Soil_Dry_P Parameter: Plant Line Value: WS
  misc_feature: MA Experiment 20001557 PARAMETER Experiment Name: At_Drought_Soil_Dry_P Parameter: Post Timepoint (hr) Value: 3
  misc_feature: MA Experiment 20001557 PARAMETER Experiment Name: At_Drought_Soil_Dry_P Parameter: Post-Treatment Value: Re-Water vs. No Drought
  misc_feature: MA Experiment 20001557 PARAMETER Experiment Name: At_Drought_Soil_Dry_P Parameter: Timepoint (day) Value: 13
  misc_feature: MA Experiment 20001557 PARAMETER Experiment Name: At_Drought_Soil_Dry_P Parameter: Treatment Value: Drought vs. No Drought
  misc_feature: MA Experiment ID: 20001560 Result: Up-regulated in Transcription
  misc_feature: MA Experiment 20001560 PARAMETER Experiment Name: At_Drought_Soil_Dry_P Parameter: Age (day) Value: 28
  misc_feature: MA Experiment 20001560 PARAMETER Experiment Name: At_Drought_Soil_Dry_P Parameter: Organism Value: A. thaliana
  misc_feature: MA Experiment 20001560 PARAMETER Experiment Name: At_Drought_Soil_Dry_P Parameter: Plant Line Value: WS
  misc_feature: MA Experiment 20001560 PARAMETER Experiment Name: At_Drought_Soil_Dry_P Parameter: Post Timepoint (hr) Value: None
  misc_feature: MA Experiment 20001560 PARAMETER Experiment Name: At_Drought_Soil_Dry_P Parameter: Post-Treatment Value: None
  misc_feature: MA Experiment 20001560 PARAMETER Experiment Name: At_Drought_Soil_Dry_P Parameter: Timepoint (day) Value: 14
  misc_feature: MA Experiment 20001560 PARAMETER Experiment Name: At_Drought_Soil_Dry_P Parameter: Treatment Value: Drought vs. No Drought
  misc_feature: MA Experiment ID: 20001772 Result: Down-regulated in Transcription
  misc_feature: MA Experiment 20001772 PARAMETER Experiment Name: At_Far-red-enriched-adult_P Parameter: Age (day) Value: 29
  misc_feature: MA Experiment 20001772 PARAMETER Experiment Name: At_Far-red-enriched-adult_P Parameter: Light Value: Far-red enriched vs. White
  misc_feature: MA Experiment 20001772 PARAMETER Experiment Name: At_Far-red-enriched-adult_P Parameter: Organism Value: A. thaliana
  misc_feature: MA Experiment 20001772 PARAMETER Experiment Name: At_Far-red-enriched-adult_P Parameter: Plant Line Value: Columbia
  misc_feature: MA Experiment 20001772 PARAMETER Experiment Name: At_Far-red-enriched-adult_P Parameter: Timepoint (hr) Value: 24
  misc_feature: MA Experiment 20001772 PARAMETER Experiment Name: At_Far-red-enriched-adult_P Parameter: Tissue Value: Aerial
  misc_feature: MA Experiment ID: 20001905 Result: Up-regulated in Transcription
  misc_feature: MA Experiment 20001905 PARAMETER Experiment Name: At_Drought_Reproduction_P Parameter: Age (day) Value: 40
  misc_feature: MA Experiment 20001905 PARAMETER Experiment Name: At_Drought_Reproduction_P Parameter: Organism Value: A. thaliana
  misc_feature: MA Experiment 20001905 PARAMETER Experiment Name: At_Drought_Reproduction_P Parameter: Plant Line Value: WS
  misc_feature: MA Experiment 20001905 PARAMETER Experiment Name: At_Drought_Reproduction_P Parameter: Timepoint (day) Value: 10
  misc_feature: MA Experiment 20001905 PARAMETER Experiment Name: At_Drought_Reproduction_P Parameter: Tissue Value: Rosettes
  misc_feature: MA Experiment 20001905 PARAMETER Experiment Name: At_Drought_Reproduction_P Parameter: Treatment Value: Drought vs. No Drought
  misc_feature: MA Experiment ID: 20001911 Result: Up-regulated in Transcription
  misc_feature: MA Experiment 20001911 PARAMETER Experiment Name: At_Drought_Reproduction_P Parameter: Age (day) Value: 40
  misc_feature: MA Experiment 20001911 PARAMETER Experiment Name: At_Drought_Reproduction_P Parameter: Organism Value: A. thaliana
  misc_feature: MA Experiment 20001911 PARAMETER Experiment Name: At_Drought_Reproduction_P Parameter: Plant Line Value: WS
  misc_feature: MA Experiment 20001911 PARAMETER Experiment Name: At_Drought_Reproduction_P Parameter: Timepoint (day) Value: 10
  misc_feature: MA Experiment 20001911 PARAMETER Experiment Name: At_Drought_Reproduction_P Parameter: Tissue Value: Flowers
  misc_feature: MA Experiment 20001911 PARAMETER Experiment Name: At_Drought_Reproduction_P Parameter: Treatment Value: Drought vs. No Drought
aagatttttaagaatgttgtagtagcttcgcgaataatctcaggtcttctataaaaccaaactagcgattagccgactcttcctctttattattacaaagacgaaaaggcttcgagttttgtaatttcttcttctgttacaagttcttttcactgtgaaagtaattcttcaatggcgaaagacggacctaattgggatggtttgcttaagtggagtctctctcacgccgacggtactcgacccactcgccagttgagtgaggaggatcgaaaatggtttatggaggctatgcaatcgcagactgtagatgtagtcaaacgcatgaaggagattacactagttatgcaaacacctgaacaagttttggtggaacatggagtaacacctgaagatatccaagatttgctggatgagctgcaagagcacgttgaatcgatcgatatggctaacgatcttcattcaattggaggcttggttcctcttcttagtttccttaaaaactctcatgctaatattcgggcaaaagctgcggatgtcgttagcacaatagttcagaacaatcctagaagtcaggaacttgttatggaaaccaatgctctggagtcattgctctcgaatttcacttcagacactgatattcacgctcgaacccaggctcttggcgcaatatcatctttgattcgccataacaaaccaggagtaacggctttcaagcttgccaatggttatgctggcctaagagacgccttggcatctgatagtgtgagatttcaaaggaaagccttaaacttgttgcaatatctactgcaagaggatgattcagaccgcagtattgccactggacttggattcccccgagtgatgatgcatcttgcctctagtgacgatgctgagatcagagaagccgctcttcgtggattacttgagctttcaagagagaaaaacgatggaagtagcagcatagataaaagcgatgagaaactgaggcagctactagaagaacggatcaaaggaatcaccttgatgtcacaagaggatcttgaaacggttaaagaagagagacagctcgtggatttactgtggagcatttgctacaatgaaccttcttctctgagagaaaaaggacttgtcgttcttcccggtgaagacgcattgcctcctgatgtcgctagcaagctctttgagcctcctcttagagcttctgcagcaaaccgtaatgctactgagaagaaagatgaacctatgaaactacttggaccatagacgagaaatcaaagctaaaactttttattacttttccttgttttttatgttttgtaacttttcaaattgtcagaaaagtttcatagatatatgtattatgtcaatgatcaagggctatgttatgttaatttttgttttcatcattcgagatctttagtcttgttattgttgagattaagaatattcagcttcaatgctttt

SEQ ID NO: 104550 - protein, 363 aa, Arabidopsis thaliana; identical to SEQ ID NO: 30785
  peptide (1)..(363): Ceres Seq. ID no. 13615260
  misc_feature (130)..(171): Pfam Name: Armadillo/beta-catenin-like repeat Pfam Description: Armadillo/beta-catenin-like repeat
  misc_feature (1)..(363): Homolog of NCBI NO: 18398480 NR Description: expressed protein [Arabidopsis thaliana] unknown protein [Arabidopsis thaliana]
  misc_feature (1)..(363): Homolog of NCBI NO: 21553998 NR Description: unknown [Arabidopsis thaliana]
  misc_feature (30)..(363): Homolog of NCBI NO: 6478927 NR Description: hypothetical protein [Arabidopsis thaliana]
  misc_feature (1)..(29): Homolog of NCBI NO: 6478927 NR Description: hypothetical protein [Arabidopsis thaliana]
  misc_feature (1)..(363): Homolog of NCBI NO: 34897412 NR Description: putative Hsp70 binding protein [Oryza sativa
  misc_feature (1)..(363): Homolog of NCBI NO: 15232329 NR Description: expressed protein [Arabidopsis thaliana]
  misc_feature (1)..(363): Homolog of NCBI NO: 26449490 NR Description: unknown protein [Arabidopsis thaliana]
  misc_feature (1)..(314): Homolog of NCBI NO: 15241689 NR Description: expressed protein [Arabidopsis thaliana]
  misc_feature (7)..(316): Homolog of NCBI NO: 29436427 NR Description: Similar to RIKEN cDNA 1500019G21 gene [Danio
  misc_feature (7)..(316): Homolog of NCBI NO: 12667701 NR Description: Hsp70 binding protein [Danio rerio]

SEQ ID NO: 104551 - protein, 327 aa, Arabidopsis thaliana; identical to SEQ ID NO: 30786
  peptide (1)..(327): Ceres Seq. ID no. 13615261
  misc_feature (94)..(135): Pfam Name: Armadillo/beta-catenin-like repeat Pfam Description: Armadillo/beta-catenin-like repeat
  misc_feature (1)..(327): Homolog of NCBI NO: 18398480 NR Description: expressed protein [Arabidopsis thaliana] unknown protein [Arabidopsis thaliana]
  misc_feature (1)..(327): Homolog of NCBI NO: 21553998 NR Description: unknown [Arabidopsis thaliana]
  misc_feature (1)..(327): Homolog of NCBI NO: 6478927 NR Description: hypothetical protein [Arabidopsis thaliana]
  misc_feature (1)..(327): Homolog of NCBI NO: 34897412 NR Description: putative Hsp70 binding protein [Oryza sativa
  misc_feature (1)..(327): Homolog of NCBI NO: 15232329 NR Description: expressed protein [Arabidopsis thaliana]
  misc_feature (1)..(327): Homolog of NCBI NO: 26449490 NR Description: unknown protein [Arabidopsis thaliana]
  misc_feature (1)..(278): Homolog of NCBI NO: 15241689 NR Description: expressed protein [Arabidopsis thaliana]
  misc_feature (1)..(280): Homolog of NCBI NO: 29436427 NR Description: Similar to RIKEN cDNA 1500019G21 gene [Danio
  misc_feature (1)..(280): Homolog of NCBI NO: 12667701 NR Description: Hsp70 binding protein [Danio rerio]
  misc_feature (1)..(264): Homolog of NCBI NO: 15231095 NR Description: expressed protein [Arabidopsis thaliana]

SEQ ID NO: 104552 - protein, 324 aa, Arabidopsis thaliana; identical to SEQ ID NO: 30787
  peptide (1)..(324): Ceres Seq. ID no. 13615262
  misc_feature (91)..(132): Pfam Name: Armadillo/beta-catenin-like repeat Pfam Description: Armadillo/beta-catenin-like repeat
  misc_feature (1)..(324): Homolog of NCBI NO: 18398480 NR Description: expressed protein [Arabidopsis thaliana] unknown protein [Arabidopsis thaliana]
  misc_feature (1)..(324): Homolog of NCBI NO: 21553998 NR Description: unknown [Arabidopsis thaliana]
  misc_feature (1)..(324): Homolog of NCBI NO: 6478927 NR Description: hypothetical protein [Arabidopsis thaliana]
  misc_feature (1)..(324): Homolog of NCBI NO: 34897412 NR Description: putative Hsp70 binding protein [Oryza sativa
  misc_feature (1)..(324): Homolog of NCBI NO: 15232329 NR Description: expressed protein [Arabidopsis thaliana]
  misc_feature (1)..(324): Homolog of NCBI NO: 26449490 NR Description: unknown protein [Arabidopsis thaliana]
  misc_feature (1)..(275): Homolog of NCBI NO: 15241689 NR Description: expressed protein [Arabidopsis thaliana]
  misc_feature (1)..(277): Homolog of NCBI NO: 29436427 NR Description: Similar to RIKEN cDNA 1500019G21 gene [Danio
  misc_feature (1)..(277): Homolog of NCBI NO: 12667701 NR Description: Hsp70 binding protein [Danio rerio]
  misc_feature (1)..(261): Homolog of NCBI NO: 15231095 NR Description: expressed protein [Arabidopsis thaliana]

SEQ ID NO: 104553 - DNA, 937 bp, Arabidopsis thaliana
  misc_feature (1)..(937): Ceres Seq. ID no. 13615266
  misc_feature: MA Experiment ID: 108435 Result: Down-regulated in Transcription
  misc_feature: MA Experiment 108435 PARAMETER Experiment Name: At_stm_Mutants_cDNA_P Parameter: Plant Line Value: wt Landsburg vs stm
  misc_feature: MA Experiment 108435 PARAMETER Experiment Name: At_stm_Mutants_cDNA_P Parameter: Tissue Value: Shoot Apical Meristem Region
  misc_feature: MA Experiment ID: 108463 Result: Down-regulated in Transcription
  misc_feature: MA Experiment 108463 PARAMETER Experiment Name: At_Germinating_Seeds_cDNA_P Parameter: Age (day) Value: 3 vs. 0
  misc_feature: MA Experiment 108463 PARAMETER Experiment Name: At_Germinating_Seeds_cDNA_P Parameter: Tissue Value: Germinating Seeds
  misc_feature: MA Experiment ID: 108488 Result: Up-regulated in Transcription
  misc_feature: MA Experiment ID: 108573 Result: Up-regulated in Transcription
  misc_feature: MA Experiment 108573 PARAMETER Experiment Name: At_Drought_cDNA_P Parameter: Timepoint (hr) Value: 6
  misc_feature: MA Experiment 108573 PARAMETER Experiment Name: At_Drought_cDNA_P Parameter: Tissue Value: Aerial
  misc_feature: MA Experiment 108573 PARAMETER Experiment Name: At_Drought_cDNA_P Parameter: Treatment Value: Drought vs. No Drought
  misc_feature: MA Experiment ID: 20000068 Result: Down-regulated in Transcription
  misc_feature: MA Experiment ID: 20000071 Result: Down-regulated in Transcription
  misc_feature: MA Experiment 20000071 PARAMETER Experiment Name: At_100uM_ABA_Mutants_cDNA_P Parameter: Plant Line Value: CS8104
  misc_feature: MA Experiment 20000071 PARAMETER Experiment Name: At_100uM_ABA_Mutants_cDNA_P Parameter: Timepoint (hr) Value: 6
  misc_feature: MA Experiment 20000071 PARAMETER Experiment Name: At_100uM_ABA_Mutants_cDNA_P Parameter: Tissue Value: Aerial
  misc_feature: MA Experiment 20000071 PARAMETER Experiment Name: At_100uM_ABA_Mutants_cDNA_P Parameter: Treatment Value: 100uM ABA vs. No Treatment
  misc_feature: MA Experiment ID: 20000072 Result: Down-regulated in Transcription
  misc_feature: MA Experiment 20000072 PARAMETER Experiment Name: At_100uM_ABA_Mutants_cDNA_P Parameter: Plant Line Value: CS8105
  misc_feature: MA Experiment 20000072 PARAMETER Experiment Name: At_100uM_ABA_Mutants_cDNA_P Parameter: Timepoint (hr) Value: 6
  misc_feature: MA Experiment 20000072 PARAMETER Experiment Name: At_100uM_ABA_Mutants_cDNA_P Parameter: Tissue Value: Aerial
  misc_feature: MA Experiment 20000072 PARAMETER Experiment Name: At_100uM_ABA_Mutants_cDNA_P Parameter: Treatment Value: 100uM ABA vs. No Treatment
  misc_feature: MA Experiment ID: 20000117 Result: Down-regulated in Transcription
  misc_feature: MA Experiment 20000117 PARAMETER Experiment Name: At_100uM_ABA_Mutants_cDNA_P Parameter: Plant Line Value: Columbia
  misc_feature: MA Experiment 20000117 PARAMETER Experiment Name: At_100uM_ABA_Mutants_cDNA_P Parameter: Timepoint (hr) Value: 6
  misc_feature: MA Experiment 20000117 PARAMETER Experiment Name: At_100uM_ABA_Mutants_cDNA_P Parameter: Tissue Value: Aerial
  misc_feature: MA Experiment 20000117 PARAMETER Experiment Name: At_100uM_ABA_Mutants_cDNA_P Parameter: Treatment Value: 100uM ABA vs. No Treatment
  misc_feature: MA Experiment ID: 20000180 Result: Up-regulated in Transcription
  misc_feature: MA Experiment 20000180 PARAMETER Experiment Name: At_Germinating_Seeds_P Parameter: Age (hr) Value: 24 vs. 0
  misc_feature: MA Experiment 20000180 PARAMETER Experiment Name: At_Germinating_Seeds_P Parameter: Tissue Value: Germinating Seeds
  misc_feature: MA Experiment ID: 20000184 Result: Up-regulated in Transcription
  misc_feature: MA Experiment 20000184 PARAMETER Experiment Name: At_Shoots__P Parameter: Age (day) Value: 7
  misc_feature: MA Experiment 20000184 PARAMETER Experiment Name: At_Shoots__P Parameter: Tissue Value: Shoots vs. Whole Plant
  misc_feature: MA Experiment ID: 20000185 Result: Down-regulated in Transcription
  misc_feature: MA Experiment 20000185 PARAMETER Experiment Name: At_Roots__P Parameter: Age (day) Value: 7 vs. 21
  misc_feature: MA Experiment 20000185 PARAMETER Experiment Name: At_Roots__P Parameter: Organism Value: A. thaliana
  misc_feature: MA Experiment 20000185 PARAMETER Experiment Name: At_Roots__P Parameter: Tissue Value: Roots vs. Whole Plant
  misc_feature: MA Experiment ID: 20000264 Result: Down-regulated in Transcription
  misc_feature: MA Experiment 20000264 PARAMETER Experiment Name: At_Open_Flower_P Parameter: Age (day) Value: 21
  misc_feature: MA Experiment 20000264 PARAMETER Experiment Name: At_Open_Flower_P Parameter: Plant Line Value: WS
  misc_feature: MA Experiment 20000264 PARAMETER Experiment Name: At_Open_Flower_P Parameter: Tissue Value: Open Flower vs. Whole Plant
  misc_feature: MA Experiment ID: 20000269 Result: Up-regulated in Transcription
  misc_feature: MA Experiment 20000269 PARAMETER Experiment Name: At_1mM_KNO3_L-vs-H_Roots_P Parameter: Age (day) Value: 7,10,12
  misc_feature: MA Experiment 20000269 PARAMETER Experiment Name: At_1mM_KNO3_L-vs-H_Roots_P Parameter: Organism Value: A. thaliana
  misc_feature: MA Experiment 20000269 PARAMETER Experiment Name: At_1mM_KNO3_L-vs-H_Roots_P Parameter: Plant Line Value: WS
  misc_feature: MA Experiment 20000269 PARAMETER Experiment Name: At_1mM_KNO3_L-vs-H_Roots_P Parameter: Timepoint (day) Value: 7,10,12
  misc_feature: MA Experiment 20000269 PARAMETER Experiment Name: At_1mM_KNO3_L-vs-H_Roots_P Parameter: Tissue Value: Roots
  misc_feature: MA Experiment 20000269 PARAMETER Experiment Name: At_1mM_KNO3_L-vs-H_Roots_P Parameter: Treatment Value: 1mM KNO3 vs. 50mM KNO3
  misc_feature: MA Experiment ID: 20000286 Result: Down-regulated in Transcription
  misc_feature: MA Experiment 20000286 PARAMETER Experiment Name: At_Open_Flower_P Parameter: Age (day) Value: 21
  misc_feature: MA Experiment 20000286 PARAMETER Experiment Name: At_Open_Flower_P Parameter: Plant Line Value: WS
  misc_feature: MA Experiment 20000286 PARAMETER Experiment Name: At_Open_Flower_P Parameter: Tissue Value: Half Open vs. Whole Plant
  misc_feature: MA Experiment ID: 20000436 Result: Down-regulated in Transcription
  misc_feature: MA Experiment 20000436 PARAMETER Experiment Name: At_Drought_P Parameter: Age (day) Value: 7
  misc_feature: MA Experiment 20000436 PARAMETER Experiment Name: At_Drought_P Parameter: Organism Value: A. thaliana
  misc_feature: MA Experiment 20000436 PARAMETER Experiment Name: At_Drought_P Parameter: Plant Line Value: WS
  misc_feature: MA Experiment 20000436 PARAMETER Experiment Name: At_Drought_P Parameter: Timepoint (hr) Value: 12
  misc_feature: MA Experiment 20000436 PARAMETER Experiment Name: At_Drought_P Parameter: Tissue Value: Whole Plant
  misc_feature: MA Experiment 20000436 PARAMETER Experiment Name: At_Drought_P Parameter: Treatment Value: Drought vs. No Drought
  misc_feature: MA Experiment ID: 20000437 Result: Down-regulated in Transcription
  misc_feature: MA Experiment 20000437 PARAMETER Experiment Name: At_Drought_P Parameter: Age (day) Value: 8
  misc_feature: MA Experiment 20000437 PARAMETER Experiment Name: At_Drought_P Parameter: Organism Value: A. thaliana
  misc_feature: MA Experiment 20000437 PARAMETER Experiment Name: At_Drought_P Parameter: Plant Line Value: WS
  misc_feature: MA Experiment 20000437 PARAMETER Experiment Name: At_Drought_P Parameter: Timepoint (hr) Value: 24
  misc_feature: MA Experiment 20000437 PARAMETER Experiment Name: At_Drought_P Parameter: Tissue Value: Whole Plant
  misc_feature: MA Experiment 20000437 PARAMETER Experiment Name: At_Drought_P Parameter: Treatment Value: Drought vs. No Drought
  misc_feature: MA Experiment ID: 20000439 Result: Down-regulated in Transcription
  misc_feature: MA Experiment 20000439 PARAMETER Experiment Name: At_Roots__P Parameter: Age (day) Value: 14 vs. 21
  misc_feature: MA Experiment 20000439 PARAMETER Experiment Name: At_Roots__P Parameter: Organism Value: A. thaliana
  misc_feature: MA Experiment 20000439 PARAMETER Experiment Name: At_Roots__P Parameter: Tissue Value: Roots vs. Whole Plant
  misc_feature: MA Experiment ID: 20000445 Result: Down-regulated in Transcription
  misc_feature: MA Experiment 20000445 PARAMETER Experiment Name: At_100uM_NAA__P Parameter: Age (day) Value: 14
  misc_feature: MA Experiment 20000445 PARAMETER Experiment Name: At_100uM_NAA__P Parameter: Organism Value: A. thaliana
  misc_feature: MA Experiment 20000445 PARAMETER Experiment Name: At_100uM_NAA__P Parameter: Plant Line Value: WS
  misc_feature: MA Experiment 20000445 PARAMETER Experiment Name: At_100uM_NAA__P Parameter: Timepoint (hr) Value: 6
  misc_feature: MA Experiment 20000445 PARAMETER Experiment Name: At_100uM_NAA__P Parameter: Tissue Value: Aerial
  misc_feature: MA Experiment 20000445 PARAMETER Experiment Name: At_100uM_NAA__P Parameter: Treatment Value: 100uM NAA vs. No Treatment
  misc_feature: MA Experiment ID: 20000527 Result: Up-regulated in Transcription
  misc_feature: MA Experiment 20000527 PARAMETER Experiment Name: At_10percent_PEG_P Parameter: Age (day) Value: 20
  misc_feature: MA Experiment 20000527 PARAMETER Experiment Name: At_10percent_PEG_P Parameter: Organism Value: A. thaliana
  misc_feature: MA Experiment 20000527 PARAMETER Experiment Name: At_10percent_PEG_P Parameter: Plant Line Value: WS
  misc_feature: MA Experiment 20000527 PARAMETER Experiment Name: At_10percent_PEG_P Parameter: Timepoint (day) Value: 20
  misc_feature: MA Experiment 20000527 PARAMETER Experiment Name: At_10percent_PEG_P Parameter: Tissue Value: Whole Plant
  misc_feature: MA Experiment 20000527 PARAMETER Experiment Name: At_10percent_PEG_P Parameter: Treatment Value: 10percent PEG vs. No Treatment
  misc_feature: MA Experiment ID: 20000574 Result: Up-regulated in Transcription
  misc_feature: MA Experiment 20000574 PARAMETER Experiment Name: At_100uM_ABA_Mutants__P Parameter: Organism Value: A. thaliana
  misc_feature: MA Experiment 20000574 PARAMETER Experiment Name: At_100uM_ABA_Mutants__P Parameter: Plant Line Value: CS23 vs. Ler wt
  misc_feature: MA Experiment 20000574 PARAMETER Experiment Name: At_100uM_ABA_Mutants__P Parameter: Timepoint (hr) Value: N/A
  misc_feature: MA Experiment 20000574 PARAMETER Experiment Name: At_100uM_ABA_Mutants__P Parameter: Tissue Value: Whole Plant
  misc_feature: MA Experiment 20000574 PARAMETER Experiment Name: At_100uM_ABA_Mutants__P Parameter: Treatment Value: None
  misc_feature: MA Experiment ID: 20000576 Result: Up-regulated in Transcription
  misc_feature: MA Experiment 20000576 PARAMETER Experiment Name: At_100uM_ABA_Mutants__P Parameter: Organism Value: A. thaliana
  misc_feature: MA Experiment 20000576 PARAMETER Experiment Name: At_100uM_ABA_Mutants__P Parameter: Plant Line Value: CS23
  misc_feature: MA Experiment 20000576 PARAMETER Experiment Name: At_100uM_ABA_Mutants__P Parameter: Timepoint (hr) Value: 6
  misc_feature: MA Experiment 20000576 PARAMETER Experiment Name: At_100uM_ABA_Mutants__P Parameter: Tissue Value: Whole Plant
  misc_feature: MA Experiment 20000576 PARAMETER Experiment Name: At_100uM_ABA_Mutants__P Parameter: Treatment Value: 1uM ABA vs. No Treatment
  misc_feature: MA Experiment ID: 20000794 Result: Down-regulated in Transcription
  misc_feature: MA Experiment 20000794 PARAMETER Experiment Name: At_Petals_P Parameter: Age (day) Value: 23-25 days
  misc_feature: MA Experiment 20000794 PARAMETER Experiment Name: At_Petals_P Parameter: Plant Line Value: WS
  misc_feature: MA Experiment 20000794 PARAMETER Experiment Name: At_Petals_P Parameter: Tissue Value: Petals vs. Whole plant
  misc_feature: MA Experiment ID: 20001553 Result: Down-regulated in Transcription
  misc_feature: MA Experiment 20001553 PARAMETER Experiment Name: At_Drought_Soil_Dry_P Parameter: Age (day) Value: 19
  misc_feature: MA Experiment 20001553 PARAMETER Experiment Name: At_Drought_Soil_Dry_P Parameter: Organism Value: A. thaliana
  misc_feature: MA Experiment 20001553 PARAMETER Experiment Name: At_Drought_Soil_Dry_P Parameter: Plant Line Value: WS
  misc_feature: MA Experiment 20001553 PARAMETER Experiment Name: At_Drought_Soil_Dry_P Parameter: Post Timepoint (hr) Value: None
  misc_feature: MA Experiment 20001553 PARAMETER Experiment Name: At_Drought_Soil_Dry_P Parameter: Post-Treatment Value: None
  misc_feature: MA Experiment 20001553 PARAMETER Experiment Name: At_Drought_Soil_Dry_P Parameter: Timepoint (day) Value: 5
  misc_feature: MA Experiment 20001553 PARAMETER Experiment Name: At_Drought_Soil_Dry_P Parameter: Treatment Value: Drought vs. No Drought
  misc_feature: MA Experiment ID: 20001560 Result: Up-regulated in Transcription
  misc_feature: MA Experiment 20001560 PARAMETER Experiment Name: At_Drought_Soil_Dry_P Parameter: Age (day) Value: 28
  misc_feature: MA Experiment 20001560 PARAMETER Experiment Name: At_Drought_Soil_Dry_P Parameter: Organism Value: A. thaliana
  misc_feature: MA Experiment 20001560 PARAMETER Experiment Name: At_Drought_Soil_Dry_P Parameter: Plant Line Value: WS
  misc_feature: MA Experiment 20001560 PARAMETER Experiment Name: At_Drought_Soil_Dry_P Parameter: Post Timepoint (hr) Value: None
  misc_feature: MA Experiment 20001560 PARAMETER Experiment Name: At_Drought_Soil_Dry_P Parameter: Post-Treatment Value: None
  misc_feature: MA Experiment 20001560 PARAMETER Experiment Name: At_Drought_Soil_Dry_P Parameter: Timepoint (day) Value: 14
  misc_feature: MA Experiment 20001560 PARAMETER Experiment Name: At_Drought_Soil_Dry_P Parameter: Treatment Value: Drought vs. No Drought
  misc_feature: MA Experiment ID: 20001757 Result: Up-regulated in Transcription
  misc_feature: MA Experiment 20001757 PARAMETER Experiment Name: At_50mM_NH4NO3_L-to-H_P Parameter: Timepoint (hr) Value: 6
  misc_feature: MA Experiment 20001757 PARAMETER Experiment Name: At_50mM_NH4NO3_L-to-H_P Parameter: Tissue Value: Leaf
  misc_feature: MA Experiment 20001757 PARAMETER Experiment Name: At_50mM_NH4NO3_L-to-H_P Parameter: Treatment Value: 50mM NH4NO3 vs 100mM Mannitol
atttgtgcctactcatttcctccaaacgtcaaacatagcagcagccatggctgccaccaacacaatcctcgcattctcatctccttctcgtcttctcattcctccttcctccaatccttcaactctccgttcctctttccgcggcgtctctctcaacaacaacaatctccaccgtctccaatctgtttccttcgccgttaaagctccgtcgaaagcgttgacagttgtttccgcggcgaagaaggctgttgcagtgcttaaaggtacttctgatgtcgaaggagttgttactttgacccaagatgactcaggtcctacaactgtgaatgttcgtatcactggtctcactccagggcctcatggatttcatctccatgagtttggtgatacaactaatggatgtatctcaacaggaccacatttcaaccctaacaacatgacacacggagctccagaagatgagtgccgtcatgcgggtgacctgggaaacataaatgccaatgccgatggcgtggcagaaacaacaatagtggacaatcagattcctctgactggtcctaattctgttgttggaagagcctttgtggttcacgagcttaaggatgacctcggaaagggtggccatgagcttagtctgaccactggaaacgcaggcgggagattggcatgtggtgtgattggcttgacgccgctctaagtcagaggctaagcaagtactcttatgtctactgtgttgatcttgtctgtttgaacagatgtaagaatcttagcaaataatgtttggcttaataaactttgatgtttatgttcattgcatcaatttttctctttttgaatttgtgacagtgatgtgtttacttttgatacaactttgtgtttgatcgtttaagtacattttggtttatttagcatcctttttattcagttcaagattgtg

SEQ ID NO: 104554 - protein, 231 aa, Arabidopsis thaliana
  peptide (1)..(231): Ceres Seq. ID no. 13615267
  misc_feature (79)..(230): Pfam Name: Copper/zinc superoxide dismutase (SODC) Pfam Description: Copper/zinc superoxide dismutase (SODC)
  misc_feature (16)..(231): Homolog of NCBI NO: 18401659 NR Description: copper/zinc superoxide dismutase (CSD2)
  misc_feature (16)..(231): Homolog of NCBI NO: 11358868 NR Description: superoxide dismutase (EC 1.15.1.1) (Cu-Zn)
  misc_feature (16)..(231): Homolog of NCBI NO: 5689611 NR Description: copper/zinc superoxide dismutase [Arabidopsis
  misc_feature (16)..(229): Homolog of NCBI NO: 25285791 NR Description: probable copper/zinc superoxide dismutase
  misc_feature (18)..(231): Homolog of NCBI NO: 3914999 NR Description: Superoxide dismutase [Cu-Zn], chloroplast
  misc_feature (18)..(231): Homolog of NCBI NO: 134686 NR Description: Superoxide dismutase [Cu-Zn], chloroplast
  misc_feature (29)..(231): Homolog of NCBI NO: 20900 NR Description: Cu/Zn superoxide dismutase II [Pisum sativum]
  misc_feature (16)..(231): Homolog of NCBI NO: 134682 NR Description: Superoxide dismutase [Cu-Zn], chloroplast
  misc_feature (29)..(231): Homolog of NCBI NO: 134683 NR Description: Superoxide dismutase [Cu-Zn], chloroplast
  misc_feature (16)..(231): Homolog of NCBI NO: 33327349 NR Description: superoxidase dismutase [Lycopersicon esculentum]
FVPTHFLQTSNIAAAMAATNTILAFSSPSRLLIPPSSNPSTLRSSFRGVSLNNNNLHRLQSVSFAVKAPSKALTVVSAAKKAVAVLKGTSDVEGVVTLTQDDSGPTTVNVRITGLTPGPHGFHLHEFGDTTNGCISTGPHFNPNNMTHGAPEDECRHAGDLGNINANADGVAETTIVDNQIPLTGPNSVVGRAFVVHELKDDLGKGGHELSLTTGNAGGRLACGVIGLTPL

SEQ ID NO: 104555 - protein, 216 aa, Arabidopsis thaliana; identical to SEQ ID NO: 25091
  peptide (1)..(216): Ceres Seq. ID no. 13615268
  misc_feature (64)..(215): Pfam Name: Copper/zinc superoxide dismutase (SODC) Pfam Description: Copper/zinc superoxide dismutase (SODC)
  misc_feature (1)..(216): Homolog of NCBI NO: 18401659 NR Description: copper/zinc superoxide dismutase (CSD2)
  misc_feature (1)..(216): Homolog of NCBI NO: 11358868 NR Description: superoxide dismutase (EC 1.15.1.1) (Cu-Zn)
  misc_feature (1)..(216): Homolog of NCBI NO: 5689611 NR Description: copper/zinc superoxide dismutase [Arabidopsis
  misc_feature (1)..(214): Homolog of NCBI NO: 25285791 NR Description: probable copper/zinc superoxide dismutase
  misc_feature (3)..(216): Homolog of NCBI NO: 3914999 NR Description: Superoxide dismutase [Cu-Zn], chloroplast
  misc_feature (3)..(216): Homolog of NCBI NO: 134686 NR Description: Superoxide dismutase [Cu-Zn], chloroplast
  misc_feature (14)..(216): Homolog of NCBI NO: 20900 NR Description: Cu/Zn superoxide dismutase II [Pisum sativum]
  misc_feature (1)..(216): Homolog of NCBI NO: 134682 NR Description: Superoxide dismutase [Cu-Zn], chloroplast
  misc_feature (14)..(216): Homolog of NCBI NO: 134683 NR Description: Superoxide dismutase [Cu-Zn], chloroplast
  misc_feature (1)..(216): Homolog of NCBI NO: 33327349 NR Description: superoxidase dismutase [Lycopersicon esculentum]

SEQ ID NO: 104556 - DNA, 1528 bp, Arabidopsis thaliana
  misc_feature (1)..(1528): Ceres Seq. ID no. 13615273
  misc_feature: MA Experiment ID: 108577 Result: Down-regulated in Transcription
  misc_feature: MA Experiment 108577 PARAMETER Experiment Name: At_42deg_Heat_cDNA_P Parameter: Temperature (deg C) Value: 42 vs. 22
  misc_feature: MA Experiment 108577 PARAMETER Experiment Name: At_42deg_Heat_cDNA_P Parameter: Timepoint (hr) Value: 6
  misc_feature: MA Experiment 108577 PARAMETER Experiment Name: At_42deg_Heat_cDNA_P Parameter: Tissue Value: Aerial
  misc_feature: MA Experiment ID: 108595 Result: Down-regulated in Transcription
  misc_feature: MA Experiment 108595 PARAMETER Experiment Name: At_Ler-pi_Ovule_cDNA_P Parameter: Plant Line Value: null
  misc_feature: MA Experiment ID: 20000327 Result: Down-regulated in Transcription
  misc_feature: MA Experiment 20000327 PARAMETER Experiment Name: At_42deg_Heat_Sub_P Parameter: Age (day) Value: 14
  misc_feature: MA Experiment 20000327 PARAMETER Experiment Name: At_42deg_Heat_Sub_P Parameter: Organism Value: A. thaliana
  misc_feature: MA Experiment 20000327 PARAMETER Experiment Name: At_42deg_Heat_Sub_P Parameter: Plant Line Value: WS
  misc_feature: MA Experiment 20000327 PARAMETER Experiment Name: At_42deg_Heat_Sub_P Parameter: Temperature (deg C) Value: 42 vs. 22
  misc_feature: MA Experiment 20000327 PARAMETER Experiment Name: At_42deg_Heat_Sub_P Parameter: Timepoint (hr) Value: 1
  misc_feature: MA Experiment 20000327 PARAMETER Experiment Name: At_42deg_Heat_Sub_P Parameter: Tissue Value: Aerial
  misc_feature: MA Experiment ID: 20000328 Result: Down-regulated in Transcription
  misc_feature: MA Experiment 20000328 PARAMETER Experiment Name: At_42deg_Heat_Sub_P Parameter: Age (day) Value: 14
  misc_feature: MA Experiment 20000328 PARAMETER Experiment Name: At_42deg_Heat_Sub_P Parameter: Organism Value: A. thaliana
  misc_feature: MA Experiment 20000328 PARAMETER Experiment Name: At_42deg_Heat_Sub_P Parameter: Plant Line Value: WS
  misc_feature: MA Experiment 20000328 PARAMETER Experiment Name: At_42deg_Heat_Sub_P Parameter: Temperature (deg C) Value: 42 vs. 22
  misc_feature: MA Experiment 20000328 PARAMETER Experiment Name: At_42deg_Heat_Sub_P Parameter: Timepoint (hr) Value: 6
  misc_feature: MA Experiment 20000328 PARAMETER Experiment Name: At_42deg_Heat_Sub_P Parameter: Tissue Value: Aerial
aaataggcctctccaccaaatctctctctctttctctctgtcacactctttatcactctctgctctcacagatcggagaatctcctctgagagctctaatctctcagctttcttcaccggcgtctccggatctaataatcctgtaaggcctctactgcagaaaaaagattgaatttttacaatttggggtgactcaattttgttgactagagtgtttggagatatttctaactaaatgggaacaatgcaccgcagtggtgctcctcgaagaacgaatgaaaatgcaaaggttattattactactattttggggatagtgtttgggacttttattggtatcacattaccttcactttcgtttaagattaacttaccctcgcgccttatatcatctcttgatgtagccatatctggtgacaaatcccctgaagatttcggttcaagaaagtttcctgagatatatgttccaactaacccgcgtggtgcagaactactacctccaggaatcgttgtggcgaaaactgatttttacttgcgtagattatggggagaacctaatgaagatttgaagaagaagccaaaatatcttgtgacatttacagttggatttgagcagaggaaccatattaatggagttgttaagaagttttctgaagatttccaaattttgctcttccattatgatggccggacaactgaatgggaccaatttgagtggtcgaagagcgcgattcatattagtacaagaaagcaaacaaaatggtggtacgcgaagaggtttttgcatcctgatgttgtgtcagcttatgagtacatatttatatgggatgaagatcttggagtggagcatttcaatgcggataagtacattgagttagttaagaagcatggtttagagatttctcaaccaggcttagagcctaacaatggactcacatgggaaatgacaaagaggagaggtgaccgggaagtccataaagatacaaaagagaaaccaggatggtgtaaagacccacatttacctccatgtgccgcgtttgttgaaataatggcgcctgtattttctcgagaagcatggcgatgtgtgtggcatatgattcagaatgatctggttcatggatggggtctcgactttgcgcttagaagatgcgttgaacctgctcatgagaagattggtgttgtggattcgcaatggataatacataaagtgataccttcacttggaagtcaaggaaagtcagagaatgggaaagctccatggcaaggagtgagagatagatgcaaaatggaatggacaatgtttcagaaccgattggctgatgctgataaagagtatcttgggaagatggtgaaagattagatttgtttttcttttttctttctatataattaatatattaaaaaaacttttacttttgtatatcaaatattttacactaaattaggttttcataggacatgtgtgaagccctttttattgatattgtgtaagatttatacattttgattgagctttattatgttgttt

SEQ ID NO: 104557 - protein, 374 aa, Arabidopsis thaliana
  peptide (1)..(374): Ceres Seq. ID no. 13615274
  misc_feature (74)..(248): Pfam Name: Protein of unknown function (DUF707) Pfam Description: Protein of unknown function (DUF707)
  misc_feature (1)..(374): Homolog of NCBI NO: 30683843 NR Description: expressed protein [Arabidopsis thaliana]
  misc_feature (1)..(248): Homolog of NCBI NO: 20197601 NR Description: unknown protein [Arabidopsis thaliana]
  misc_feature (268)..(374): Homolog of NCBI NO: 20197601 NR Description: unknown protein [Arabidopsis thaliana]
  misc_feature (1)..(341): Homolog of NCBI NO: 20466346 NR Description: unknown protein [Arabidopsis thaliana]
  misc_feature (1)..(368): Homolog of NCBI NO: 18390845 NR Description: storage protein -related [Arabidopsis thaliana] putative storage protein [Arabidopsis thaliana]
  misc_feature (74)..(368): Homolog of NCBI NO: 25407018 NR Description: protein T6D22.12 [imported] - Arabidopsis >gi|8778842|gb|AAF79841.1|AC026875_21 T6D22.12 [Arabidopsis
  misc_feature (7)..(43): Homolog of NCBI NO: 25407018 NR Description: protein T6D22.12 [imported] - Arabidopsis >gi|8778842|gb|AAF79841.1|AC026875_21 T6D22.12 [Arabidopsis
  misc_feature (74)..(367): Homolog of NCBI NO: 18408876 NR Description: F12A21.2 [Arabidopsis thaliana] At1g67850/F12A21_2 [Arabidopsis thaliana]
  misc_feature (1)..(62): Homolog of NCBI NO: 18408876 NR Description: F12A21.2 [Arabidopsis thaliana] At1g67850/F12A21_2 [Arabidopsis thaliana]
  misc_feature (74)..(371): Homolog of NCBI NO: 14719314 NR Description: putative protein [Oryza sativa]
MGTMHRSGAPRRTNENAKVIITTILGIVFGTFIGITLPSLSFKINLPSRLISSLDVAISGDKSPEDFGSRKFPEIYVPTNPRGAELLPPGIVVAKTDFYLRRLWGEPNEDLKKKPKYLVTFTVGFEQRNHINGVVKKFSEDFQILLFHYDGRTTEWDQFEWSKSAIHISTRKQTKWWYAKRFLHPDVVSAYEYIFIWDEDLGVEHFNADKYIELVKKHGLEISQPGLEPNNGLTWEMTKRRGDREVHKDTKEKPGWCKDPHLPPCAAFVEIMAPVFSREAWRCVWHMIQNDLVHGWGLDFALRRCVEPAHEKIGVVDSQWIIHKVIPSLGSQGKSENGKAPWQGVRDRCKMEWTMFQNRLADADKEYLGKMVKD

SEQ ID NO: 104558 - protein, 371 aa, Arabidopsis thaliana
  peptide (1)..(371): Ceres Seq. ID no. 13615275
  misc_feature (71)..(245): Pfam Name: Protein of unknown function (DUF707) Pfam Description: Protein of unknown function (DUF707)
  misc_feature (1)..(371): Homolog of NCBI NO: 30683843 NR Description: expressed protein [Arabidopsis thaliana]
  misc_feature (1)..(245): Homolog of NCBI NO: 20197601 NR Description: unknown protein [Arabidopsis thaliana]
  misc_feature (265)..(371): Homolog of NCBI NO: 20197601 NR Description: unknown protein [Arabidopsis thaliana]
  misc_feature (1)..(338): Homolog of NCBI NO: 20466346 NR Description: unknown protein [Arabidopsis thaliana]
  misc_feature (1)..(365): Homolog of NCBI NO: 18390845 NR Description: storage protein -related [Arabidopsis thaliana] putative storage protein [Arabidopsis thaliana]
  misc_feature (71)..(365): Homolog of NCBI NO: 25407018 NR Description: protein T6D22.12 [imported] - Arabidopsis >gi|8778842|gb|AAF79841.1|AC026875_21 T6D22.12 [Arabidopsis
  misc_feature (4)..(40): Homolog of NCBI NO: 25407018 NR Description: protein T6D22.12 [imported] - Arabidopsis >gi|8778842|gb|AAF79841.1|AC026875_21 T6D22.12 [Arabidopsis
  misc_feature (71)..(364): Homolog of NCBI NO: 18408876 NR Description: F12A21.2 [Arabidopsis thaliana] At1g67850/F12A21_2 [Arabidopsis thaliana]
  misc_feature (1)..(59): Homolog of NCBI NO: 18408876 NR Description: F12A21.2 [Arabidopsis thaliana] At1g67850/F12A21_2 [Arabidopsis thaliana]
  misc_feature (71)..(368): Homolog of NCBI NO: 14719314 NR Description: putative protein [Oryza sativa]
MHRSGAPRRTNENAKVIITTILGIVFGTFIGITLPSLSFKINLPSRLISSLDVAISGDKSPEDFGSRKFPEIYVPTNPRGAELLPPGIVVAKTDFYLRRLWGEPNEDLKKKPKYLVTFTVGFEQRNHINGVVKKFSEDFQILLFHYDGRTTEWDQFEWSKSAIHISTRKQTKWWYAKRFLHPDVVSAYEYIFIWDEDLGVEHFNADKYIELVKKHGLEISQPGLEPNNGLTWEMTKRRGDREVHKDTKEKPGWCKDPHLPPCAAFVEIMAPVFSREAWRCVWHMIQNDLVHGWGLDFALRRCVEPAHEKIGVVDSQWIIHKVIPSLGSQGKSENGKAPWQGVRDRCKMEWTMFQNRLADADKEYLGKMVKD

SEQ ID NO: 104559 - DNA, 1096 bp, Arabidopsis thaliana
  misc_feature (1)..(1096): Ceres Seq. ID no. 13615282
  misc_feature: MA Experiment ID: 108573 Result: Up-regulated in Transcription
  misc_feature: MA Experiment 108573 PARAMETER Experiment Name: At_Drought_cDNA_P Parameter: Timepoint (hr) Value: 6
  misc_feature: MA Experiment 108573 PARAMETER Experiment Name: At_Drought_cDNA_P Parameter: Tissue Value: Aerial
  misc_feature: MA Experiment 108573 PARAMETER Experiment Name: At_Drought_cDNA_P Parameter: Treatment Value: Drought vs. No Drought
  misc_feature: MA Experiment ID: 108579 Result: Down-regulated in Transcription
  misc_feature: MA Experiment 108579 PARAMETER Experiment Name: At_4deg_Cold_cDNA_P Parameter: Temperature (deg C) Value: 4 vs. 22
  misc_feature: MA Experiment 108579 PARAMETER Experiment Name: At_4deg_Cold_cDNA_P Parameter: Timepoint (hr) Value: 6
  misc_feature: MA Experiment 108579 PARAMETER Experiment Name: At_4deg_Cold_cDNA_P Parameter: Tissue Value: Aerial
  misc_feature: MA Experiment ID: 108585 Result: Up-regulated in Transcription
  misc_feature: MA Experiment 108585 PARAMETER Experiment Name: At_5mM_NaNP_cDNA_P Parameter: Timepoint (hr) Value: 6
  misc_feature: MA Experiment 108585 PARAMETER Experiment Name: At_5mM_NaNP_cDNA_P Parameter: Tissue Value: Aerial
  misc_feature: MA Experiment 108585 PARAMETER Experiment Name: At_5mM_NaNP_cDNA_P Parameter: Treatment Value: null
  misc_feature: MA Experiment ID: 108595 Result: Down-regulated in Transcription
  misc_feature: MA Experiment 108595 PARAMETER Experiment Name: At_Ler-pi_Ovule_cDNA_P Parameter: Plant Line Value: null
  misc_feature: MA Experiment ID: 20000224 Result: Down-regulated in Transcription
  misc_feature: MA Experiment ID: 20000234 Result: Down-regulated in Transcription
  misc_feature: MA Experiment 20000234 PARAMETER Experiment Name: At_Siliques_P Parameter: Age (day) Value: 21
  misc_feature: MA Experiment 20000234 PARAMETER Experiment Name: At_Siliques_P Parameter: Organism Value: A. thaliana
  misc_feature: MA Experiment 20000234 PARAMETER Experiment Name: At_Siliques_P Parameter: Plant Line Value: WS
  misc_feature: MA Experiment 20000234 PARAMETER Experiment Name: At_Siliques_P Parameter: Tissue Value: Less Than 5mm Siliques vs. Whole Plant
  misc_feature: MA Experiment ID: 20000235 Result: Down-regulated in Transcription
  misc_feature: MA Experiment 20000235 PARAMETER Experiment Name: At_Siliques_P Parameter: Age (day) Value: 21
  misc_feature: MA Experiment 20000235 PARAMETER Experiment Name: At_Siliques_P Parameter: Organism Value: A. thaliana
  misc_feature: MA Experiment 20000235 PARAMETER Experiment Name: At_Siliques_P Parameter: Plant Line Value: WS
  misc_feature: MA Experiment 20000235 PARAMETER Experiment Name: At_Siliques_P Parameter: Tissue Value: 5-10mm Siliques vs. Whole Plant
  misc_feature: MA Experiment ID: 20000286 Result: Down-regulated in Transcription
  misc_feature: MA Experiment 20000286 PARAMETER Experiment Name: At_Open_Flower_P Parameter: Age (day) Value: 21
  misc_feature: MA Experiment 20000286 PARAMETER Experiment Name: At_Open_Flower_P Parameter: Plant Line Value: WS
  misc_feature: MA Experiment 20000286 PARAMETER Experiment Name: At_Open_Flower_P Parameter: Tissue Value: Half Open vs. Whole Plant
aagctatattcttccttttgatcaaaacacccacacctcttcttcttcttcgcataaaccttaaaaaccatttccacgatcttcttcttcttcttccctcaaatatagcttaggattttcttaatttcctctacccaagctccatggctgctttcaatttcttcctctcttcttaattctctcaggtaggggagatttgagtagtagtagattgttagatttgtaattcagctattggtgaagaggaagggagagagagatgtgttgaattggttgagtttggtggaggaaagaagaagaagaaatgaatgtgagccatgcatcggtacatccagtggaagatcctcctgcagctgcgacggaagtagagaatccgcctcgggtgaggatggatgatatggaaggaatgcctggaacattgcttggtcttgcattgcgtttttttcagttcttgtttgctgctgctgctctttgtgtcatggcttctactagtgattttccttccgttaccgccttctgctacctagttgcagctactggtctgcagagcttgtggagtcttgcactagccatggttgacgtctatgccattatggtcaaacgctctctacagaaccgtcgacttgtgagcttgtttgcaattggtgatggggtgacatcgacgctgacttttgcagcagcttgtgcatcggcaggcataacggttctaatagacaacgatctgaatagctgcgcacaaaaccactgtgttcagtttgaaacatcaacggcattagctttcataagctggttcgctgctttgccttcgtttctcttcaatttctggtctcttgcatcccgttgacacgatactgctcagcaagatgtgttttcatggtgtgtttttcggtgtatagtgactgatttttcttcttctttcttgttttgggtttggaaccaactttcttcaaacccaatacttggaaactgggaattgttttgtagacgacgaccttattcattttgttgtacaatgaaactatctggtcggctttgttgtatgattgaagaaatttcagatgttgaatgcattattatgatatgttgactgaattgc

SEQ ID NO: 104560 - protein, 179 aa, Arabidopsis thaliana; identical to SEQ ID NO: 29444
  peptide (1)..(179): Ceres Seq. ID no. 13615283
  misc_feature (34)..(164): Pfam Name: Domain of unknown function (DUF588) Pfam Description: Domain of unknown function (DUF588)
  misc_feature (1)..(179): Homolog of NCBI NO: 18401722 NR Description: expressed protein [Arabidopsis thaliana]
  misc_feature (1)..(178): Homolog of NCBI NO: 25408537 NR Description: hypothetical protein At2g37200 [imported] - thaliana >gi|4371281|gb|AAD18139.1| unknown protein [Arabidopsis
  misc_feature (1)..(178): Homolog of NCBI NO: 30687069 NR Description: expressed protein [Arabidopsis thaliana]
  misc_feature (35)..(162): Homolog of NCBI NO: 26006486 NR Description: Unknown protein [Oryza sativa (japonica
  misc_feature (29)..(178): Homolog of NCBI NO: 30686969 NR Description: expressed protein [Arabidopsis thaliana] ethylene responsive element binding protein, putative thaliana] >gi|30102860|gb|AAP21348.1| At3g23220 [Arabidopsis
  misc_feature (29)..(178): Homolog of NCBI NO: 18409932 NR Description: expressed protein [Arabidopsis thaliana] AT4g31460/F3L17_30 [Arabidopsis thaliana]
  misc_feature (64)..(178): Homolog of NCBI NO: 11357817 NR Description: hypothetical protein F5K20.150 - Arabidopsis >gi|7630005|emb|CAB88347.1| putative protein [Arabidopsis
  misc_feature (29)..(73): Homolog of NCBI NO: 11357817 NR Description: hypothetical protein F5K20.150 - Arabidopsis >gi|7630005|emb|CAB88347.1| putative protein [Arabidopsis
  misc_feature (29)..(176): Homolog of NCBI NO: 15241672 NR Description: hypothetical protein [Arabidopsis thaliana]
  misc_feature (29)..(178): Homolog of NCBI NO: 22330130 NR Description: hypothetical protein [Arabidopsis thaliana]

SEQ ID NO: 104561 - protein, 151 aa, Arabidopsis thaliana; identical to SEQ ID NO: 29445
  peptide (1)..(151): Ceres Seq. ID no. 13615284
  misc_feature (6)..(136): Pfam Name: Domain of unknown function (DUF588) Pfam Description: Domain of unknown function (DUF588)
  misc_feature (1)..(151): Homolog of NCBI NO: 18401722 NR Description: expressed protein [Arabidopsis thaliana]
  misc_feature (1)..(150): Homolog of NCBI NO: 25408537 NR Description: hypothetical protein At2g37200 [imported] - thaliana >gi|4371281|gb|AAD18139.1| unknown protein [Arabidopsis
  misc_feature (1)..(150): Homolog of NCBI NO: 30687069 NR Description: expressed protein [Arabidopsis thaliana]
  misc_feature (7)..(134): Homolog of NCBI NO: 26006486 NR Description: Unknown protein [Oryza sativa (japonica
  misc_feature (1)..(150): Homolog of NCBI NO: 30686969 NR Description: expressed protein [Arabidopsis thaliana] ethylene responsive element binding protein, putative thaliana] >gi|30102860|gb|AAP21348.1| At3g23220 [Arabidopsis
  misc_feature (1)..(150): Homolog of NCBI NO: 18409932 NR Description: expressed protein [Arabidopsis thaliana] AT4g31460/F3L17_30 [Arabidopsis thaliana]
  misc_feature (36)..(150): Homolog of NCBI NO: 11357817 NR Description: hypothetical protein F5K20.150 - Arabidopsis >gi|7630005|emb|CAB88347.1| putative protein [Arabidopsis
  misc_feature (1)..(45): Homolog of NCBI NO: 11357817 NR Description: hypothetical protein F5K20.150 - Arabidopsis >gi|7630005|emb|CAB88347.1| putative protein [Arabidopsis
  misc_feature (1)..(148): Homolog of NCBI NO: 15241672 NR Description: hypothetical protein [Arabidopsis thaliana]
  misc_feature (1)..(150): Homolog of NCBI NO: 22330130 NR Description: hypothetical protein [Arabidopsis thaliana]

SEQ ID NO: 104562 - protein, 148 aa, Arabidopsis thaliana; identical to SEQ ID NO: 29446
  peptide (1)..(148): Ceres Seq. ID no. 13615285
  misc_feature (3)..(133): Pfam Name: Domain of unknown function (DUF588) Pfam Description: Domain of unknown function (DUF588)
  misc_feature (1)..(148): Homolog of NCBI NO: 18401722 NR Description: expressed protein [Arabidopsis thaliana]
  misc_feature (1)..(147): Homolog of NCBI NO: 25408537 NR Description: hypothetical protein At2g37200 [imported] - thaliana >gi|4371281|gb|AAD18139.1| unknown protein [Arabidopsis
  misc_feature (1)..(147): Homolog of NCBI NO: 30687069 NR Description: expressed protein [Arabidopsis thaliana]
  misc_feature (4)..(131): Homolog of NCBI NO: 26006486 NR Description: Unknown protein [Oryza sativa (japonica
  misc_feature (1)..(147): Homolog of NCBI NO: 30686969 NR Description: expressed protein [Arabidopsis thaliana] ethylene responsive element binding protein, putative thaliana] >gi|30102860|gb|AAP21348.1| At3g23220 [Arabidopsis
  misc_feature (1)..(147): Homolog of NCBI NO: 18409932 NR Description: expressed protein [Arabidopsis thaliana] AT4g31460/F3L17_30 [Arabidopsis thaliana]
  misc_feature (33)..(147): Homolog of NCBI NO: 11357817 NR Description: hypothetical protein F5K20.150 - Arabidopsis >gi|7630005|emb|CAB88347.1| putative protein [Arabidopsis
  misc_feature (1)..(42): Homolog of NCBI NO: 11357817 NR Description: hypothetical protein F5K20.150 - Arabidopsis >gi|7630005|emb|CAB88347.1| putative protein [Arabidopsis
  misc_feature (1)..(145): Homolog of NCBI NO: 15241672 NR Description: hypothetical protein [Arabidopsis thaliana]
  misc_feature (1)..(147): Homolog of NCBI NO: 22330130 NR Description: hypothetical protein [Arabidopsis thaliana]

SEQ ID NO: 104563 - DNA, 869 bp, Arabidopsis thaliana
  misc_feature (1)..(869): Ceres Seq. ID no. 13615286
  misc_feature: MA Experiment ID: 20000171 Result: Up-regulated in Transcription
  misc_feature: MA Experiment 20000171 PARAMETER Experiment Name: At_42deg_Heat_P Parameter: Age (day) Value: 14
  misc_feature: MA Experiment 20000171 PARAMETER Experiment Name: At_42deg_Heat_P Parameter: Organism Value: A. thaliana
  misc_feature: MA Experiment 20000171 PARAMETER Experiment Name: At_42deg_Heat_P Parameter: Plant Line Value: WS
  misc_feature: MA Experiment 20000171 PARAMETER Experiment Name: At_42deg_Heat_P Parameter: Temperature (deg C) Value: 42 vs. 22
  misc_feature: MA Experiment 20000171 PARAMETER Experiment Name: At_42deg_Heat_P Parameter: Timepoint (hr) Value: 1
  misc_feature: MA Experiment 20000171 PARAMETER Experiment Name: At_42deg_Heat_P Parameter: Tissue Value: Aerial
  misc_feature: MA Experiment ID: 20000180 Result: Down-regulated in Transcription
  misc_feature: MA Experiment 20000180 PARAMETER Experiment Name: At_Germinating_Seeds_P Parameter: Age (hr) Value: 24 vs. 0
  misc_feature: MA Experiment 20000180 PARAMETER Experiment Name: At_Germinating_Seeds_P Parameter: Tissue Value: Germinating Seeds
  misc_feature: MA Experiment ID: 20001906 Result: Up-regulated in Transcription
  misc_feature: MA Experiment 20001906 PARAMETER Experiment Name: At_Drought_Reproduction_P Parameter: Age (day) Value: 35
  misc_feature: MA Experiment 20001906 PARAMETER Experiment Name: At_Drought_Reproduction_P Parameter: Organism Value: A. thaliana
  misc_feature: MA Experiment 20001906 PARAMETER Experiment Name: At_Drought_Reproduction_P Parameter: Plant Line Value: WS
  misc_feature: MA Experiment 20001906 PARAMETER Experiment Name: At_Drought_Reproduction_P Parameter: Timepoint (day) Value: 5
  misc_feature: MA Experiment 20001906 PARAMETER Experiment Name: At_Drought_Reproduction_P Parameter: Tissue Value: Siliques
  misc_feature: MA Experiment 20001906 PARAMETER Experiment Name: At_Drought_Reproduction_P Parameter: Treatment Value: Drought vs. No Drought
aagctttgtctcgtcggaatctgatggaggagaagaagaagaaaggcgatgatgaattgaactcgaaaccgccgttaatggcgttgaaccatgtgtcaaggctttgtaaagacgtcaaaaagtctctcgagttctacacaaaggtattagggttcgtggagatagagcgtccagcttctttcgacttcgacggtgcgtggcttttcaactacggcgttgggatccacttggtgcaggccaaggaccaagataagttaccttctgacacggaccatttggacccaatggataaccacatctctttccagtgtgaagatatggaagctttggagaagaggctcaaggaggtgaaggtaaagtacatcaagaggacggtgggtgatgagaaagatgcagctatcgaccagctcttcttcaatgaccctgacggctttatggttgaaatctgtaactgcgagaatctcgaacttgtcccgtgccattcagccgacgccatacgcctcccagaagaccgacatgcacctcctgttgccctccctgactcctccaaccgtaggatgccccagcccaattcttaatactatttagactcgtttcgtctctagttagtactgtgttgtgctcagctcccactctattagttaatgtttgtttgggacaccaagtccttccaaccatgagtgctagtaggctggccattttggtttttgtttagattcggtttggttcagttttaataaatctctggctgaactctaaccgaagttatttcgcttttggtttggttttactttggttcggtttccatttggttaggtttgttttagtttgttccaaaaaaaccgtgaacaaaaattctgatgtttttt

SEQ ID NO: 104564 - protein, 191 aa, Arabidopsis thaliana
  peptide (1)..(191): Ceres Seq. ID no. 13615287
  misc_feature (8)..(191): Homolog of NCBI NO: 18401734 NR Description: glyoxalase family protein (lactoylglutathione family protein) [Arabidopsis thaliana] >gi|25407983|pir||F84684
  misc_feature (8)..(191): Homolog of NCBI NO: 15529260 NR Description: At2g28420/T1B3.6 [Arabidopsis thaliana]
  misc_feature (24)..(183): Homolog of NCBI NO: 34395261 NR Description: glyoxalase family-like protein [Oryza sativa
  misc_feature (24)..(183): Homolog of NCBI NO: 34899038 NR Description: hypothetical protein~similar to Arabidopsis
  misc_feature (24)..(175): Homolog of NCBI NO: 34910246 NR Description: OSJNBa0089K24.9 [Oryza sativa (japonica
  misc_feature (11)..(158): Homolog of NCBI NO: 25406639 NR Description: hypothetical protein F18B13.24 [imported] - thaliana >gi|5902371|gb|AAD55473.1|AC009322_13 Hypothetical
  misc_feature (17)..(158): Homolog of NCBI NO: 18412683 NR Description: glyoxalase family protein (lactoylglutathione family protein) [Arabidopsis thaliana]
  misc_feature (25)..(158): Homolog of NCBI NO: 18394235 NR Description: glyoxalase family protein (lactoylglutathione
  misc_feature (16)..(169): Homolog of NCBI NO: 21740426 NR Description: OSJNBa0091D06.24 [Oryza sativa (japonica
  misc_feature (25)..(150): Homolog of NCBI NO: 18402873 NR Description: glyoxalase family protein (lactoylglutathione family protein) [Arabidopsis thaliana] At2g32090/F22D22.16 [Arabidopsis thaliana]
ALSRRNLMEEKKKKGDDELNSKPPLMALNHVSRLCKDVKKSLEFYTKVLGFVEIERPASFDFDGAWLFNYGVGIHLVQAKDQDKLPSDTDHLDPMDNHISFQCEDMEALEKRLKEVKVKYIKRTVGDEKDAAIDQLFFNDPDGFMVEICNCENLELVPCHSADAIRLPEDRHAPPVALPDSSNRRMPQPNS

SEQ ID NO: 104565 - protein, 184 aa, Arabidopsis thaliana
  peptide (1)..(184): Ceres Seq. ID no. 13615288
  misc_feature (1)..(184): Homolog of NCBI NO: 18401734 NR Description: glyoxalase family protein (lactoylglutathione family protein) [Arabidopsis thaliana] >gi|25407983|pir||F84684
  misc_feature (1)..(184): Homolog of NCBI NO: 15529260 NR Description: At2g28420/T1B3.6 [Arabidopsis thaliana]
  misc_feature (17)..(176): Homolog of NCBI NO: 34395261 NR Description: glyoxalase family-like protein [Oryza sativa
  misc_feature (17)..(176): Homolog of NCBI NO: 34899038 NR Description: hypothetical protein~similar to Arabidopsis
  misc_feature (17)..(168): Homolog of NCBI NO: 34910246 NR Description: OSJNBa0089K24.9 [Oryza sativa (japonica
  misc_feature (4)..(151): Homolog of NCBI NO: 25406639 NR Description: hypothetical protein F18B13.24 [imported] - thaliana >gi|5902371|gb|AAD55473.1|AC009322_13 Hypothetical
  misc_feature (10)..(151): Homolog of NCBI NO: 18412683 NR Description: glyoxalase family protein (lactoylglutathione family protein) [Arabidopsis thaliana]
  misc_feature (18)..(151): Homolog of NCBI NO: 18394235 NR Description: glyoxalase family protein (lactoylglutathione
  misc_feature (9)..(162): Homolog of NCBI NO: 21740426 NR Description: OSJNBa0091D06.24 [Oryza sativa (japonica
  misc_feature (18)..(143): Homolog of NCBI NO: 18402873 NR Description: glyoxalase family protein (lactoylglutathione family protein) [Arabidopsis thaliana] At2g32090/F22D22.16 [Arabidopsis thaliana]
MEEKKKKGDDELNSKPPLMALNHVSRLCKDVKKSLEFYTKVLGFVEIERPASFDFDGAWLFNYGVGIHLVQAKDQDKLPSDTDHLDPMDNHISFQCEDMEALEKRLKEVKVKYIKRTVGDEKDAAIDQLFFNDPDGFMVEICNCENLELVPCHSADAIRLPEDRHAPPVALPDSSNRRMPQPNS

SEQ ID NO: 104566 - protein, 166 aa, Arabidopsis thaliana
  peptide (1)..(166): Ceres Seq. ID no. 13615289
  misc_feature (1)..(166): Homolog of NCBI NO: 18401734 NR Description: glyoxalase family protein (lactoylglutathione family protein) [Arabidopsis thaliana] >gi|25407983|pir||F84684
  misc_feature (1)..(166): Homolog of NCBI NO: 15529260 NR Description: At2g28420/T1B3.6 [Arabidopsis thaliana]
  misc_feature (1)..(158): Homolog of NCBI NO: 34395261 NR Description: glyoxalase family-like protein [Oryza sativa
  misc_feature (1)..(158): Homolog of NCBI NO: 34899038 NR Description: hypothetical protein~similar to Arabidopsis
  misc_feature (1)..(150): Homolog of NCBI NO: 34910246 NR Description: OSJNBa0089K24.9 [Oryza sativa (japonica
  misc_feature (1)..(133): Homolog of NCBI NO: 25406639 NR Description: hypothetical protein F18B13.24 [imported] - thaliana >gi|5902371|gb|AAD55473.1|AC009322_13 Hypothetical
  misc_feature (1)..(133): Homolog of NCBI NO: 18412683 NR Description: glyoxalase family protein (lactoylglutathione family protein) [Arabidopsis thaliana]
  misc_feature (1)..(133): Homolog of NCBI NO: 18394235 NR Description: glyoxalase family protein (lactoylglutathione
  misc_feature (1)..(144): Homolog of NCBI NO: 21740426 NR Description: OSJNBa0091D06.24 [Oryza sativa (japonica
  misc_feature (1)..(125): Homolog of NCBI NO: 18402873 NR Description: glyoxalase family protein (lactoylglutathione family protein) [Arabidopsis thaliana] At2g32090/F22D22.16 [Arabidopsis thaliana]
MALNHVSRLCKDVKKSLEFYTKVLGFVEIERPASFDFDGAWLFNYGVGIHLVQAKDQDKLPSDTDHLDPMDNHISFQCEDMEALEKRLKEVKVKYIKRTVGDEKDAAIDQLFFNDPDGFMVEICNCENLELVPCHSADAIRLPEDRHAPPVALPDSSNRRMPQPNS

SEQ ID NO: 104567 - DNA, 1553 bp, Arabidopsis thaliana
  misc_feature (1)..(1553): Ceres Seq. ID no. 13615297
  misc_feature: MA Experiment ID: 108434 Result: Down-regulated in Transcription
  misc_feature: MA Experiment 108434 PARAMETER Experiment Name: At_Root_Tips_cDNA_P Parameter: Tissue Value: Root Tips
  misc_feature: MA Experiment ID: 108595 Result: Up-regulated in Transcription
  misc_feature: MA Experiment 108595 PARAMETER Experiment Name: At_Ler-pi_Ovule_cDNA_P Parameter: Plant Line Value: null
  misc_feature: MA Experiment ID: 20000113 Result: Down-regulated in Transcription
  misc_feature: MA Experiment 20000113 PARAMETER Experiment Name: At_42deg_Heat_cDNA_P Parameter: Temperature (deg C) Value: 42 vs. 22
  misc_feature: MA Experiment 20000113 PARAMETER Experiment Name: At_42deg_Heat_cDNA_P Parameter: Timepoint (hr) Value: 8
  misc_feature: MA Experiment 20000113 PARAMETER Experiment Name: At_42deg_Heat_cDNA_P Parameter: Tissue Value: Aerial
  misc_feature: MA Experiment ID: 20000173 Result: Down-regulated in Transcription
  misc_feature: MA Experiment 20000173 PARAMETER Experiment Name: At_42deg_Heat_P Parameter: Age (day) Value: 14
  misc_feature: MA Experiment 20000173 PARAMETER Experiment Name: At_42deg_Heat_P Parameter: Organism Value: A. thaliana
  misc_feature: MA Experiment 20000173 PARAMETER Experiment Name: At_42deg_Heat_P Parameter: Plant Line Value: WS
  misc_feature: MA Experiment 20000173 PARAMETER Experiment Name: At_42deg_Heat_P Parameter: Temperature (deg C) Value: 42 vs. 22
  misc_feature: MA Experiment 20000173 PARAMETER Experiment Name: At_42deg_Heat_P Parameter: Timepoint (hr) Value: 6
  misc_feature: MA Experiment 20000173 PARAMETER Experiment Name: At_42deg_Heat_P Parameter: Tissue Value: Aerial
  misc_feature: MA Experiment ID: 20000184 Result: Down-regulated in Transcription
  misc_feature: MA Experiment 20000184 PARAMETER Experiment Name: At_Shoots__P Parameter: Age (day) Value: 7
  misc_feature: MA Experiment 20000184 PARAMETER Experiment Name: At_Shoots__P Parameter: Tissue Value: Shoots vs. Whole Plant
  misc_feature: MA Experiment ID: 20000438 Result: Down-regulated in Transcription
  misc_feature: MA Experiment 20000438 PARAMETER Experiment Name: At_Shoots__P Parameter: Age (day) Value: 14
  misc_feature: MA Experiment 20000438 PARAMETER Experiment Name: At_Shoots__P Parameter: Tissue Value: Shoots vs. Whole Plant
atgtagatttgactttgtttcaaagcggaggaagaaggagaaggcaacactaaaagatcaaaaccttagatctttgcttacgctttcgcctggttaggaacggtttttcagaaacaaaagattccatttttagattcaattcccttctggtttgaaaaatgatatcaaaatggtgaatagaagtgatttggtggtgattggcatctcggttgggcttgcacttggtctcttgctcgctctgcttttgttcttcgccataaaatggtactatggccgctctcacctcaggcgatgcgctaatgaacagaattccccgactctacctgttcacactgctaaaagaggtgtagtaatccctgatgatagagcaaacacagaatcgtcacagccacctgagaatggagcaccaactcaacatcagccatggtggaacaaccacaccaaagatctcactgtatctgcatccggcatacctagatataactacaaggatattcagaaagcaacacaaaatttcacaaccgttctaggacaaggatcttttggtcctgtctacaaagcggttatgcccaatggagaattagctgcagcgaaagttcatggctctaattcaagtcaaggagacagagagtttcaaaccgaggtatctttacttgggagactgcatcaccggaatcttgtgaacttgacaggatactgtgtcgataaaagtcaccggatgttgatctatgagttcatgagtaatggaagtttggagaatcttttgtatggcggaatgcaagtcttgaattgggaagagcggcttcaaatcgctcttgacatctcccacggcattgaataccttcacgaaggggccgtaccgccagttattcaccgtgatcttaagtcagcaaacattttgttagatcattccatgagagctaaggtcgcggatttcgggttgtcgaaagagatggttttagatagaatgacttccggattgaagggtactcacggctacatggatccaacatacatttcgactaacaaatacacgatgaagagcgacatttacagtttcggtgtcatcattcttgagctcattactgcaatccatccccaacagaatctgatggaatacatcaacctggcttcgatgagtccagatggtatcgacgaaatactcgatcagaaactagtgggaaacgcaagcattgaagaagtgaggttactggcgaagattgcaaacaggtgtgtgcataagacaccaagaaaaagaccatctattggagaagtaacacagttcatactaaagatcaaacaaagtcggtctcgaggaagaagacaggacacgatgtcttcatcgtttggtgttggttatgaggaagatctgtcaagggttatgagcaggattaaggatcagcatgttgagttagggttattggctggtgttaaggaagagaatcatcaagagaggaacattgcaacaacatagtaactctttactttaggagtaagtctttttgtacatattaccacatgagtctcaaaagtaagatttctccctcttctgc

SEQ ID NO: 104568 - protein, 434 aa, Arabidopsis thaliana; identical to SEQ ID NO: 35951
  peptide (1)..(434): Ceres Seq. ID no. 13615298
  misc_feature (114)..(373): Pfam Name: Protein kinase domain Pfam Description: Protein kinase domain
  misc_feature (1)..(434): Homolog of NCBI NO: 18417765 NR Description: serine/threonine protein kinase, putative
  misc_feature (1)..(434): Homolog of NCBI NO: 11358843 NR Description: serine/threonine-specific protein kinase-like
  misc_feature (1)..(423): Homolog of NCBI NO: 1076634 NR Description: serine/threonine-specific protein kinase NPK15
  misc_feature (1)..(382): Homolog of NCBI NO: 38636770 NR Description: putative serine/threonine-specific protein kinase
  misc_feature (1)..(392): Homolog of NCBI NO: 30696480 NR Description: protein kinase family [Arabidopsis thaliana]
  misc_feature (72)..(399): Homolog of NCBI NO: 38345516 NR Description: OSJNBa0039K24.19 [Oryza sativa (japonica
  misc_feature (63)..(396): Homolog of NCBI NO: 15227790 NR Description: protein kinase family [Arabidopsis thaliana]
  misc_feature (79)..(413): Homolog of NCBI NO: 8978273 NR Description: receptor protein kinase-like [Arabidopsis
  misc_feature (87)..(401): Homolog of NCBI NO: 30699436 NR Description: leucine-rich repeat transmembrane protein kinase, [Arabidopsis thaliana] >gi|26450791|dbj|BAC42504.1| unknown
  misc_feature (87)..(401): Homolog of NCBI NO: 7715608 NR Description: F20B17.5 [Arabidopsis thaliana]

SEQ ID NO: 104569 - protein, 302 aa, Arabidopsis thaliana; identical to SEQ ID NO: 35952
  peptide (1)..(302): Ceres Seq. ID no. 13615299
  misc_feature (1)..(241): Pfam Name: Protein kinase domain Pfam Description: Protein kinase domain
  misc_feature (1)..(302): Homolog of NCBI NO: 18417765 NR Description: serine/threonine protein kinase, putative
  misc_feature (1)..(302): Homolog of NCBI NO: 11358843 NR Description: serine/threonine-specific protein kinase-like
  misc_feature (1)..(291): Homolog of NCBI NO: 1076634 NR Description: serine/threonine-specific protein kinase NPK15
  misc_feature (1)..(250): Homolog of NCBI NO: 38636770 NR Description: putative serine/threonine-specific protein kinase
  misc_feature (1)..(260): Homolog of NCBI NO: 30696480 NR Description: protein kinase family [Arabidopsis thaliana]
  misc_feature (1)..(267): Homolog of NCBI NO: 38345516 NR Description: OSJNBa0039K24.19 [Oryza sativa (japonica
  misc_feature (1)..(264): Homolog of NCBI NO: 15227790 NR Description: protein kinase family [Arabidopsis thaliana]
  misc_feature (1)..(281): Homolog of NCBI NO: 8978273 NR Description: receptor protein kinase-like [Arabidopsis
  misc_feature (1)..(269): Homolog of NCBI NO: 30699436 NR Description: leucine-rich repeat transmembrane protein kinase, [Arabidopsis thaliana] >gi|26450791|dbj|BAC42504.1| unknown
  misc_feature (1)..(269): Homolog of NCBI NO: 7715608 NR Description: F20B17.5 [Arabidopsis thaliana]

SEQ ID NO: 104570 - protein, 251 aa, Arabidopsis thaliana; identical to SEQ ID NO: 35953
  peptide (1)..(251): Ceres Seq. ID no. 13615300
  misc_feature (1)..(190): Pfam Name: Protein kinase domain Pfam Description: Protein kinase domain
  misc_feature (1)..(251): Homolog of NCBI NO: 18417765 NR Description: serine/threonine protein kinase, putative
  misc_feature (1)..(251): Homolog of NCBI NO: 11358843 NR Description: serine/threonine-specific protein kinase-like
  misc_feature (1)..(240): Homolog of NCBI NO: 1076634 NR Description: serine/threonine-specific protein kinase NPK15
  misc_feature (1)..(199): Homolog of NCBI NO: 38636770 NR Description: putative serine/threonine-specific protein kinase
  misc_feature (1)..(209): Homolog of NCBI NO: 30696480 NR Description: protein kinase family [Arabidopsis thaliana]
  misc_feature (1)..(216): Homolog of NCBI NO: 38345516 NR Description: OSJNBa0039K24.19 [Oryza sativa (japonica
  misc_feature (1)..(213): Homolog of NCBI NO: 15227790 NR Description: protein kinase family [Arabidopsis thaliana]
  misc_feature (1)..(230): Homolog of NCBI NO: 8978273 NR Description: receptor protein kinase-like [Arabidopsis
  misc_feature (1)..(218): Homolog of NCBI NO: 30699436 NR Description: leucine-rich repeat transmembrane protein kinase, [Arabidopsis thaliana] >gi|26450791|dbj|BAC42504.1| unknown
  misc_feature (1)..(218): Homolog of NCBI NO: 7715608 NR Description: F20B17.5 [Arabidopsis thaliana]

SEQ ID NO: 104571 - DNA, 805 bp, Arabidopsis thaliana
  misc_feature (1)..(805): Ceres Seq. ID no. 13615301
  misc_feature: MA Experiment ID: 108434 Result: Up-regulated in Transcription
  misc_feature: MA Experiment 108434 PARAMETER Experiment Name: At_Root_Tips_cDNA_P Parameter: Tissue Value: Root Tips
  misc_feature: MA Experiment ID: 108435 Result: Up-regulated in Transcription
  misc_feature: MA Experiment 108435 PARAMETER Experiment Name: At_stm_Mutants_cDNA_P Parameter: Plant Line Value: wt Landsburg vs stm
  misc_feature: MA Experiment 108435 PARAMETER Experiment Name: At_stm_Mutants_cDNA_P Parameter: Tissue Value: Shoot Apical Meristem Region
  misc_feature: MA Experiment ID: 108461 Result: Down-regulated in Transcription
  misc_feature: MA Experiment 108461 PARAMETER Experiment Name: At_Germinating_Seeds_cDNA_P Parameter: Age (day) Value: 1 vs. 0
  misc_feature: MA Experiment 108461 PARAMETER Experiment Name: At_Germinating_Seeds_cDNA_P Parameter: Tissue Value: Germinating Seeds
  misc_feature: MA Experiment ID: 108462 Result: Down-regulated in Transcription
  misc_feature: MA Experiment 108462 PARAMETER Experiment Name: At_Germinating_Seeds_cDNA_P Parameter: Age (day) Value: 2 vs. 0
  misc_feature: MA Experiment 108462 PARAMETER Experiment Name: At_Germinating_Seeds_cDNA_P Parameter: Tissue Value: Germinating Seeds
  misc_feature: MA Experiment ID: 108463 Result: Down-regulated in Transcription
  misc_feature: MA Experiment 108463 PARAMETER Experiment Name: At_Germinating_Seeds_cDNA_P Parameter: Age (day) Value: 3 vs. 0
  misc_feature: MA Experiment 108463 PARAMETER Experiment Name: At_Germinating_Seeds_cDNA_P Parameter: Tissue Value: Germinating Seeds
  misc_feature: MA Experiment ID: 108464 Result: Down-regulated in Transcription
  misc_feature: MA Experiment 108464 PARAMETER Experiment Name: At_Germinating_Seeds_cDNA_P Parameter: Age (day) Value: 4 vs. 0
  misc_feature: MA Experiment 108464 PARAMETER Experiment Name: At_Germinating_Seeds_cDNA_P Parameter: Tissue Value: Germinating Seeds
  misc_feature: MA Experiment ID: 20000179 Result: Down-regulated in Transcription
  misc_feature: MA Experiment 20000179 PARAMETER Experiment Name: At_Germinating_Seeds_P Parameter: Age (hr) Value: 6 vs. 0
  misc_feature: MA Experiment 20000179 PARAMETER Experiment Name: At_Germinating_Seeds_P Parameter: Tissue Value: Germinating Seeds
  misc_feature: MA Experiment ID: 20000180 Result: Down-regulated in Transcription
  misc_feature: MA Experiment 20000180 PARAMETER Experiment Name: At_Germinating_Seeds_P Parameter: Age (hr) Value: 24 vs. 0
  misc_feature: MA Experiment 20000180 PARAMETER Experiment Name: At_Germinating_Seeds_P Parameter: Tissue Value: Germinating Seeds
  misc_feature: MA Experiment ID: 20001557 Result: Up-regulated in Transcription
  misc_feature: MA Experiment 20001557 PARAMETER Experiment Name: At_Drought_Soil_Dry_P Parameter: Age (day) Value: 27
  misc_feature: MA Experiment 20001557 PARAMETER Experiment Name: At_Drought_Soil_Dry_P Parameter: Organism Value: A. thaliana
  misc_feature: MA Experiment 20001557 PARAMETER Experiment Name: At_Drought_Soil_Dry_P Parameter: Plant Line Value: WS
  misc_feature: MA Experiment 20001557 PARAMETER Experiment Name: At_Drought_Soil_Dry_P Parameter: Post Timepoint (hr) Value: 3
  misc_feature: MA Experiment 20001557 PARAMETER Experiment Name: At_Drought_Soil_Dry_P Parameter: Post-Treatment Value: Re-Water vs. No Drought
  misc_feature: MA Experiment 20001557 PARAMETER Experiment Name: At_Drought_Soil_Dry_P Parameter: Timepoint (day) Value: 13
  misc_feature: MA Experiment 20001557 PARAMETER Experiment Name: At_Drought_Soil_Dry_P Parameter: Treatment Value: Drought vs. No Drought
  misc_feature: MA Experiment ID: 20001558 Result: Up-regulated in Transcription
  misc_feature: MA Experiment 20001558 PARAMETER Experiment Name: At_Drought_Soil_Dry_P Parameter: Age (day) Value: 27
  misc_feature: MA Experiment 20001558 PARAMETER Experiment Name: At_Drought_Soil_Dry_P Parameter: Organism Value: A. thaliana
  misc_feature: MA Experiment 20001558 PARAMETER Experiment Name: At_Drought_Soil_Dry_P Parameter: Plant Line Value: WS
  misc_feature: MA Experiment 20001558 PARAMETER Experiment Name: At_Drought_Soil_Dry_P Parameter: Post Timepoint (hr) Value: 6
  misc_feature: MA Experiment 20001558 PARAMETER Experiment Name: At_Drought_Soil_Dry_P Parameter: Post-Treatment Value: Re-Water vs. No Drought
  misc_feature: MA Experiment 20001558 PARAMETER Experiment Name: At_Drought_Soil_Dry_P Parameter: Timepoint (day) Value: 13
  misc_feature: MA Experiment 20001558 PARAMETER Experiment Name: At_Drought_Soil_Dry_P Parameter: Treatment Value: Drought vs. No Drought
agcattttctttcagctcaaacccaagaacctcatcgccgattatttcttcatccttactctatcccgcgccgattaatctctctcagtaccgtccgagatgagaaagctcaagtatcacgagaagaagcttataaagaaagtaaatttcttagaatggaaaagagaaggtaaccatcgggaaaacgagattacgtatcgataccacatgggctctcgtgatgattacaaaaagtattcaggattgtgtaggatggtgcagaaactgacgaatataatgaaacaaatggatccagcagatccttttcgtattcagatgactgatatgcttttggagaagctatataacatgggtgttataccgactaggaaaagcttgactctaactgagcggttatcagtttcatccttctgtaggcgtaggctatctactgtgctggttcacctgaagtttgcagagcaccacaaagaagctgtgacatacatagagcaaggacacgttcgtgtaggaccagaaacaattactgatccagctttcttagtaactcggaacatggaagatttcatcacttgggttgattcatccaagattaaacgaaaggttcttgagtacaatgacacattggatgattatgacatgcttgcttagctttgaggaagttaaaaaagactgatgttttgtaaaagccaaaaaaggttcactgctactactattgcagggtttgtttggatttttgaatatgcaaatgtgctactattcccttgtctttaatcttactttcgatctatttgcaagaagaaacttg

SEQ ID NO: 104572 - protein, 182 aa, Arabidopsis thaliana
  peptide (1)..(182): Ceres Seq. ID no. 13615302
  misc_feature (1)..(106): Pfam Name: Ribosomal protein S4/S9 N-terminal domain Pfam Description: Ribosomal protein S4/S9 N-terminal domain
  misc_feature (1)..(182): Homolog of NCBI NO: 18417773 NR Description: ribosomal protein S4/S9 related [Arabidopsis
  misc_feature (1)..(182): Homolog of NCBI NO: 21554411 NR Description: ribosomal protein-like [Arabidopsis thaliana]
  misc_feature (1)..(182): Homolog of NCBI NO: 11358773 NR Description: ribosomal protein-like - Arabidopsis thaliana
  misc_feature (1)..(182): Homolog of NCBI NO: 38346067 NR Description: OSJNBa0084K01.7 [Oryza sativa (japonica
  misc_feature (1)..(180): Homolog of NCBI NO: 19527196 NR Description: RIKEN cDNA 1190002L16 [Mus musculus]
  misc_feature (1)..(180): Homolog of NCBI NO: 34864645 NR Description: similar to RIKEN cDNA 1190002L16 [Rattus
  misc_feature (1)..(182): Homolog of NCBI NO: 8922794 NR Description: chromosome 15 open reading frame 12; ribosomal protein S4 [Homo sapiens] >gi|7023341|dbj|BAA91929.1| protein product [Homo sapiens] >gi|12053321|emb|CAB66847.1|
  misc_feature (1)..(179): Homolog of NCBI NO: 6321942 NR Description: part of small (ribosomal) subunit (SSU) (contains U3 snoRNA); Interacts With Mpp10; Imp3p is a specific
  misc_feature (1)..(181): Homolog of NCBI NO: 19115815 NR Description: putative component of U3 snoRNP, required for rRNA processing [Schizosaccharomyces pombe]
  misc_feature (1)..(168): Homolog of NCBI NO: 29124591 NR Description: Similar to chromosome 15 open reading frame 12
MRKLKYHEKKLIKKVNFLEWKREGNHRENEITYRYHMGSRDDYKKYSGLCRMVQKLTNIMKQMDPADPFRIQMTDMLLEKLYNMGVIPTRKSLTLTERLSVSSFCRRRLSTVLVHLKFAEHHKEAVTYIEQGHVRVGPETITDPAFLVTRNMEDFITWVDSSKIKRKVLEYNDTLDDYDMLA

SEQ ID NO: 104573 - protein, 146 aa, Arabidopsis thaliana
  peptide (1)..(146): Ceres Seq. ID no. 13615303
  misc_feature (1)..(70): Pfam Name: Ribosomal protein S4/S9 N-terminal domain Pfam Description: Ribosomal protein S4/S9 N-terminal domain
  misc_feature (1)..(146): Homolog of NCBI NO: 18417773 NR Description: ribosomal protein S4/S9 related [Arabidopsis
  misc_feature (1)..(146): Homolog of NCBI NO: 21554411 NR Description: ribosomal protein-like [Arabidopsis thaliana]
  misc_feature (1)..(146): Homolog of NCBI NO: 11358773 NR Description: ribosomal protein-like - Arabidopsis thaliana
  misc_feature (1)..(146): Homolog of NCBI NO: 38346067 NR Description: OSJNBa0084K01.7 [Oryza sativa (japonica
  misc_feature (1)..(144): Homolog of NCBI NO: 19527196 NR Description: RIKEN cDNA 1190002L16 [Mus musculus]
  misc_feature (1)..(144): Homolog of NCBI NO: 34864645 NR Description: similar to RIKEN cDNA 1190002L16 [Rattus
  misc_feature (1)..(146): Homolog of NCBI NO: 8922794 NR Description: chromosome 15 open reading frame 12; ribosomal protein S4 [Homo sapiens] >gi|7023341|dbj|BAA91929.1| protein product [Homo sapiens] >gi|12053321|emb|CAB66847.1|
  misc_feature (1)..(143): Homolog of NCBI NO: 6321942 NR Description: part of small (ribosomal) subunit (SSU) (contains U3 snoRNA); Interacts With Mpp10; Imp3p is a specific
  misc_feature (1)..(145): Homolog of NCBI NO: 19115815 NR Description: putative component of U3 snoRNP, required for rRNA processing [Schizosaccharomyces pombe]
  misc_feature (1)..(132): Homolog of NCBI NO: 29124591 NR Description: Similar to chromosome 15 open reading frame 12
MGSRDDYKKYSGLCRMVQKLTNIMKQMDPADPFRIQMTDMLLEKLYNMGVIPTRKSLTLTERLSVSSFCRRRLSTVLVHLKFAEHHKEAVTYIEQGHVRVGPETITDPAFLVTRNMEDFITWVDSSKIKRKVLEYNDTLDDYDMLA

SEQ ID NO: 104574 - protein, 131 aa, Arabidopsis thaliana
  peptide (1)..(131): Ceres Seq. ID no. 13615304
  misc_feature (1)..(55): Pfam Name: Ribosomal protein S4/S9 N-terminal domain Pfam Description: Ribosomal protein S4/S9 N-terminal domain
  misc_feature (1)..(131): Homolog of NCBI NO: 18417773 NR Description: ribosomal protein S4/S9 related [Arabidopsis
  misc_feature (1)..(131): Homolog of NCBI NO: 21554411 NR Description: ribosomal protein-like [Arabidopsis thaliana]
  misc_feature (1)..(131): Homolog of NCBI NO: 11358773 NR Description: ribosomal protein-like - Arabidopsis thaliana
  misc_feature (1)..(131): Homolog of NCBI NO: 38346067 NR Description: OSJNBa0084K01.7 [Oryza sativa (japonica
  misc_feature (1)..(129): Homolog of NCBI NO: 19527196 NR Description: RIKEN cDNA 1190002L16 [Mus musculus]
  misc_feature (1)..(129): Homolog of NCBI NO: 34864645 NR Description: similar to RIKEN cDNA 1190002L16 [Rattus
  misc_feature (1)..(131): Homolog of NCBI NO: 8922794 NR Description: chromosome 15 open reading frame 12; ribosomal protein S4 [Homo sapiens] >gi|7023341|dbj|BAA91929.1| protein product [Homo sapiens] >gi|12053321|emb|CAB66847.1|
  misc_feature (1)..(128): Homolog of NCBI NO: 6321942 NR Description: part of small (ribosomal) subunit (SSU) (contains U3 snoRNA); Interacts With Mpp10; Imp3p is a specific
  misc_feature (1)..(130): Homolog of NCBI NO: 19115815 NR Description: putative component of U3 snoRNP, required for rRNA processing [Schizosaccharomyces pombe]
  misc_feature (1)..(117): Homolog of NCBI NO: 29124591 NR Description: Similar to chromosome 15 open reading frame 12
MVQKLTNIMKQMDPADPFRIQMTDMLLEKLYNMGVIPTRKSLTLTERLSVSSFCRRRLSTVLVHLKFAEHHKEAVTYIEQGHVRVGPETITDPAFLVTRNMEDFITWVDSSKIKRKVLEYNDTLDDYDMLA

SEQ ID NO: 104575 - DNA, 1304 bp, Arabidopsis thaliana
  misc_feature (1)..(1304): Ceres Seq. ID no. 13615328
  misc_feature: MA Experiment ID: 108462 Result: Up-regulated in Transcription
  misc_feature: MA Experiment 108462 PARAMETER Experiment Name: At_Germinating_Seeds_cDNA_P Parameter: Age (day) Value: 2 vs. 0
  misc_feature: MA Experiment 108462 PARAMETER Experiment Name: At_Germinating_Seeds_cDNA_P Parameter: Tissue Value: Germinating Seeds
  misc_feature: MA Experiment ID: 20000182 Result: Up-regulated in Transcription
  misc_feature: MA Experiment 20000182 PARAMETER Experiment Name: At_2mM_SA_P Parameter: Age (day) Value: 14
  misc_feature: MA Experiment 20000182 PARAMETER Experiment Name: At_2mM_SA_P Parameter: Organism Value: A. thaliana
  misc_feature: MA Experiment 20000182 PARAMETER Experiment Name: At_2mM_SA_P Parameter: Plant Line Value: WS
  misc_feature: MA Experiment 20000182 PARAMETER Experiment Name: At_2mM_SA_P Parameter: Timepoint (hr) Value: 6
  misc_feature: MA Experiment 20000182 PARAMETER Experiment Name: At_2mM_SA_P Parameter: Tissue Value: Aerial
  misc_feature: MA Experiment 20000182 PARAMETER Experiment Name: At_2mM_SA_P Parameter: Treatment Value: 2mM SA vs. No Treatment
  misc_feature: MA Experiment ID: 20000264 Result: Up-regulated in Transcription
  misc_feature: MA Experiment 20000264 PARAMETER Experiment Name: At_Open_Flower_P Parameter: Age (day) Value: 21
  misc_feature: MA Experiment 20000264 PARAMETER Experiment Name: At_Open_Flower_P Parameter: Plant Line Value: WS
  misc_feature: MA Experiment 20000264 PARAMETER Experiment Name: At_Open_Flower_P Parameter: Tissue Value: Open Flower vs. Whole Plant
  misc_feature: MA Experiment ID: 20000794 Result: Up-regulated in Transcription
  misc_feature: MA Experiment 20000794 PARAMETER Experiment Name: At_Petals_P Parameter: Age (day) Value: 23-25 days
  misc_feature: MA Experiment 20000794 PARAMETER Experiment Name: At_Petals_P Parameter: Plant Line Value: WS
  misc_feature: MA Experiment 20000794 PARAMETER Experiment Name: At_Petals_P Parameter: Tissue Value: Petals vs. Whole plant
actcaatccaaactcaacccacaacgctacacattaaaaaataaaaaacctatggcaaccatttccttctctcacaaccaccaatcctccgacaaccgccgtggtggatcccatcaccaccgtcacggccccgtcgtggaagagatcgaaggactcatcaaagttttcaacgacggctgcgtcgaaagacctcccatagttcccatcgtctcaccaaccattcacccatcttctaaagccacagcctttgacatcaaactatccaacgacacatggacacgtgtctacatccccgatgccgcagcagcctcgccgtccgttactctccctctcctcgtttacttccacggcggtggtttctgcgttggctccgccgcttggagttgctaccatgacttcttgaccagccttgccgttaaagcccgttgcgtcatcgtttccgtaaactaccgtttagcccctgaacaccgtctcccggcggcgtacgacgacggcgttaatgtcgtctcgtggctagtcaagcaacaaatatctaccggtggtggatatccttcttggttgagtaaatgtaacctctcaaacgttttcttggccggagatagcgccggagccaacatagcttaccaagtcgccgtaagaatcatggccagtggcaaatacgcaaacactctacacctcaagggcattattctcatccaccctttcttcggcggcgaatcaagaacgtcttcggagaaacaacaacatcacaccaagtcatcggcgcttactctttcagcttccgacgcatattggcgtctagctctgccacgtggagcgagtagagaccatccatggtgtaaccctctgatgagctcggcgggagcgaagttaccgacgacgatggtgttcatggcggagtttgatatactaaaagaacgaaacttggagatgtgtaaagtgatgagaagccatgggaagagagttgaaggtatagttcatggaggtgttggtcacgcttttcatattctcgacaactcgtcggtgtcacgtgatcgaatccacgacatgatgtgtcgtcttcacaacttcatacatccatcataataattccctaaagacctttttctgaaacctttaattgatttaaaatgttgttcttgaaaaataataagagataaaaacttgaaatgttgtgtttttattgtggattaaagtaagctttgctttgtagtgttttttcagtgaaggtgaatagtataaattatgtaatacaatagatggacttgtacttttaagttaagttatgtatccaatgcttgaat

SEQ ID NO: 104576 - protein, 361 aa, Arabidopsis thaliana; identical to SEQ ID NO: 23817
  peptide (1)..(361): Ceres Seq. ID no. 13615329
  misc_feature (18)..(361): Homolog of NCBI NO: 15237267 NR Description: expressed protein [Arabidopsis thaliana]
  misc_feature (18)..(361): Homolog of NCBI NO: 21593215 NR Description: unknown [Arabidopsis thaliana]
  misc_feature (42)..(359): Homolog of NCBI NO: 18409077 NR Description: expressed protein [Arabidopsis thaliana]
  misc_feature (45)..(357): Homolog of NCBI NO: 5487873 NR Description: PrMC3 [Pinus radiata]
  misc_feature (46)..(357): Homolog of NCBI NO: 26023941 NR Description: putative serine hydrolase [Vitis vinifera]
  misc_feature (45)..(338): Homolog of NCBI NO: 27819508 NR Description: putative esterase [Oryza sativa (japonica
  misc_feature (45)..(358): Homolog of NCBI NO: 34899932 NR Description: putative cell death associated protein [Oryza
  misc_feature (45)..(347): Homolog of NCBI NO: 15240090 NR Description: expressed protein [Arabidopsis thaliana] expressed protein [Arabidopsis thaliana] gb|AAD04946.2~gene_id:F15M7.10~similar to unknown protein
  misc_feature (45)..(347): Homolog of NCBI NO: 7417008 NR Description: cell death associated protein [Nicotiana tabacum]
  misc_feature (45)..(347): Homolog of NCBI NO: 542058 NR Description: HSR203J protein - common tobacco

SEQ ID NO: 104577 - protein, 344 aa, Arabidopsis thaliana; identical to SEQ ID NO: 23818
  peptide (1)..(344): Ceres Seq. ID no. 13615330
  misc_feature (1)..(344): Homolog of NCBI NO: 15237267 NR Description: expressed protein [Arabidopsis thaliana]
  misc_feature (1)..(344): Homolog of NCBI NO: 21593215 NR Description: unknown [Arabidopsis thaliana]
  misc_feature (25)..(342): Homolog of NCBI NO: 18409077 NR Description: expressed protein [Arabidopsis thaliana]
  misc_feature (28)..(340): Homolog of NCBI NO: 5487873 NR Description: PrMC3 [Pinus radiata]
  misc_feature (29)..(340): Homolog of NCBI NO: 26023941 NR Description: putative serine hydrolase [Vitis vinifera]
  misc_feature (28)..(321): Homolog of NCBI NO: 27819508 NR Description: putative esterase [Oryza sativa (japonica
  misc_feature (28)..(341): Homolog of NCBI NO: 34899932 NR Description: putative cell death associated protein [Oryza
  misc_feature (28)..(330): Homolog of NCBI NO: 15240090 NR Description: expressed protein [Arabidopsis thaliana] expressed protein [Arabidopsis thaliana] gb|AAD04946.2~gene_id:F15M7.10~similar to unknown protein
  misc_feature (28)..(330): Homolog of NCBI NO: 7417008 NR Description: cell death associated protein [Nicotiana tabacum]
  misc_feature (28)..(330): Homolog of NCBI NO: 542058 NR Description: HSR203J protein - common tobacco

SEQ ID NO: 104578 - DNA, 872 bp, Arabidopsis thaliana
  misc_feature (1)..(872): Ceres Seq. ID no. 13615331
  misc_feature: MA Experiment ID: 108434 Result: Up-regulated in Transcription
  misc_feature: MA Experiment 108434 PARAMETER Experiment Name: At_Root_Tips_cDNA_P Parameter: Tissue Value: Root Tips
  misc_feature: MA Experiment ID: 108462 Result: Down-regulated in Transcription
  misc_feature: MA Experiment 108462 PARAMETER Experiment Name: At_Germinating_Seeds_cDNA_P Parameter: Age (day) Value: 2 vs. 0
  misc_feature: MA Experiment 108462 PARAMETER Experiment Name: At_Germinating_Seeds_cDNA_P Parameter: Tissue Value: Germinating Seeds
  misc_feature: MA Experiment ID: 108463 Result: Down-regulated in Transcription
  misc_feature: MA Experiment 108463 PARAMETER Experiment Name: At_Germinating_Seeds_cDNA_P Parameter: Age (day) Value: 3 vs. 0
  misc_feature: MA Experiment 108463 PARAMETER Experiment Name: At_Germinating_Seeds_cDNA_P Parameter: Tissue Value: Germinating Seeds
  misc_feature: MA Experiment ID: 108464 Result: Down-regulated in Transcription
  misc_feature: MA Experiment 108464 PARAMETER Experiment Name: At_Germinating_Seeds_cDNA_P Parameter: Age (day) Value: 4 vs. 0
  misc_feature: MA Experiment 108464 PARAMETER Experiment Name: At_Germinating_Seeds_cDNA_P Parameter: Tissue Value: Germinating Seeds
  misc_feature: MA Experiment ID: 108489 Result: Up-regulated in Transcription
  misc_feature: MA Experiment ID: 108561 Result: Down-regulated in Transcription
  misc_feature: MA Experiment 108561 PARAMETER Experiment Name: At_100uM_ABA_cDNA_P Parameter: Timepoint (hr) Value: 6
  misc_feature: MA Experiment 108561 PARAMETER Experiment Name: At_100uM_ABA_cDNA_P Parameter: Tissue Value: Aerial
  misc_feature: MA Experiment 108561 PARAMETER Experiment Name: At_100uM_ABA_cDNA_P Parameter: Treatment Value: 100uM ABA vs. No Treatment
  misc_feature: MA Experiment ID: 108573 Result: Down-regulated in Transcription
  misc_feature: MA Experiment 108573 PARAMETER Experiment Name: At_Drought_cDNA_P Parameter: Timepoint (hr) Value: 6
  misc_feature: MA Experiment 108573 PARAMETER Experiment Name: At_Drought_cDNA_P Parameter: Tissue Value: Aerial
  misc_feature: MA Experiment 108573 PARAMETER Experiment Name: At_Drought_cDNA_P Parameter: Treatment Value: Drought vs. No Drought
  misc_feature: MA Experiment ID: 20000071 Result: Down-regulated in Transcription
  misc_feature: MA Experiment 20000071 PARAMETER Experiment Name: At_100uM_ABA_Mutants_cDNA_P Parameter: Plant Line Value: CS8104
  misc_feature: MA Experiment 20000071 PARAMETER Experiment Name: At_100uM_ABA_Mutants_cDNA_P Parameter: Timepoint (hr) Value: 6
  misc_feature: MA Experiment 20000071 PARAMETER Experiment Name: At_100uM_ABA_Mutants_cDNA_P Parameter: Tissue Value: Aerial
  misc_feature: MA Experiment 20000071 PARAMETER Experiment Name: At_100uM_ABA_Mutants_cDNA_P Parameter: Treatment Value: 100uM ABA vs. No Treatment
  misc_feature: MA Experiment ID: 20000087 Result: Down-regulated in Transcription
  misc_feature: MA Experiment 20000087 PARAMETER Experiment Name: At_100uM_ABA_Mutants_cDNA_P Parameter: Plant Line Value: WS
  misc_feature: MA Experiment 20000087 PARAMETER Experiment Name: At_100uM_ABA_Mutants_cDNA_P Parameter: Timepoint (hr) Value: 6
  misc_feature: MA Experiment 20000087 PARAMETER Experiment Name: At_100uM_ABA_Mutants_cDNA_P Parameter: Tissue Value: Aerial
  misc_feature: MA Experiment 20000087 PARAMETER Experiment Name: At_100uM_ABA_Mutants_cDNA_P Parameter: Treatment Value: 100uM ABA vs. No Treatment
  misc_feature: MA Experiment ID: 20000117 Result: Down-regulated in Transcription
  misc_feature: MA Experiment 20000117 PARAMETER Experiment Name: At_100uM_ABA_Mutants_cDNA_P Parameter: Plant Line Value: Columbia
  misc_feature: MA Experiment 20000117 PARAMETER Experiment Name: At_100uM_ABA_Mutants_cDNA_P Parameter: Timepoint (hr) Value: 6
  misc_feature: MA Experiment 20000117 PARAMETER Experiment Name: At_100uM_ABA_Mutants_cDNA_P Parameter: Tissue Value: Aerial
  misc_feature: MA Experiment 20000117 PARAMETER Experiment Name: At_100uM_ABA_Mutants_cDNA_P Parameter: Treatment Value: 100uM ABA vs. No Treatment
  misc_feature: MA Experiment ID: 20000180 Result: Down-regulated in Transcription
  misc_feature: MA Experiment 20000180 PARAMETER Experiment Name: At_Germinating_Seeds_P Parameter: Age (hr) Value: 24 vs. 0
  misc_feature: MA Experiment 20000180 PARAMETER Experiment Name: At_Germinating_Seeds_P Parameter: Tissue Value: Germinating Seeds
  misc_feature: MA Experiment ID: 20000234 Result: Up-regulated in Transcription
  misc_feature: MA Experiment 20000234 PARAMETER Experiment Name: At_Siliques_P Parameter: Age (day) Value: 21
  misc_feature: MA Experiment 20000234 PARAMETER Experiment Name: At_Siliques_P Parameter: Organism Value: A. thaliana
  misc_feature: MA Experiment 20000234 PARAMETER Experiment Name: At_Siliques_P Parameter: Plant Line Value: WS
  misc_feature: MA Experiment 20000234 PARAMETER Experiment Name: At_Siliques_P Parameter: Tissue Value: Less Than 5mm Siliques vs. Whole Plant
  misc_feature: MA Experiment ID: 20000264 Result: Up-regulated in Transcription
  misc_feature: MA Experiment 20000264 PARAMETER Experiment Name: At_Open_Flower_P Parameter: Age (day) Value: 21
  misc_feature: MA Experiment 20000264 PARAMETER Experiment Name: At_Open_Flower_P Parameter: Plant Line Value: WS
  misc_feature: MA Experiment 20000264 PARAMETER Experiment Name: At_Open_Flower_P Parameter: Tissue Value: Open Flower vs. Whole Plant
  misc_feature: MA Experiment ID: 20000437 Result: Down-regulated in Transcription
  misc_feature: MA Experiment 20000437 PARAMETER Experiment Name: At_Drought_P Parameter: Age (day) Value: 8
  misc_feature: MA Experiment 20000437 PARAMETER Experiment Name: At_Drought_P Parameter: Organism Value: A. thaliana
  misc_feature: MA Experiment 20000437 PARAMETER Experiment Name: At_Drought_P Parameter: Plant Line Value: WS
  misc_feature: MA Experiment 20000437 PARAMETER Experiment Name: At_Drought_P Parameter: Timepoint (hr) Value: 24
  misc_feature: MA Experiment 20000437 PARAMETER Experiment Name: At_Drought_P Parameter: Tissue Value: Whole Plant
  misc_feature: MA Experiment 20000437 PARAMETER Experiment Name: At_Drought_P Parameter: Treatment Value: Drought vs. No Drought
  misc_feature: MA Experiment ID: 20000496 Result: Up-regulated in Transcription
  misc_feature: MA Experiment 20000496 PARAMETER Experiment Name: At_Guard_Cells_P Parameter: Harvest Date Value: 7/19/2002
  misc_feature: MA Experiment 20000496 PARAMETER Experiment Name: At_Guard_Cells_P Parameter: Organism Value: Canola
  misc_feature: MA Experiment 20000496 PARAMETER Experiment Name: At_Guard_Cells_P Parameter: Tissue Value: Guard Cells vs. Leaves
  misc_feature: MA Experiment ID: 20000794 Result: Down-regulated in Transcription
  misc_feature: MA Experiment 20000794 PARAMETER Experiment Name: At_Petals_P Parameter: Age (day) Value: 23-25 days
  misc_feature: MA Experiment 20000794 PARAMETER Experiment Name: At_Petals_P Parameter: Plant Line Value: WS
  misc_feature: MA Experiment 20000794 PARAMETER Experiment Name: At_Petals_P Parameter: Tissue Value: Petals vs. Whole plant
  misc_feature: MA Experiment ID: 20001558 Result: Up-regulated in Transcription
  misc_feature: MA Experiment 20001558 PARAMETER Experiment Name: At_Drought_Soil_Dry_P Parameter: Age (day) Value: 27
  misc_feature: MA Experiment 20001558 PARAMETER Experiment Name: At_Drought_Soil_Dry_P Parameter: Organism Value: A. thaliana
  misc_feature: MA Experiment 20001558 PARAMETER Experiment Name: At_Drought_Soil_Dry_P Parameter: Plant Line Value: WS
  misc_feature: MA Experiment 20001558 PARAMETER Experiment Name: At_Drought_Soil_Dry_P Parameter: Post Timepoint (hr) Value: 6
  misc_feature: MA Experiment 20001558 PARAMETER Experiment Name: At_Drought_Soil_Dry_P Parameter: Post-Treatment Value: Re-Water vs. No Drought
  misc_feature: MA Experiment 20001558 PARAMETER Experiment Name: At_Drought_Soil_Dry_P Parameter: Timepoint (day) Value: 13
  misc_feature: MA Experiment 20001558 PARAMETER Experiment Name: At_Drought_Soil_Dry_P Parameter: Treatment Value: Drought vs. No Drought
  misc_feature: MA Experiment ID: 20001560 Result: Up-regulated in Transcription
  misc_feature: MA Experiment 20001560 PARAMETER Experiment Name: At_Drought_Soil_Dry_P Parameter: Age (day) Value: 28
  misc_feature: MA Experiment 20001560 PARAMETER Experiment Name: At_Drought_Soil_Dry_P Parameter: Organism Value: A. thaliana
  misc_feature: MA Experiment 20001560 PARAMETER Experiment Name: At_Drought_Soil_Dry_P Parameter: Plant Line Value: WS
  misc_feature: MA Experiment 20001560 PARAMETER Experiment Name: At_Drought_Soil_Dry_P Parameter: Post Timepoint (hr) Value: None
  misc_feature: MA Experiment 20001560 PARAMETER Experiment Name: At_Drought_Soil_Dry_P Parameter: Post-Treatment Value: None
  misc_feature: MA Experiment 20001560 PARAMETER Experiment Name: At_Drought_Soil_Dry_P Parameter: Timepoint (day) Value: 14
  misc_feature: MA Experiment 20001560 PARAMETER Experiment Name: At_Drought_Soil_Dry_P Parameter: Treatment Value: Drought vs. No Drought
  misc_feature: MA Experiment ID: 20001757 Result: Up-regulated in Transcription
  misc_feature: MA Experiment 20001757 PARAMETER Experiment Name: At_50mM_NH4NO3_L-to-H_P Parameter: Timepoint (hr) Value: 6
  misc_feature: MA Experiment 20001757 PARAMETER Experiment Name: At_50mM_NH4NO3_L-to-H_P Parameter: Tissue Value: Leaf
  misc_feature: MA Experiment 20001757 PARAMETER Experiment Name: At_50mM_NH4NO3_L-to-H_P Parameter: Treatment Value: 50mM NH4NO3 vs 100mM Mannitol
atcgaacattaaaacctgattttactgaaactgtgctgcgaaggagaagccgcaaaccattttttgtcaatctagggttcttcttcgtacttgcagatttcgcctccgttttcactacgatctgtgaagatgttctccgctcagaacaagatcaagaaggacaagaatgctgagccaacagaatgcgaggagcaagttgctcaggctttgtttgatttggagaacactaaccaggagttgaaaagcgagttgaaagatctctacatcaaccaagctgttcacatggatatctctggaaaccgcaaagctgttgtgatttacgttccattcagattgaggaaagctttccgcaagattcatccccgtctcgtcagagagcttgagaagaagttcagtggaaaggatgttatctttgttaccacaagaaggatcatgcgtccccccaagaagggtgctgctgttcagaggccacgtaacagaactcttacctcagttcatgaagctatgcttgaagatgttgctttccccgctgagattgttggaaagcgtactcgctaccgtcttgatggttccaagatcatgaaggtctttttggatgccaaggaaaagaacaacacagagtacaagctcgagactatggtcggtgtgtaccgtaaacttactggcaaagatgttgtttttgagtacccagtcgaagcttgaaagaagatgatgaagaaccatcaggatagtgaaagagagcttttgtttatgttttgtggtatttaggatgaaggaaactctcttgattcagttccttgttcacaatctttaatgttctatttacaatgactactttttgtgtttttcaattttgaaacctctatgatttc

SEQ ID NO: 104579 - protein, 190 aa, Arabidopsis thaliana [sequence omitted]

SEQ ID NO: 104580 - protein, 139 aa, Arabidopsis thaliana; identical to SEQ ID NO: 35491
  peptide (1)..(139): Ceres Seq. ID no. 13615333
  misc_feature (1)..(139): Pfam Name: Ribosomal protein S7e Pfam Description: Ribosomal protein S7e
  misc_feature (1)..(139): Homolog of NCBI NO: 15237278 NR Description: 40S ribosomal protein S7 (RPS7C) [Arabidopsis
  misc_feature (1)..(139): Homolog of NCBI NO: 21592413 NR Description: 40S ribosomal protein S7-like [Arabidopsis
  misc_feature (1)..(137): Homolog of NCBI NO: 15232926 NR Description: 40S ribosomal protein S7 (RPS7B) [Arabidopsis >gi|30678607|ref|NP_850504.1| 40S ribosomal protein S7 (RPS7B) thaliana] >gi|6957719|gb|AAF32463.1| putative 40S ribosomal
  misc_feature (1)..(137): Homolog of NCBI NO: 20139962 NR Description: 40S ribosomal protein S7
  misc_feature (1)..(137): Homolog of NCBI NO: 20139964 NR Description: 40S ribosomal protein S7 unknown [Avicennia marina] >gi|4128206|gb|AAD03501.1| 40S
  misc_feature (1)..(137): Homolog of NCBI NO: 15221972 NR Description: 40S ribosomal protein S7 (RPS7A) [Arabidopsis >gi|30694420|ref|NP_849786.1| 40S ribosomal protein S7 (RPS7A) thaliana] >gi|25294579|pir||A96526 probable 40S ribosomal protein
  misc_feature (1)..(137): Homolog of NCBI NO: 22671664 NR Description: ribosomal protein S7 [Oryza sativa (japonica
  misc_feature (1)..(137): Homolog of NCBI NO: 4588906 NR Description: ribosomal protein S7 [Secale cereale]
  misc_feature (1)..(137): Homolog of NCBI NO: 14787424 NR Description: Ribosomal protein S7 [Hordeum vulgare subsp.
  misc_feature (1)..(136): Homolog of NCBI NO: 1710775 NR Description: 40S RIBOSOMAL PROTEIN S7

SEQ ID NO: 104581 - DNA, 924 bp, Arabidopsis thaliana
  misc_feature (1)..(924): Ceres Seq. ID no. 13615334
  misc_feature: MA Experiment ID: 108434 Result: Up-regulated in Transcription
  misc_feature: MA Experiment 108434 PARAMETER Experiment Name: At_Root_Tips_cDNA_P Parameter: Tissue Value: Root Tips
  misc_feature: MA Experiment ID: 108595 Result: Down-regulated in Transcription
  misc_feature: MA Experiment 108595 PARAMETER Experiment Name: At_Ler-pi_Ovule_cDNA_P Parameter: Plant Line Value: null
  misc_feature: MA Experiment ID: 20000112 Result: Up-regulated in Transcription
  misc_feature: MA Experiment 20000112 PARAMETER Experiment Name: At_42deg_Heat_cDNA_P Parameter: Temperature (deg C) Value: 42 vs. 22
  misc_feature: MA Experiment 20000112 PARAMETER Experiment Name: At_42deg_Heat_cDNA_P Parameter: Timepoint (hr) Value: 2
  misc_feature: MA Experiment 20000112 PARAMETER Experiment Name: At_42deg_Heat_cDNA_P Parameter: Tissue Value: Aerial
  misc_feature: MA Experiment ID: 20000180 Result: Up-regulated in Transcription
  misc_feature: MA Experiment 20000180 PARAMETER Experiment Name: At_Germinating_Seeds_P Parameter: Age (hr) Value: 24 vs. 0
  misc_feature: MA Experiment 20000180 PARAMETER Experiment Name: At_Germinating_Seeds_P Parameter: Tissue Value: Germinating Seeds
  misc_feature: MA Experiment ID: 20000185 Result: Down-regulated in Transcription
  misc_feature: MA Experiment 20000185 PARAMETER Experiment Name: At_Roots__P Parameter: Age (day) Value: 7 vs. 21
  misc_feature: MA Experiment 20000185 PARAMETER Experiment Name: At_Roots__P Parameter: Organism Value: A. thaliana
  misc_feature: MA Experiment 20000185 PARAMETER Experiment Name: At_Roots__P Parameter: Tissue Value: Roots vs. Whole Plant
gtcttcgcaaaagaaaattccgaaattgtttcgaaaaatcctgaagaagaagaggtctttgaatcaacaacagttccatgttgtgcccaacgtatacaccaagtgtttaccattttcaaacgcaaaagccagttttccggaaacagaggtttcgggtttgttcatctacttctggtggtgaggatgatagattcaaagtagagtacactccttggcttatcgttgggttgggcaatccaggaaacaagtatcatggaacaagacacaatgttggtttcgagatgatcgatgtgttggctagaaaagaaggggtgttgatgaacactatacagtccaaagctctaatcggaataggtgctattgaagatgtacctatcttgttggctaaacctcagacttatatgaacttcagcggcgaatcggttggatctctagcttcacactatcgagtaccattgcgccacattttaatgatttacgatgagatggctttaccaaatggggttttgagacttcaaccgaaaggaggtcaaggctatcacaacggagtgaagagtgtaatggggcatttggatggtcgtcgaaactttcctcgtttaagcataggcattggtaaaccacctggaaacatggatatgaaagcttttcttcttcagaagtttagtccattggaacagaaacagatcgaggaagcactcgagcaaggaagtgaagcagtgaagactcttgtgcttaatggcttcaatcaaggaatttcgagatttaatcttgtgcagaaatataaattccataaagtatagactccgatttgcaataaaagcaaccatgtagagattggtttagcactttcattttatcgtctcaagagacactctttcgttacgaagtgtatgaagtttcttagattaatataattcagtctcg

SEQ ID NO: 104582 - protein, 240 aa, Arabidopsis thaliana
  peptide (1)..(240): Ceres Seq. ID no. 13615335
  misc_feature (1)..(240): Homolog of NCBI NO: 15237280 NR Description: CRS2-related protein [Arabidopsis thaliana]
  misc_feature (1)..(240): Homolog of NCBI NO: 15240875 NR Description: CRS2 -related protein [Arabidopsis thaliana]
  misc_feature (1)..(240): Homolog of NCBI NO: 26451849 NR Description: putative CRS2 [Arabidopsis thaliana]
  misc_feature (18)..(240): Homolog of NCBI NO: 6752919 NR Description: CRS2 [Zea mays]
  misc_feature (41)..(240): Homolog of NCBI NO: 40889730 NR Description: Chain A, Crystal Structure Of The Chloroplast
  misc_feature (41)..(240): Homolog of NCBI NO: 40889731 NR Description: Chain A, Structure Of The Group Ii Intron
  misc_feature (41)..(238): Homolog of NCBI NO: 40889732 NR Description: Chain A, Structure Of The Chloroplast Group Ii
  misc_feature (43)..(239): Homolog of NCBI NO: 30687503 NR Description: expressed protein [Arabidopsis thaliana]
  misc_feature (45)..(230): Homolog of NCBI NO: 30685853 NR Description: expressed protein [Arabidopsis thaliana]
  misc_feature (45)..(230): Homolog of NCBI NO: 26453108 NR Description: unknown protein [Arabidopsis thaliana]
MLCPTYTPSVYHFQTQKPVFRKQRFRVCSSTSGGEDDRFKVEYTPWLIVGLGNPGNKYHGTRHNVGFEMIDVLARKEGVLMNTIQSKALIGIGAIEDVPILLAKPQTYMNFSGESVGSLASHYRVPLRHILMIYDEMALPNGVLRLQPKGGQGYHNGVKSVMGHLDGRRNFPRLSIGIGKPPGNMDMKAFLLQKFSPLEQKQIEEALEQGSEAVKTLVLNGFNQGISRFNLVQKYKFHKV

SEQ ID NO: 104583 - protein, 172 aa, Arabidopsis thaliana; identical to SEQ ID NO: 20863
  peptide (1)..(172): Ceres Seq. ID no. 13615336
  misc_feature (1)..(172): Homolog of NCBI NO: 15237280 NR Description: CRS2-related protein [Arabidopsis thaliana]
  misc_feature (1)..(172): Homolog of NCBI NO: 15240875 NR Description: CRS2 -related protein [Arabidopsis thaliana]
  misc_feature (1)..(172): Homolog of NCBI NO: 26451849 NR Description: putative CRS2 [Arabidopsis thaliana]
  misc_feature (1)..(172): Homolog of NCBI NO: 6752919 NR Description: CRS2 [Zea mays]
  misc_feature (1)..(172): Homolog of NCBI NO: 40889730 NR Description: Chain A, Crystal Structure Of The Chloroplast
  misc_feature (1)..(172): Homolog of NCBI NO: 40889731 NR Description: Chain A, Structure Of The Group Ii Intron
  misc_feature (1)..(170): Homolog of NCBI NO: 40889732 NR Description: Chain A, Structure Of The Chloroplast Group Ii
  misc_feature (1)..(171): Homolog of NCBI NO: 30687503 NR Description: expressed protein [Arabidopsis thaliana]
  misc_feature (1)..(162): Homolog of NCBI NO: 30685853 NR Description: expressed protein [Arabidopsis thaliana]
  misc_feature (1)..(162): Homolog of NCBI NO: 26453108 NR Description: unknown protein [Arabidopsis thaliana]

SEQ ID NO: 104584 - protein, 160 aa, Arabidopsis thaliana; identical to SEQ ID NO: 20864
  peptide (1)..(160): Ceres Seq. ID no. 13615337
  misc_feature (1)..(160): Homolog of NCBI NO: 15237280 NR Description: CRS2-related protein [Arabidopsis thaliana]
  misc_feature (1)..(160): Homolog of NCBI NO: 15240875 NR Description: CRS2 -related protein [Arabidopsis thaliana]
  misc_feature (1)..(160): Homolog of NCBI NO: 26451849 NR Description: putative CRS2 [Arabidopsis thaliana]
  misc_feature (1)..(160): Homolog of NCBI NO: 6752919 NR Description: CRS2 [Zea mays]
  misc_feature (1)..(160): Homolog of NCBI NO: 40889730 NR Description: Chain A, Crystal Structure Of The Chloroplast
  misc_feature (1)..(160): Homolog of NCBI NO: 40889731 NR Description: Chain A, Structure Of The Group Ii Intron
  misc_feature (1)..(158): Homolog of NCBI NO: 40889732 NR Description: Chain A, Structure Of The Chloroplast Group Ii
  misc_feature (1)..(159): Homolog of NCBI NO: 30687503 NR Description: expressed protein [Arabidopsis thaliana]
  misc_feature (1)..(150): Homolog of NCBI NO: 30685853 NR Description: expressed protein [Arabidopsis thaliana]
  misc_feature (1)..(150): Homolog of NCBI NO: 26453108 NR Description: unknown protein [Arabidopsis thaliana]

SEQ ID NO: 104585 - DNA, 1803 bp, Arabidopsis thaliana
  misc_feature (1)..(1803): Ceres Seq. ID no. 13615342
  misc_feature: MA Experiment ID: 20000180 Result: Up-regulated in Transcription
  misc_feature: MA Experiment 20000180 PARAMETER Experiment Name: At_Germinating_Seeds_P Parameter: Age (hr) Value: 24 vs. 0
  misc_feature: MA Experiment 20000180 PARAMETER Experiment Name: At_Germinating_Seeds_P Parameter: Tissue Value: Germinating Seeds
  misc_feature: MA Experiment ID: 20000211 Result: Up-regulated in Transcription
  misc_feature: MA Experiment 20000211 PARAMETER Experiment Name: At_0.001percent_MeJA__P Parameter: Age (day) Value: 14
  misc_feature: MA Experiment 20000211 PARAMETER Experiment Name: At_0.001percent_MeJA__P Parameter: Organism Value: A. thaliana
  misc_feature: MA Experiment 20000211 PARAMETER Experiment Name: At_0.001percent_MeJA__P Parameter: Plant Line Value: WS
  misc_feature: MA Experiment 20000211 PARAMETER Experiment Name: At_0.001percent_MeJA__P Parameter: Timepoint (hr) Value: 1
  misc_feature: MA Experiment 20000211 PARAMETER Experiment Name: At_0.001percent_MeJA__P Parameter: Tissue Value: Aerial
  misc_feature: MA Experiment 20000211 PARAMETER Experiment Name: At_0.001percent_MeJA__P Parameter: Treatment Value: 0.001percent MeJA vs. No Treatment
  misc_feature: MA Experiment ID: 20000265 Result: Up-regulated in Transcription
  misc_feature: MA Experiment 20000265 PARAMETER Experiment Name: At_Open_Flower_P Parameter: Age (day) Value: 21
  misc_feature: MA Experiment 20000265 PARAMETER Experiment Name: At_Open_Flower_P Parameter: Plant Line Value: WS
  misc_feature: MA Experiment 20000265 PARAMETER Experiment Name: At_Open_Flower_P Parameter: Tissue Value: Closed Flower vs. Whole Plant
  misc_feature: MA Experiment ID: 20000286 Result: Up-regulated in Transcription
  misc_feature: MA Experiment 20000286 PARAMETER Experiment Name: At_Open_Flower_P Parameter: Age (day) Value: 21
  misc_feature: MA Experiment 20000286 PARAMETER Experiment Name: At_Open_Flower_P Parameter: Plant Line Value: WS
  misc_feature: MA Experiment 20000286 PARAMETER Experiment Name: At_Open_Flower_P Parameter: Tissue Value: Half Open vs. Whole Plant
  misc_feature: MA Experiment ID: 20000441 Result: Down-regulated in Transcription
  misc_feature: MA Experiment 20000441 PARAMETER Experiment Name: At_1uM_BR-BRZ__P Parameter: Tissue Value: Shoot Apices
  misc_feature: MA Experiment 20000441 PARAMETER Experiment Name: At_1uM_BR-BRZ__P Parameter: Treatment Value: 1uM BR vs. No Treatment
  misc_feature: MA Experiment ID: 20000495 Result: Up-regulated in Transcription
  misc_feature: MA Experiment 20000495 PARAMETER Experiment Name: At_Guard_Cells_P Parameter: Harvest Date Value: 8/2/2002
  misc_feature: MA Experiment 20000495 PARAMETER Experiment Name: At_Guard_Cells_P Parameter: Organism Value: A. thaliana
  misc_feature: MA Experiment 20000495 PARAMETER Experiment Name: At_Guard_Cells_P Parameter: Tissue Value: Guard Cells vs. Leaves
  misc_feature: MA Experiment ID: 20000794 Result: Up-regulated in Transcription
  misc_feature: MA Experiment 20000794 PARAMETER Experiment Name: At_Petals_P Parameter: Age (day) Value: 23-25 days
  misc_feature: MA Experiment 20000794 PARAMETER Experiment Name: At_Petals_P Parameter: Plant Line Value: WS
  misc_feature: MA Experiment 20000794 PARAMETER Experiment Name: At_Petals_P Parameter: Tissue Value: Petals vs. Whole plant
  misc_feature: MA Experiment ID: 20001248 Result: Down-regulated in Transcription
  misc_feature: MA Experiment 20001248 PARAMETER Experiment Name: At_Far-red-induction_P Parameter: Age (day) Value: 7
  misc_feature: MA Experiment 20001248 PARAMETER Experiment Name: At_Far-red-induction_P Parameter: Light Value: Far-red vs. White
  misc_feature: MA Experiment 20001248 PARAMETER Experiment Name: At_Far-red-induction_P Parameter: Organism Value: A. thaliana
  misc_feature: MA Experiment 20001248 PARAMETER Experiment Name: At_Far-red-induction_P Parameter: Plant Line Value: Columbia
  misc_feature: MA Experiment 20001248 PARAMETER Experiment Name: At_Far-red-induction_P Parameter: Timepoint (hr) Value: 4
  misc_feature: MA Experiment 20001248 PARAMETER Experiment Name: At_Far-red-induction_P Parameter: Tissue Value: Whole Plant
  misc_feature: MA Experiment ID: 20001558 Result: Up-regulated in Transcription
  misc_feature: MA Experiment 20001558 PARAMETER Experiment Name: At_Drought_Soil_Dry_P Parameter: Age (day) Value: 27
  misc_feature: MA Experiment 20001558 PARAMETER Experiment Name: At_Drought_Soil_Dry_P Parameter: Organism Value: A. thaliana
  misc_feature: MA Experiment 20001558 PARAMETER Experiment Name: At_Drought_Soil_Dry_P Parameter: Plant Line Value: WS
  misc_feature: MA Experiment 20001558 PARAMETER Experiment Name: At_Drought_Soil_Dry_P Parameter: Post Timepoint (hr) Value: 6
  misc_feature: MA Experiment 20001558 PARAMETER Experiment Name: At_Drought_Soil_Dry_P Parameter: Post-Treatment Value: Re-Water vs. No Drought
  misc_feature: MA Experiment 20001558 PARAMETER Experiment Name: At_Drought_Soil_Dry_P Parameter: Timepoint (day) Value: 13
  misc_feature: MA Experiment 20001558 PARAMETER Experiment Name: At_Drought_Soil_Dry_P Parameter: Treatment Value: Drought vs. No Drought
  misc_feature: MA Experiment ID: 20001910 Result: Down-regulated in Transcription
  misc_feature: MA Experiment 20001910 PARAMETER Experiment Name: At_Drought_Reproduction_P Parameter: Age (day) Value: 37
  misc_feature: MA Experiment 20001910 PARAMETER Experiment Name: At_Drought_Reproduction_P Parameter: Organism Value: A. thaliana
  misc_feature: MA Experiment 20001910 PARAMETER Experiment Name: At_Drought_Reproduction_P Parameter: Plant Line Value: WS
  misc_feature: MA Experiment 20001910 PARAMETER Experiment Name: At_Drought_Reproduction_P Parameter: Timepoint (day) Value: 7
  misc_feature: MA Experiment 20001910 PARAMETER Experiment Name: At_Drought_Reproduction_P Parameter: Tissue Value: Flowers
  misc_feature: MA Experiment 20001910 PARAMETER Experiment Name: At_Drought_Reproduction_P Parameter: Treatment Value: Drought vs. No Drought
aaaaacccatttctaaaatcatctcctcttccttcaaaaactctatctctcactcccacttcttggttctaagaagaatagttaaatttcttttgcgaagaatagttcaggatgcagctgcgactttcgaaaagcttgaagcatatataatggtgtaaagactaaagagtaaagataattaagcatgaagacgatgtggtggagagatatgagaagtctacttatagttccaatgttcaagtgtttggtggctatatgtttggtcatctcactattagttttcgtagaaagtttatatatgaacattgtagtaatctacgtcaagttgtgtaaacgcaaacccgagaagatttacaaatgggaggcaatgcaagaggacttggagctcggaaatcaaaactttcccatggttcttgtccaaatcccaatgtacaacgaacgagaggtgtttaagttatccattggtgctgcttgcagactcatatggccattggatcgactaatcgttcaagttttagatgattccactgatcccaccatcatggaaatggtaagcacagagtgtggaaaatgggcaaccaaaggcataaacataaaatgtgagaggagagacaatagaaatggctataaggctggagctcttaaacaaggtatgaggcatagttacgtcaaaacatgcacctacattgcaatcttcgatgctgattttcagccagagcccgactacctcgaacgcactgtcccatttcttatccacaatcccgaactcgctcttgttcaagctcgatggaaatttgtgaacgcaaagaagtgcttgatgactaggatgcaggagatgtccctcaattaccatttcacggcagagcaagaatccggatccactagacatgccttctttggctttaatgggactgcgggtgtatggagactggcggcgatggaagaagctggtggttggaaagaccggaccaccgtagaggacatggacttggccgttcgtgtaggtctacacggctggaaatttgtctttgtcaacgatgtttcggtgaaaagtgagctaccaagccaatttaaggcattcagattccagcaacatcgatggtcatgcggtccagctaatctcttcagaaaaatgactatggaaattattcgcaataagagagtgacgatttggaagaaattgtatgtgatctatagtttctttttcgtaaggaagatcatagtccatttcttcactttcttcttctattgtttcattcttcctacgagcgtattctttcccgaagtcaacattccgacttggtcaaccgtttattttccttttatgatcactctattcaatgccattgccacaccaagatctttctacctcgtgattttttgggtcttattcgagaatgtaatggctatgcatcggaccaaaggcactttcatcggtttacttgaaggagggagagttaacgaatgggtcgtcaccgagaaattaggtgatgcgcttgagactaagttacttccccaagtaagaaaacctcgcaacgggtttctcgaaaggataaactcaaaagagatgatggtggggatatacatattgtgctgtgcatcatataaccttgtctttgggaagacagtgttatatatctatctttacatgcaggctcttgcttttattattgccggaattggttttataggaacttgataagtgtaattagtaatttatatatccgttagtattctcgttcttttctttttcatatttcagaataagtaggtgaattattttatttaatacaattcttattc

SEQ ID NO: 104586 - protein, 504 aa, Arabidopsis thaliana
  peptide (1)..(504): Ceres Seq. ID no. 13615343
  misc_feature (77)..(255): Pfam Name: Glycosyl transferase Pfam Description: Glycosyl transferase
  misc_feature (1)..(504): Homolog of NCBI NO: 15221657 NR Description: glycosyltransferase family 2 [Arabidopsis
  misc_feature (1)..(353): Homolog of NCBI NO: 9369401 NR Description: T23E23.23 [Arabidopsis thaliana]
  misc_feature (344)..(504): Homolog of NCBI NO: 9369401 NR Description: T23E23.23 [Arabidopsis thaliana]
  misc_feature (6)..(504): Homolog of NCBI NO: 28393622 NR Description: putative cellulose synthase [Arabidopsis thaliana]
  misc_feature (6)..(504): Homolog of NCBI NO: 30688411 NR Description: glycosyltransferase family 2 [Arabidopsis >gi|8778578|gb|AAF79586.1|AC007945_6 F28C11.11 [Arabidopsis >gi|20466606|gb|AAM20620.1| unknown protein [Arabidopsis
  misc_feature (28)..(504): Homolog of NCBI NO: 30688416 NR Description: glycosyltransferase family 2 [Arabidopsis
  misc_feature (9)..(504): Homolog of NCBI NO: 15237519 NR Description: glycosyltransferase family 2 [Arabidopsis
  misc_feature (4)..(503): Homolog of NCBI NO: 18403914 NR Description: glycosyltransferase family 2 [Arabidopsis >gi|16604559|gb|AAL24081.1| putative glucosyltransferase thaliana] >gi|20197522|gb|AAD15455.2| putative
  misc_feature (4)..(503): Homolog of NCBI NO: 21536839 NR Description: putative glucosyltransferase [Arabidopsis
  misc_feature (6)..(504): Homolog of NCBI NO: 16519223 NR Description: cellulose synthase-like protein OsCslA9 [Oryza
MKTMWWRDMRSLLIVPMFKCLVAICLVISLLVFVESLYMNIVVIYVKLCKRKPEKIYKWEAMQEDLELGNQNFPMVLVQIPMYNEREVFKLSIGAACRLIWPLDRLIVQVLDDSTDPTIMEMVSTECGKWATKGINIKCERRDNRNGYKAGALKQGMRHSYVKTCTYIAIFDADFQPEPDYLERTVPFLIHNPELALVQARWKFVNAKKCLMTRMQEMSLNYHFTAEQESGSTRHAFFGFNGTAGVWRLAAMEEAGGWKDRTTVEDMDLAVRVGLHGWKFVFVNDVSVKSELPSQFKAFRFQQHRWSCGPANLFRKMTMEIIRNKRVTIWKKLYVIYSFFFVRKIIVHFFTFFFYCFILPTSVFFPEVNIPTWSTVYFPFMITLFNAIATPRSFYLVIFWVLFENVMAMHRTKGTFIGLLEGGRVNEWVVTEKLGDALETKLLPQVRKPRNGFLERINSKEMMVGIYILCCASYNLVFGKTVLYIYLYMQALAFIIAGIGFIGT

SEQ ID NO: 104587 - protein, 501 aa, Arabidopsis thaliana
  peptide (1)..(501): Ceres Seq. ID no. 13615344
  misc_feature (74)..(252): Pfam Name: Glycosyl transferase Pfam Description: Glycosyl transferase
  misc_feature (1)..(501): Homolog of NCBI NO: 15221657 NR Description: glycosyltransferase family 2 [Arabidopsis
  misc_feature (1)..(350): Homolog of NCBI NO: 9369401 NR Description: T23E23.23 [Arabidopsis thaliana]
  misc_feature (341)..(501): Homolog of NCBI NO: 9369401 NR Description: T23E23.23 [Arabidopsis thaliana]
  misc_feature (3)..(501): Homolog of NCBI NO: 28393622 NR Description: putative cellulose synthase [Arabidopsis thaliana]
  misc_feature (3)..(501): Homolog of NCBI NO: 30688411 NR Description: glycosyltransferase family 2 [Arabidopsis >gi|8778578|gb|AAF79586.1|AC007945_6 F28C11.11 [Arabidopsis >gi|20466606|gb|AAM20620.1| unknown protein [Arabidopsis
  misc_feature (25)..(501): Homolog of NCBI NO: 30688416 NR Description: glycosyltransferase family 2 [Arabidopsis
  misc_feature (6)..(501): Homolog of NCBI NO: 15237519 NR Description: glycosyltransferase family 2 [Arabidopsis
  misc_feature (1)..(500): Homolog of NCBI NO: 18403914 NR Description: glycosyltransferase family 2 [Arabidopsis >gi|16604559|gb|AAL24081.1| putative glucosyltransferase thaliana] >gi|20197522|gb|AAD15455.2| putative
  misc_feature (1)..(500): Homolog of NCBI NO: 21536839 NR Description: putative glucosyltransferase [Arabidopsis
  misc_feature (3)..(501): Homolog of NCBI NO: 16519223 NR Description: cellulose synthase-like protein OsCslA9 [Oryza
MWWRDMRSLLIVPMFKCLVAICLVISLLVFVESLYMNIVVIYVKLCKRKPEKIYKWEAMQEDLELGNQNFPMVLVQIPMYNEREVFKLSIGAACRLIWPLDRLIVQVLDDSTDPTIMEMVSTECGKWATKGINIKCERRDNRNGYKAGALKQGMRHSYVKTCTYIAIFDADFQPEPDYLERTVPFLIHNPELALVQARWKFVNAKKCLMTRMQEMSLNYHFTAEQESGSTRHAFFGFNGTAGVWRLAAMEEAGGWKDRTTVEDMDLAVRVGLHGWKFVFVNDVSVKSELPSQFKAFRFQQHRWSCGPANLFRKMTMEIIRNKRVTIWKKLYVIYSFFFVRKIIVHFFTFFFYCFILPTSVFFPEVNIPTWSTVYFPFMITLFNAIATPRSFYLVIFWVLFENVMAMHRTKGTFIGLLEGGRVNEWVVTEKLGDALETKLLPQVRKPRNGFLERINSKEMMVGIYILCCASYNLVFGKTVLYIYLYMQALAFIIAGIGFIGT

SEQ ID NO: 104588 - protein, 496 aa, Arabidopsis thaliana
  peptide (1)..(496): Ceres Seq. ID no. 13615345
  misc_feature (69)..(247): Pfam Name: Glycosyl transferase Pfam Description: Glycosyl transferase
  misc_feature (1)..(496): Homolog of NCBI NO: 15221657 NR Description: glycosyltransferase family 2 [Arabidopsis
  misc_feature (1)..(345): Homolog of NCBI NO: 9369401 NR Description: T23E23.23 [Arabidopsis thaliana]
  misc_feature (336)..(496): Homolog of NCBI NO: 9369401 NR Description: T23E23.23 [Arabidopsis thaliana]
  misc_feature (1)..(496): Homolog of NCBI NO: 28393622 NR Description: putative cellulose synthase [Arabidopsis thaliana]
  misc_feature (1)..(496): Homolog of NCBI NO: 30688411 NR Description: glycosyltransferase family 2 [Arabidopsis >gi|8778578|gb|AAF79586.1|AC007945_6 F28C11.11 [Arabidopsis >gi|20466606|gb|AAM20620.1| unknown protein [Arabidopsis
  misc_feature (20)..(496): Homolog of NCBI NO: 30688416 NR Description: glycosyltransferase family 2 [Arabidopsis
  misc_feature (1)..(496): Homolog of NCBI NO: 15237519 NR Description: glycosyltransferase family 2 [Arabidopsis
  misc_feature (1)..(495): Homolog of NCBI NO: 18403914 NR Description: glycosyltransferase family 2 [Arabidopsis >gi|16604559|gb|AAL24081.1| putative glucosyltransferase thaliana] >gi|20197522|gb|AAD15455.2| putative
  misc_feature (1)..(495): Homolog of NCBI NO: 21536839 NR Description: putative glucosyltransferase [Arabidopsis
  misc_feature (1)..(496): Homolog of NCBI NO: 16519223 NR Description: cellulose synthase-like protein OsCslA9 [Oryza
MRSLLIVPMFKCLVAICLVISLLVFVESLYMNIVVIYVKLCKRKPEKIYKWEAMQEDLELGNQNFPMVLVQIPMYNEREVFKLSIGAACRLIWPLDRLIVQVLDDSTDPTIMEMVSTECGKWATKGINIKCERRDNRNGYKAGALKQGMRHSYVKTCTYIAIFDADFQPEPDYLERTVPFLIHNPELALVQARWKFVNAKKCLMTRMQEMSLNYHFTAEQESGSTRHAFFGFNGTAGVWRLAAMEEAGGWKDRTTVEDMDLAVRVGLHGWKFVFVNDVSVKSELPSQFKAFRFQQHRWSCGPANLFRKMTMEIIRNKRVTIWKKLYVIYSFFFVRKIIVHFFTFFFYCFILPTSVFFPEVNIPTWSTVYFPFMITLFNAIATPRSFYLVIFWVLFENVMAMHRTKGTFIGLLEGGRVNEWVVTEKLGDALETKLLPQVRKPRNGFLERINSKEMMVGIYILCCASYNLVFGKTVLYIYLYMQALAFIIAGIGFIGT

SEQ ID NO: 104589 - DNA, 855 bp, Arabidopsis thaliana
  misc_feature (1)..(855): Ceres Seq. ID no. 13615346
  misc_feature: MA Experiment ID: 108434 Result: Up-regulated in Transcription
  misc_feature: MA Experiment 108434 PARAMETER Experiment Name: At_Root_Tips_cDNA_P Parameter: Tissue Value: Root Tips
  misc_feature: MA Experiment ID: 108461 Result: Up-regulated in Transcription
  misc_feature: MA Experiment 108461 PARAMETER Experiment Name: At_Germinating_Seeds_cDNA_P Parameter: Age (day) Value: 1 vs. 0
  misc_feature: MA Experiment 108461 PARAMETER Experiment Name: At_Germinating_Seeds_cDNA_P Parameter: Tissue Value: Germinating Seeds
  misc_feature: MA Experiment ID: 108462 Result: Up-regulated in Transcription
  misc_feature: MA Experiment 108462 PARAMETER Experiment Name: At_Germinating_Seeds_cDNA_P Parameter: Age (day) Value: 2 vs. 0
  misc_feature: MA Experiment 108462 PARAMETER Experiment Name: At_Germinating_Seeds_cDNA_P Parameter: Tissue Value: Germinating Seeds
  misc_feature: MA Experiment ID: 108463 Result: Up-regulated in Transcription
  misc_feature: MA Experiment 108463 PARAMETER Experiment Name: At_Germinating_Seeds_cDNA_P Parameter: Age (day) Value: 3 vs. 0
  misc_feature: MA Experiment 108463 PARAMETER Experiment Name: At_Germinating_Seeds_cDNA_P Parameter: Tissue Value: Germinating Seeds
  misc_feature: MA Experiment ID: 108464 Result: Up-regulated in Transcription
  misc_feature: MA Experiment 108464 PARAMETER Experiment Name: At_Germinating_Seeds_cDNA_P Parameter: Age (day) Value: 4 vs. 0
  misc_feature: MA Experiment 108464 PARAMETER Experiment Name: At_Germinating_Seeds_cDNA_P Parameter: Tissue Value: Germinating Seeds
  misc_feature: MA Experiment ID: 108572 Result: Down-regulated in Transcription
  misc_feature: MA Experiment 108572 PARAMETER Experiment Name: At_Drought_cDNA_P Parameter: Timepoint (hr) Value: 1
  misc_feature: MA Experiment 108572 PARAMETER Experiment Name: At_Drought_cDNA_P Parameter: Tissue Value: Aerial
  misc_feature: MA Experiment 108572 PARAMETER Experiment Name: At_Drought_cDNA_P Parameter: Treatment Value: Drought vs. No Drought
  misc_feature: MA Experiment ID: 20000111 Result: Down-regulated in Transcription
  misc_feature: MA Experiment 20000111 PARAMETER Experiment Name: At_42deg_Heat_cDNA_P Parameter: Temperature (deg C) Value: 42 vs. 22
  misc_feature: MA Experiment 20000111 PARAMETER Experiment Name: At_42deg_Heat_cDNA_P Parameter: Timepoint (hr) Value: 6
  misc_feature: MA Experiment 20000111 PARAMETER Experiment Name: At_42deg_Heat_cDNA_P Parameter: Tissue Value: Aerial
  misc_feature: MA Experiment ID: 20000112 Result: Down-regulated in Transcription
  misc_feature: MA Experiment 20000112 PARAMETER Experiment Name: At_42deg_Heat_cDNA_P Parameter: Temperature (deg C) Value: 42 vs. 22
  misc_feature: MA Experiment 20000112 PARAMETER Experiment Name: At_42deg_Heat_cDNA_P Parameter: Timepoint (hr) Value: 2
  misc_feature: MA Experiment 20000112 PARAMETER Experiment Name: At_42deg_Heat_cDNA_P Parameter: Tissue Value: Aerial
  misc_feature: MA Experiment ID: 20000113 Result: Down-regulated in Transcription
  misc_feature: MA Experiment 20000113 PARAMETER Experiment Name: At_42deg_Heat_cDNA_P Parameter: Temperature (deg C) Value: 42 vs. 22
  misc_feature: MA Experiment 20000113 PARAMETER Experiment Name: At_42deg_Heat_cDNA_P Parameter: Timepoint (hr) Value: 8
  misc_feature: MA Experiment 20000113 PARAMETER Experiment Name: At_42deg_Heat_cDNA_P Parameter: Tissue Value: Aerial
  misc_feature: MA Experiment ID: 20000144 Result: Down-regulated in Transcription
  misc_feature: MA Experiment 20000144 PARAMETER Experiment Name: At_42deg_Heat_cDNA_P Parameter: Temperature (deg C) Value: 42 vs. 22
  misc_feature: MA Experiment 20000144 PARAMETER Experiment Name: At_42deg_Heat_cDNA_P Parameter: Timepoint (hr) Value: 1
  misc_feature: MA Experiment 20000144 PARAMETER Experiment Name: At_42deg_Heat_cDNA_P Parameter: Tissue Value: Aerial
  misc_feature: MA Experiment ID: 20000180 Result: Up-regulated in Transcription
  misc_feature: MA Experiment 20000180 PARAMETER Experiment Name: At_Germinating_Seeds_P Parameter: Age (hr) Value: 24 vs. 0
  misc_feature: MA Experiment 20000180 PARAMETER Experiment Name: At_Germinating_Seeds_P Parameter: Tissue Value: Germinating Seeds
  misc_feature: MA Experiment ID: 20000184 Result: Up-regulated in Transcription
  misc_feature: MA Experiment 20000184 PARAMETER Experiment Name: At_Shoots__P Parameter: Age (day) Value: 7
  misc_feature: MA Experiment 20000184 PARAMETER Experiment Name: At_Shoots__P Parameter: Tissue Value: Shoots vs. Whole Plant
  misc_feature: MA Experiment ID: 20000436 Result: Down-regulated in Transcription
  misc_feature: MA Experiment 20000436 PARAMETER Experiment Name: At_Drought_P Parameter: Age (day) Value: 7
  misc_feature: MA Experiment 20000436 PARAMETER Experiment Name: At_Drought_P Parameter: Organism Value: A. thaliana
  misc_feature: MA Experiment 20000436 PARAMETER Experiment Name: At_Drought_P Parameter: Plant Line Value: WS
  misc_feature: MA Experiment 20000436 PARAMETER Experiment Name: At_Drought_P Parameter: Timepoint (hr) Value: 12
  misc_feature: MA Experiment 20000436 PARAMETER Experiment Name: At_Drought_P Parameter: Tissue Value: Whole Plant
  misc_feature: MA Experiment 20000436 PARAMETER Experiment Name: At_Drought_P Parameter: Treatment Value: Drought vs. No Drought
  misc_feature: MA Experiment ID: 20000437 Result: Down-regulated in Transcription
  misc_feature: MA Experiment 20000437 PARAMETER Experiment Name: At_Drought_P Parameter: Age (day) Value: 8
  misc_feature: MA Experiment 20000437 PARAMETER Experiment Name: At_Drought_P Parameter: Organism Value: A. thaliana
  misc_feature: MA Experiment 20000437 PARAMETER Experiment Name: At_Drought_P Parameter: Plant Line Value: WS
  misc_feature: MA Experiment 20000437 PARAMETER Experiment Name: At_Drought_P Parameter: Timepoint (hr) Value: 24
  misc_feature: MA Experiment 20000437 PARAMETER Experiment Name: At_Drought_P Parameter: Tissue Value: Whole Plant
  misc_feature: MA Experiment 20000437 PARAMETER Experiment Name: At_Drought_P Parameter: Treatment Value: Drought vs. No Drought
  misc_feature: MA Experiment ID: 20000495 Result: Up-regulated in Transcription
  misc_feature: MA Experiment 20000495 PARAMETER Experiment Name: At_Guard_Cells_P Parameter: Harvest Date Value: 8/2/2002
  misc_feature: MA Experiment 20000495 PARAMETER Experiment Name: At_Guard_Cells_P Parameter: Organism Value: A. thaliana
  misc_feature: MA Experiment 20000495 PARAMETER Experiment Name: At_Guard_Cells_P Parameter: Tissue Value: Guard Cells vs. Leaves
  misc_feature: MA Experiment ID: 20001555 Result: Down-regulated in Transcription
  misc_feature: MA Experiment 20001555 PARAMETER Experiment Name: At_Drought_Soil_Dry_P Parameter: Age (day) Value: 24
  misc_feature: MA Experiment 20001555 PARAMETER Experiment Name: At_Drought_Soil_Dry_P Parameter: Organism Value: A. thaliana
  misc_feature: MA Experiment 20001555 PARAMETER Experiment Name: At_Drought_Soil_Dry_P Parameter: Plant Line Value: WS
  misc_feature: MA Experiment 20001555 PARAMETER Experiment Name: At_Drought_Soil_Dry_P Parameter: Post Timepoint (hr) Value: None
  misc_feature: MA Experiment 20001555 PARAMETER Experiment Name: At_Drought_Soil_Dry_P Parameter: Post-Treatment Value: None
  misc_feature: MA Experiment 20001555 PARAMETER Experiment Name: At_Drought_Soil_Dry_P Parameter: Timepoint (day) Value: 10
  misc_feature: MA Experiment 20001555 PARAMETER Experiment Name: At_Drought_Soil_Dry_P Parameter: Treatment Value: Drought vs. No Drought
  misc_feature: MA Experiment ID: 20001556 Result: Down-regulated in Transcription
  misc_feature: MA Experiment 20001556 PARAMETER Experiment Name: At_Drought_Soil_Dry_P Parameter: Age (day) Value: 26
  misc_feature: MA Experiment 20001556 PARAMETER Experiment Name: At_Drought_Soil_Dry_P Parameter: Organism Value: A. thaliana
  misc_feature: MA Experiment 20001556 PARAMETER Experiment Name: At_Drought_Soil_Dry_P Parameter: Plant Line Value: WS
  misc_feature: MA Experiment 20001556 PARAMETER Experiment Name: At_Drought_Soil_Dry_P Parameter: Post Timepoint (hr) Value: None
  misc_feature: MA Experiment 20001556 PARAMETER Experiment Name: At_Drought_Soil_Dry_P Parameter: Post-Treatment Value: None
  misc_feature: MA Experiment 20001556 PARAMETER Experiment Name: At_Drought_Soil_Dry_P Parameter: Timepoint (day) Value: 12
  misc_feature: MA Experiment 20001556 PARAMETER Experiment Name: At_Drought_Soil_Dry_P Parameter: Treatment Value: Drought vs. No Drought
  misc_feature: MA Experiment ID: 20001558 Result: Down-regulated in Transcription
  misc_feature: MA Experiment 20001558 PARAMETER Experiment Name: At_Drought_Soil_Dry_P Parameter: Age (day) Value: 27
  misc_feature: MA Experiment 20001558 PARAMETER Experiment Name: At_Drought_Soil_Dry_P Parameter: Organism Value: A. thaliana
  misc_feature: MA Experiment 20001558 PARAMETER Experiment Name: At_Drought_Soil_Dry_P Parameter: Plant Line Value: WS
  misc_feature: MA Experiment 20001558 PARAMETER Experiment Name: At_Drought_Soil_Dry_P Parameter: Post Timepoint (hr) Value: 6
  misc_feature: MA Experiment 20001558 PARAMETER Experiment Name: At_Drought_Soil_Dry_P Parameter: Post-Treatment Value: Re-Water vs. No Drought
  misc_feature: MA Experiment 20001558 PARAMETER Experiment Name: At_Drought_Soil_Dry_P Parameter: Timepoint (day) Value: 13
  misc_feature: MA Experiment 20001558 PARAMETER Experiment Name: At_Drought_Soil_Dry_P Parameter: Treatment Value: Drought vs. No Drought
  misc_feature: MA Experiment ID: 20001560 Result: Up-regulated in Transcription
  misc_feature: MA Experiment 20001560 PARAMETER Experiment Name: At_Drought_Soil_Dry_P Parameter: Age (day) Value: 28
  misc_feature: MA Experiment 20001560 PARAMETER Experiment Name: At_Drought_Soil_Dry_P Parameter: Organism Value: A. thaliana
  misc_feature: MA Experiment 20001560 PARAMETER Experiment Name: At_Drought_Soil_Dry_P Parameter: Plant Line Value: WS
  misc_feature: MA Experiment 20001560 PARAMETER Experiment Name: At_Drought_Soil_Dry_P Parameter: Post Timepoint (hr) Value: None
  misc_feature: MA Experiment 20001560 PARAMETER Experiment Name: At_Drought_Soil_Dry_P Parameter: Post-Treatment Value: None
  misc_feature: MA Experiment 20001560 PARAMETER Experiment Name: At_Drought_Soil_Dry_P Parameter: Timepoint (day) Value: 14
  misc_feature: MA Experiment 20001560 PARAMETER Experiment Name: At_Drought_Soil_Dry_P Parameter: Treatment Value: Drought vs. No Drought
actaacttctacataaacaaactcgttgcgctcttctcaattccacgaatcacacactcttcttcttcttctgttcatcaaagaaaacgaaacccatttctcaaaatccaaaattttcaaaaactcaaaactcatcatgggtttcatttcttcttcatcaccagtagaagagtctcattaccatacacacaagatcttccttttctccaactacatccttctcggcgctgcttcaagttgtatcttcctcacactctctctccgtctaatcccttccatctgcggattcctcctcatcctcctccacgccaccacaatcgccgccgcagtctcaggctgcgctgctgcatcttgcggaagaaaccgttggtacgccgctcacatggttgcaactgtgctcactgctatattccaaggctctgtctctgttctcatcttcaccaacacgtctaaattcctcgggagtcttaagtcgtatgtgcgtgaggaagatgctgctgtgattttgaaactcggtggtggtctttgtattgtgatcttttgtcttgattggatcgttcttgtgtgtgctttcttcttgaagtactatgcttatgtcgatggtggtgatggcgttgcgatgaagagaactggtaaggttcagagtgaggagaatccgaaggactggccatggccgttccaagtttaaagtttgtgtccttttgttttgtggtgagaactgttgagttagatcaatatcaaatgttggttttatggttctgtttcggtgggtattattgtgatttgttcatttgttttttgagtgtttgatgtaattcgtcaatgatctgttacatatataaagtcttttcttat

SEQ ID NO: 104590 - protein, 183 aa, Arabidopsis thaliana
  peptide (1)..(183): Ceres Seq. ID no. 13615347
  misc_feature (1)..(183): Homolog of NCBI NO: 15237310 NR Description: expressed protein [Arabidopsis thaliana]
  misc_feature (1)..(183): Homolog of NCBI NO: 21703131 NR Description: AT5g16250/T21H19_170 [Arabidopsis thaliana]
  misc_feature (1)..(183): Homolog of NCBI NO: 21553926 NR Description: unknown [Arabidopsis thaliana]
  misc_feature (1)..(183): Homolog of NCBI NO: 18396262 NR Description: expressed protein [Arabidopsis thaliana] unknown protein [Arabidopsis thaliana] Unknown protein [Arabidopsis thaliana]
  misc_feature (1)..(183): Homolog of NCBI NO: 15239379 NR Description: expressed protein [Arabidopsis thaliana] gb|AAF32471.1~gene_id:F24C7.9~similar to unknown protein thaliana] >gi|8953700|dbj|BAA98058.1|
  misc_feature (10)..(183): Homolog of NCBI NO: 15239407 NR Description: hypothetical protein [Arabidopsis thaliana]
  misc_feature (6)..(183): Homolog of NCBI NO: 38345379 NR Description: OSJNBa0067K08.8 [Oryza sativa (japonica
  misc_feature (16)..(159): Homolog of NCBI NO: 34907616 NR Description: contains EST C27797(C52876)~unknown protein
MGFISSSSPVEESHYHTHKIFLFSNYILLGAASSCIFLTLSLRLIPSICGFLLILLHATTIAAAVSGCAAASCGRNRWYAAHMVATVLTAIFQGSVSVLIFTNTSKFLGSLKSYVREEDAAVILKLGGGLCIVIFCLDWIVLVCAFFLKYYAYVDGGDGVAMKRTGKVQSEENPKDWPWPFQV

SEQ ID NO: 104591 - protein, 150 aa, Arabidopsis thaliana; identical to SEQ ID NO: 30540
  peptide (1)..(150): Ceres Seq. ID no. 13615348

SEQ ID NO: 104592 - protein, 101 aa, Arabidopsis thaliana
  peptide (1)..(101): Ceres Seq. ID no. 13615349
  misc_feature (1)..(101): Homolog of NCBI NO: 15237310 NR Description: expressed protein [Arabidopsis thaliana]
  misc_feature (1)..(101): Homolog of NCBI NO: 21703131 NR Description: AT5g16250/T21H19_170 [Arabidopsis thaliana]
  misc_feature (1)..(101): Homolog of NCBI NO: 21553926 NR Description: unknown [Arabidopsis thaliana]
  misc_feature (1)..(101): Homolog of NCBI NO: 18396262 NR Description: expressed protein [Arabidopsis thaliana] unknown protein [Arabidopsis thaliana] Unknown protein [Arabidopsis thaliana]
  misc_feature (1)..(101): Homolog of NCBI NO: 15239379 NR Description: expressed protein [Arabidopsis thaliana] gb|AAF32471.1~gene_id:F24C7.9~similar to unknown protein thaliana] >gi|8953700|dbj|BAA98058.1|
  misc_feature (1)..(101): Homolog of NCBI NO: 15239407 NR Description: hypothetical protein [Arabidopsis thaliana]
  misc_feature (1)..(101): Homolog of NCBI NO: 38345379 NR Description: OSJNBa0067K08.8 [Oryza sativa (japonica
  misc_feature (1)..(77): Homolog of NCBI NO: 34907616 NR Description: contains EST C27797(C52876)~unknown protein
MVATVLTAIFQGSVSVLIFTNTSKFLGSLKSYVREEDAAVILKLGGGLCIVIFCLDWIVLVCAFFLKYYAYVDGGDGVAMKRTGKVQSEENPKDWPWPFQV

SEQ ID NO: 104593 - DNA, 1316 bp, Arabidopsis thaliana
  misc_feature (1)..(1316): Ceres Seq. ID no. 13615350
  misc_feature: MA Experiment ID: 108434 Result: Up-regulated in Transcription
  misc_feature: MA Experiment 108434 PARAMETER Experiment Name: At_Root_Tips_cDNA_P Parameter: Tissue Value: Root Tips
  misc_feature: MA Experiment ID: 20000184 Result: Down-regulated in Transcription
  misc_feature: MA Experiment 20000184 PARAMETER Experiment Name: At_Shoots__P Parameter: Age (day) Value: 7
  misc_feature: MA Experiment 20000184 PARAMETER Experiment Name: At_Shoots__P Parameter: Tissue Value: Shoots vs. Whole Plant
  misc_feature: MA Experiment ID: 20000794 Result: Down-regulated in Transcription
  misc_feature: MA Experiment 20000794 PARAMETER Experiment Name: At_Petals_P Parameter: Age (day) Value: 23-25 days
  misc_feature: MA Experiment 20000794 PARAMETER Experiment Name: At_Petals_P Parameter: Plant Line Value: WS
  misc_feature: MA Experiment 20000794 PARAMETER Experiment Name: At_Petals_P Parameter: Tissue Value: Petals vs. Whole plant
  misc_feature: MA Experiment ID: 20001905 Result: Down-regulated in Transcription
  misc_feature: MA Experiment 20001905 PARAMETER Experiment Name: At_Drought_Reproduction_P Parameter: Age (day) Value: 40
  misc_feature: MA Experiment 20001905 PARAMETER Experiment Name: At_Drought_Reproduction_P Parameter: Organism Value: A. thaliana
  misc_feature: MA Experiment 20001905 PARAMETER Experiment Name: At_Drought_Reproduction_P Parameter: Plant Line Value: WS
  misc_feature: MA Experiment 20001905 PARAMETER Experiment Name: At_Drought_Reproduction_P Parameter: Timepoint (day) Value: 10
  misc_feature: MA Experiment 20001905 PARAMETER Experiment Name: At_Drought_Reproduction_P Parameter: Tissue Value: Rosettes
  misc_feature: MA Experiment 20001905 PARAMETER Experiment Name: At_Drought_Reproduction_P Parameter: Treatment Value: Drought vs. No Drought
ctttcgagtctgcagctagcgtgaagacgatgaaatcgatgggaggagatagataagcgcgaatttgagagtgaaaattctaaattcagacccattttcaccggcgcgagtcatcgttgaaccatgtcttggcttcctgtagaatctgatcctggtattttcactgagattatacaacaaatgcaagtgaaaggtgtgcaggttgaggaattgtattccttggacttcaactctctggatgaaataagacctgtctatggattgatattgctttacaagtggcgtccagaagaaaaggagaatcgtgttgtcatcacagagccaaacccgaatttcttctttgcaagccagataatcaacaatgcttgtgcgacccaagcgatattatcagtcctcatgaactcttcgagtattgatattggctcagaactatcagaactgaaacaattcgccaaagaatttcctcctgaactgaaaggtttagccatcaacaacaatgaggcaatacgtgcagctcacaacacatttgccaggcctgacccgtcttccatcatggaagatgaagaattagctgctgcgaaaaatctagacgaagatgatgatgtgtatcattacatcagctacttacctgttgatggtatcttatatgagctcgatggtcttaaagaaggacccattagtcttggacagtgtctgggtgagccagaaggaatcgagtggctcagaatggtccaacctgtggtacaagagcagattgaccggtattcgcagaatgagattcggtttagtctcttagctgtagttaagaacaggaaagagatgtatgtagctgaactgaaagagtatcaaagaaagcgagagagggttttgcagcagttaggtgctttgcaagctgataaatacgctgagaaaagcagttacgaggctcttgatagagagctttcggaagtcaatatcgggatagagactgtttcacaaaagattgtaatggaggaggagaaatctaagaactggaagaaagagaacatgagaaggaaacacaactatgtccctttcctcttcaacttcctcaagattcttgctgacaagaagaagctgaaacctctcattgctaagcaccatccctaaatctgctttaccgggatgttaacttgatagaaatcagatgttttagtgatctgaatactgtggtggcgtggttatatgtagccaaactttaacttgatggaagtcagatgttttagcgatccttgattgtaattggtctgaggattatgttgaaccaaatcttttttttttacttaattacatgttcc

SEQ ID NO: 104594 - protein, 334 aa, Arabidopsis thaliana; identical to SEQ ID NO: 28109
  peptide (1)..(334): Ceres Seq. ID no. 13615351
  misc_feature (1)..(334): Homolog of NCBI NO: 15237324 NR Description: ubiquitin C-terminal hydrolase-related protein
  misc_feature (1)..(331): Homolog of NCBI NO: 18408331 NR Description: expressed protein [Arabidopsis thaliana] ESTs gb|T45673,gb|N37512 come from this gene. [Arabidopsis >gi|17473568|gb|AAL38259.1| unknown protein [Arabidopsis
  misc_feature (1)..(331): Homolog of NCBI NO: 15724238 NR Description: F5I14.29/F5I14.29 [Arabidopsis thaliana]
  misc_feature (3)..(331): Homolog of NCBI NO: 6686411 NR Description: F1E22.3 [Arabidopsis thaliana]
  misc_feature (3)..(240): Homolog of NCBI NO: 31213193 NR Description: ENSANGP00000021708 [Anopheles gambiae]
  misc_feature (286)..(331): Homolog of NCBI NO: 31213193 NR Description: ENSANGP00000021708 [Anopheles gambiae]
  misc_feature (3)..(331): Homolog of NCBI NO: 34880465 NR Description: similar to Ubiquitin carboxyl-terminal hydrolase
  misc_feature (3)..(331): Homolog of NCBI NO: 12314148 NR Description: bA101E13.3 (ubiquitin C-terminal hydrolase UCH37)
  misc_feature (2)..(234): Homolog of NCBI NO: 39587753 NR Description: Hypothetical protein CBG13346 [Caenorhabditis
  misc_feature (259)..(329): Homolog of NCBI NO: 39587753 NR Description: Hypothetical protein CBG13346 [Caenorhabditis

SEQ ID NO: 104595 - protein, 315 aa, Arabidopsis thaliana; identical to SEQ ID NO: 28110
  peptide (1)..(315): Ceres Seq. ID no. 13615352
  misc_feature (1)..(315): Homolog of NCBI NO: 15237324 NR Description: ubiquitin C-terminal hydrolase-related protein
  misc_feature (1)..(312): Homolog of NCBI NO: 18408331 NR Description: expressed protein [Arabidopsis thaliana] ESTs gb|T45673,gb|N37512 come from this gene. [Arabidopsis >gi|17473568|gb|AAL38259.1| unknown protein [Arabidopsis
  misc_feature (1)..(312): Homolog of NCBI NO: 15724238 NR Description: F5I14.29/F5I14.29 [Arabidopsis thaliana]
  misc_feature (1)..(312): Homolog of NCBI NO: 6686411 NR Description: F1E22.3 [Arabidopsis thaliana]
  misc_feature (1)..(221): Homolog of NCBI NO: 31213193 NR Description: ENSANGP00000021708 [Anopheles gambiae]
  misc_feature (267)..(312): Homolog of NCBI NO: 31213193 NR Description: ENSANGP00000021708 [Anopheles gambiae]
  misc_feature (1)..(312): Homolog of NCBI NO: 34880465 NR Description: similar to Ubiquitin carboxyl-terminal hydrolase
  misc_feature (1)..(312): Homolog of NCBI NO: 12314148 NR Description: bA101E13.3 (ubiquitin C-terminal hydrolase UCH37)
  misc_feature (1)..(215): Homolog of NCBI NO: 39587753 NR Description: Hypothetical protein CBG13346 [Caenorhabditis
  misc_feature (240)..(310): Homolog of NCBI NO: 39587753 NR Description: Hypothetical protein CBG13346 [Caenorhabditis

SEQ ID NO: 104596 - protein, 243 aa, Arabidopsis thaliana; identical to SEQ ID NO: 28111
  peptide (1)..(243): Ceres Seq. ID no. 13615353
  misc_feature (1)..(243): Homolog of NCBI NO: 15237324 NR Description: ubiquitin C-terminal hydrolase-related protein
  misc_feature (1)..(240): Homolog of NCBI NO: 18408331 NR Description: expressed protein [Arabidopsis thaliana] ESTs gb|T45673,gb|N37512 come from this gene. [Arabidopsis >gi|17473568|gb|AAL38259.1| unknown protein [Arabidopsis
  misc_feature (1)..(240): Homolog of NCBI NO: 15724238 NR Description: F5I14.29/F5I14.29 [Arabidopsis thaliana]
  misc_feature (1)..(240): Homolog of NCBI NO: 6686411 NR Description: F1E22.3 [Arabidopsis thaliana]
  misc_feature (1)..(149): Homolog of NCBI NO: 31213193 NR Description: ENSANGP00000021708 [Anopheles gambiae]
  misc_feature (195)..(240): Homolog of NCBI NO: 31213193 NR Description: ENSANGP00000021708 [Anopheles gambiae]
  misc_feature (1)..(240): Homolog of NCBI NO: 34880465 NR Description: similar to Ubiquitin carboxyl-terminal hydrolase
  misc_feature (1)..(240): Homolog of NCBI NO: 12314148 NR Description: bA101E13.3 (ubiquitin C-terminal hydrolase UCH37)
  misc_feature (1)..(143): Homolog of NCBI NO: 39587753 NR Description: Hypothetical protein CBG13346 [Caenorhabditis
  misc_feature (168)..(238): Homolog of NCBI NO: 39587753 NR Description: Hypothetical protein CBG13346 [Caenorhabditis
